United States Patent Application Publication US 2006/0123505 A1 - sequence listing, part 15

SEQ ID NO: 24332 - DNA, 1374 bp, Oryza sativa
  ref <308>: DATABASE ACCESSION NUMBER: AK099774
  ref <309>: DATABASE ENTRY DATE: 2002-08-28
tgggagagaaatcgatcgatccgattccggccggccatggcagctgctgctccggcgacggcggcggtgcggcgcatgaagctgggctcgcagggtctggaggtctcggcgcaggggctgggatgcatgggcatgtccgccttctacggcccgcccaagccggagcccgacatggtggcgctcatccaccacgccgtcgccgccggcgtcaccctcctcgacacctccgacatctacggcccccacaccaacgagctcctcctcggcaaggcgctgcagggcggcgtgcgtgataaggttgagctggccaccaagttcggcatcgcgttcgaagacggcaagcgggacgtccgcggggacccggcgtacgtgcgcgcggcgtgcgagggcagcctccggcggctcggcgtcgacagcatcgacctttactaccagcaccgtgtcgacaagaaggtgcccatcgaggtcacgattggcgaactcaagaaactagttgaagaaggaaagataaaatatattgggttatctgaagcatctgcatcaactatcagaagggctcatgctgtacaccctatcactgctgttcagcttgagtggtcattatggtctagagacgtggaagaagatataattccaacttgcagagaacttggaattggaatagtagcttatagcccacttggtagagggttcttttctgctggagctaaactagtggagtctctatcagatcaggattttcgcaagcatattcctagatttcaacaagagaatcttgagaagaatgctgaaatatttgagcgtgttaacgcaatggcagccagaaaaggatgcacaccgtcacagctcgcattggcctgggtccatcatcagggaagcgatgtatgccccatacctgggacaacaaaaatcgagaatttaaaccaaaacattggagcactatctgtgaagctcacacctgaggaaatggctgaactcgagtcttacgcaagcacagatgatgttcgaggcgaccggtatcctcaggcgatggccaacactacttggcaaaattctgagacccctcccttgtcatcttggaaagctcagtaattgttttcatctgttcaaatacaaagtcctggtccaaaatagctgaatggcagagcgcacacaagattttgtagaacgtattcatcagtcgctggacgctgcttgctcctgttatacatcacgtatatttggaatgagatgtcctgtctgtctgtattgtgttatgttctatgctttcgtcatgtttgtgcctacaacctacttgtgtgaagtgcggttctataagcctgtgcactgcacgcagtacgtgtgctaataataaaataatgttttgcaatcacc

SEQ ID NO: 24333 - DNA, 4561 bp, Oryza sativa
  ref <308>: DATABASE ACCESSION NUMBER: AK099775
  ref <309>: DATABASE ENTRY DATE: 2002-08-28
gatctggccggcgagcggcagggacagcagagctgcgcgtccctcctgcttcaggccaagaggaggcggcggatctggggcgggcgggccttccttgctgtctacgacaggcttgttcccgacccccagtttgcaagcatggagctggcgacgggggcgatgaggagcctgctgcccaagctgcttcagctgctcgagaaagagtacggcctgcaaacgggcgtgagggagaagatcaagtctctcacgggagctcgatgtcgtgcacgccgtcctccgcaagatcggcgatgtgccatcggagcaggtcgatgagctggtcaagctttgggcgcgcgatgtcagggaggcatcctacgaaatggaggacatcgtcgacacattcttggtgcacgacgatggccctgaccccaccgatccacacatgctcctgcgcctccggaagaagttaggcaagctgttcaagaagagcaaggctcgccgtaagatctctaacctgatccaagacattaacaagaagttcgagcaggtgaaagcaaggcatgtcaagtacacagtcgacagcgttgtcctcaagtctctagcggcaacgaccatcgatcctcgtctccagaatctgtacaaaagggcaacagagcttgttggcattgacgggccaagggacgatctcataaacaagctatccctggggggtgatgttgatgtgtccgacaagaagatgaaagtcatctctgtcgttggatttggaggactcggcaagaccactcttgccaaagctgtctatgaccacttcaaaccgcatttcaagtgcagggcttctgttccagtcgaccagaatcctgacatgaataaagcattcgatgaccaggttgaaccgcatttcgaatgcggagcttttgttccagtgggtcggaatcctgacatgaagaaagtctttagagacattctcattgatcttgacaaggaaaagtacacgaatccgaatatgatggtgttggatgaaaagcagctcatggacgaactcaaggaattcgtcaaggagaagaggtgtttcattgttattgatgatatatgggacaaggagtcatggaaattaatcagatgtgctctgcaagaaagtgattgtggaagtagacttgtcataactactcgtatttctgaagttgccacacatgctggtgaagcttacaaaattcagccactttctcgtgataactctgaaaaattattgtatgcaagaatagttgatggtgaatggaagtatttcgataatccatcagctaaggcatgtgaaaaaattttgaagaaatgtggtggtgtaccattagctatcattacaatagctagtttgttggccagtaaaccaggggaggactggtctgaggtctacaactctgtcggttttgggcatgaagacaatgatgatgtaggtaatactagaaggatattgtcttttagctactatgatctgtcttcacatttaaaagattgcttattgtatctatgtgtatttcccgaagatcatgtgatagagaaaaatagtttgatatggaagtggatagctgaaggtttcatccatgaggaactagcagcagggttaggattatttgagctcggggagaggtgcttcaatgagttgataaatagaagcatgatccagccagtggagacaaaacatgaagggtatgtagatggttgctgcgttcatgatatggttcttgatatgatccactcattatcgagtgaagaaaattttgtcactgtattgaatggtgatgagcgacagaaacttccggggagcattgctcgcaggttagccctgcagcgtgttctagtgcacaaggatggtcagctagctaatatcactctgaagaatgtgagatcccttattgccagtcagtgcttcggttcattatgcctacacactccggttttacgtgtattagatgtgataaactgtgcagaaagtgagacgcctaatgttttggaagatagggacaaaactatgccaagccatcttgggagtttacttcacctgaggtacctcgggttagtagatacatatatcactaagctgcccagggaagtaaggtatctcaagtttctgcagacactggatttaaggggaagtcgcataaaggagctgccagaggaggtgggactgctgacacaacttgtttgcctacgagctgattgggaaataatggtgaagattggtttgatcggtaagttgacctcattgcaagagctttggatagagcctgctgctgctgtttatgatgacgatgctgcttctgttgatgatgatgatgatgctgctgctgttgatgatactacgaagtctacgatgaagtttgtgaatgagctgggcctactgagggaactaagggtgctccggacttattttgaggatttgaatgagagcatggagagagctttgttggaatccctaagcaagctgcacaatatccgggacctgcacattgagggcccacccctagtgacaaggagagtgacaagcagtgcaagatctgtctcctgcctgcatctccgatacctgtgtctgaattgctttgtgttctctggactgccagcatggattaaatcatcgcttgctccgaacctctcctgtctggatgtggttgtgctaattgtgaaagagcaggacatggaaacccttgcgaggttgccagagctccgctgccttgtgctgcgtttgcatgagaccgaattggttagcataaagattcatactgaagatgttggctactttcggaagttgagaatcttaaggatacttggtacatctatctggtttgatctgcacggcagcaagtgcaacatcacagacaatagaagcttagcatctattatcatgccaagtcttgaattcctcgagtttgctgtccatatgcgtttcctgaaagatgcaacccagcttggttttgacaagctgcttagcttcgagaagcttggaagaagttcgctccagaaagtcaccatagtactgaaatgtggagatgcccgtctgtcagaggtggaggaagtggctgctgcattgatgaactcagctgcggtccatcccaaacacccaactgttcaaaccaaatggcaagacgaacaagctgtgctctcaccctaccaagaggcatatatgcatgtgagcagaaccccggagttggtaaatgaggcctggaaggcgaacattgttagctctggccgtattcgagcactgcgtatgccagttacagaagcatcttcaagcaaagttatctgtctgctttatagaaaaagtgggaagggacttttagctctcagctcaaatgctgttcataagctgtggaaatgggagagcaatgacaagaatcctgctggcatgtccaccacatctgtcccacctcaagtgtggcaaccggaaagtgacattctaatgaatgacactgctaatggcaaccctgaagaagcagctgcctgcagtctactatccaaaaatgactgctatctaatttctgcatctggtggcaaagtttcgttgttcaacatgttaaatttcaagaccatgactactttcatagcacctccaccctctgcaactttcctcgcattccacccgcatgacaataacatcatagctattggaacggatgactcttcgattctactctacaatatccgtgttgacgaggttaaatgggtgctcaagggccatcagaaaaagataactggactggtattctcgctatcaatgaatgtgcttgtatcttcaggtgctgattctcagctatgtgtttggagtatggaagattgggcgaagaagaaatccagatatatccaacctccatctaatcattctggagctttagttggtgatataatggtgcagtttcactatgaccaaaagcgccttttagtagttcatgagagccaattggcgatctacgatgaggagctagaatgcttgtgctcatggttcccaagtgatccactctctgctccagtttcgagtgcagtatactcatcggatggcttattgatctacgctggattctgtgatggtgcaattggaatatttcaagtggaatctctcatgttacagtgcaggattgcaccttctgcctatataccatcttcagtttctagcggtggtgaaattgtgtatcccatggttgtcgctgcgcatccctggaagcctaaccagtttgcagtcggcatgagcgatggtgcagttcatgtgctggagccgttggacacacccgatgatatcatcagcaattcaattcagcaggggcgttttggtgacagcggatgatgtgtggacagggtgctcaatacggttggcaggctggatggcaatacttgcttggcctatggtgatagattatttttttcgccagccggttaagaaagcagaccaaatttcatcaagggaagaagtacttactacaaactagaaagcaaactggaaaggtagcccgcgtgaatgcgcgggcatgcttgttattttgtttaaaaacaggtctaccaaaataagtttaaattaatgttaggtatttcccttttt

SEQ ID NO: 24334 - DNA, 1873 bp, Oryza sativa
  ref <308>: DATABASE ACCESSION NUMBER: AK099776
  ref <309>: DATABASE ENTRY DATE: 2002-08-28
gaaactcaaagacaagcgaggattagcgatcgataactggagggagtatacagttggaaaattcaaactagacgctgatcatatcgagggagagttcaactcaactggagcgcggagatggcaacgcccaagctgtcccctgtatcgccggtgcggccggaagataagcagcgcgcgtcctcctcgtcgtcgtcgggggcggtggctgcgcctctgagggtgcaggacgatacggcggtcgaggagtacgagcagtacctgcggcttccggagctcgcaaggctgtggaaggataggtgctgtccggagtgggccgacgagggcctcgtcaagccggcgctgcaggcgctggagatcaccttccgcttcatctccgtcgcgctctccgacccgcggggctacgccagccgccgcgagctcgcgcggcggctggaggcgctcgcggcaagggaggtggagctggtggccgcgctctgcgagggcgagcagtgcccgccgctggccgagctgagcgcgtccaaaggcgtgctcccgcgggagcggagcgcgtctgaggtgtggaagattcccggtagcgccgccgcggtggtgtgccaggtcagcgaggccagcctgctcccgcggctcgccgcttgggacaagtccgagaccgtggcggccaggatcaagtacgccatcgagagccagatgcagggctgcgtgttcaccctcggcctcggcgagcccaacctcgccggcaagccggtgctcgagtacgaccgcgtcgtgaggccgcacgagctgcacgccctcaaggcgaagatcgcgccggagcccaagaccggctaccgcaacaaggagaacgaggcgctgttcactatccaccagatactcgagtcctggctgtgcgcggcctcacagcttctcacccgcctaaacaaccggatcgaagcaagaaactgggaggccgcggcgagcgactgctggatcctggaacgcgtctggaagctgctcgccgacgtcgaggacctgcacctgctgatggacccggacgacttcctgcggctcaagagccagctcgcaatacgggcggcaccgggctccgacgcgtcctcctgcttccgctccagggcgctgctgcacgtcgctaacgccacgagggacctcaagaagcgtgtgccatgtgtgcttggcgtcgaggtggaccccaacggcgggccgagggtgcaggaggcagccatgaggctgttccacagccggcggcgcggcgagggcgaggaggccggcaaggtggagctgctgcaggcgttccaggccgtggaggcggcggtgaggaggttcttcttcgcgtaccggcagctcgtggcggcggtgatgggcaccgcggagtcgtcgaccaaccgcgcgctgttctcgccggcggaggagatggaccccctggcgcagatgttcctcgagccgccctacttccccagcctcgacgccgccaagacgttcttggccgactactgggtacggcggatggccggtgacggtgactctgcttcgtccaggcgaagctgagcggcggaaatagtggcggatggatgccgccggaccctgaattttgcagtctttcaaggttgatgatacatttaatacatttatgatttatttctgtagggtagtggtcgcgttcatctttcagttcgagtaaatgttttattgggagacattttggtttagatttgattactagatggtaacgggaaaatgatctaggatcatatatttcaattagagtactgatgatgtatataatgctctgtaaatatgtttcaatggattatgtgtccgatattgataatgtttgatgtactacgaattgtttcaaaggaaaaattatttcctaacc

SEQ ID NO: 24335 - DNA, 2296 bp, Oryza sativa
  ref <308>: DATABASE ACCESSION NUMBER: AK099777
  ref <309>: DATABASE ENTRY DATE: 2002-08-28
gggtaaaaaaaaaaggagagagagaggagagacaggtcgcttcctgcttccattggagaagaggagaggagaggagaggagaccgagccggcggcggcggcgacgaggagagggagctgatcgggcggtccccccctttgccgaggggacgccggcggcctccgggttgggtccacttggcagcggtgagcggcggcgggggatggcggaggcgcggctgctgcggcggcggcggctgtgcttggcggtggcggtcgtgtgggtggtggcggtggccgtgagccgggtcggcgccaacacggagggtgatgccctatatagtctgcgccaaagtctgaaagatgctaacaatgtgctgcagagttgggatcccactctggtcaatccatgcacatggttccatgtaacttgtaaccctgacaacagcgtgatcagagttgatcttggaaatgcacaactgtcaggtgcattggttccccagcttgggcagttgaaaaatctgcaatatctggagctttacagcaacaacataagtgggacaatacctaatgaactgggaaacttaactaacttggtcagtttggatctttacctgaacaacttcactggttttattccggaaaccttggggcaactctacaagctgcgtttccttcgtcttaacaacaacagtctttctggttcaattccaaaatccttgaccaatatcactactcttcaagttctggatctctcaaataacaatctctcaggagaggttccgtctactggctccttttcactctttacccctataagttttgctaataataaagatctttgtggcccgggtactacaaaaccctgccctggagctccacctttttctccaccacctcctttcaatcccccaacacctactgtgtcacaaggtgactccaaaactggagcaattgctggaggtgttgctgcagctgctgcattgctgtttgcggttccggcaattggatttgcatggtggcggcggcgtaaacctgaagaacacttctttgatgtccctgctgaggaggatccggaagtgcaccttggccaacttaagagattctcactccgggagcttcaagttgctactgataactttagcaataagaatattctgggaagaggtggctttggaaaggtgtacaaaggtagactggcagatggctcgttggtagcagtgaaaagattaaaagaagaacgtacccctggtggtgagctccagttccaaacagaagttgaaatgattagcatggcggtgcataggaacctgcttcggctccgtggattttgcatgacgcctacagaacggttacttgtctatccctacatggctaatgggagtgtcgcatcacgattgcgagagcggcagccaaatgatccgccgcttgaatggcaaacaagaactcggattgcgctgggatctgccagaggattgtcctacttgcacgaccattgtgatcccaagatcattcatcgtgatgtcaaagctgcaaatattctgttggatgaagattttgaggcagtcgtgggtgactttggactggccaaacttatggattacaaggacactcatgtaaccacagctgttcgtgggacgatcggacacattgctcctgagtacctctctactgggaagtcctctgagaagactgatgtttttggctatggaatcatgcttcttgagctcattacaggacaaagggcatttgatcttgctcgtcttgcaaacgatgatgatgtgatgttgctcgattgggtgaaagggctcctgaaagagaagaaggtggagatgctggtggacccggacctccagagcggcttcgtggagcatgaggtggagtcactcatccaggtggctctgctctgcacgcagggctccccgatggaccggcccaagatgtcggaggtggtgaggatgctggagggcgatggcctcgcggagcggtgggaggagtggcagaaggtggaggtggtccggcaggaggcggagctggccccccgccacaacgactggatcgtcgactcgacctacaatctccgggcaatggagctgtccggcccgaggtaaaagaaacgaaagacaaaatcacaaagcatccaacctttgctcgacggcttcctcgcccttgtttgtgtatatgacagacagatcgatagctggcaaatctggagggaaaaatggtttacttgtaaccctccctggtgcctcggtaattttcaagtaggctctgcacttggttgtcgttagaaatgcatggccgggcggaattgcaac

SEQ ID NO: 24336 - DNA, 2547 bp, Oryza sativa
  ref <308>: DATABASE ACCESSION NUMBER: AK099778
  ref <309>: DATABASE ENTRY DATE: 2002-08-28
ggctccggggggagtcgccgcgccgaggaatatccgctcgcgactcgcgaggatgatgacgacacggaacgaaaagaagcggggcgcgcgcgccgtcgctgtccgcggcagcgtcagccgcctcgcctcgcctgccgagcaccagcagacaccgcgagaaagtacaaatcggagtcggagctagcgccacccaccccgctgtcgccgcgctgaccccttccaccaccaccacccgcctcgccttccgccggcagcggcagcggcagcgccagcacgcggcggcggctagcggccggcccgctcctccaagacatggccgcccgcttcggccccctcctcctcgtactccccctctcctccgcgctgctcgtcctctccgccgccacggcgccccgtggccgtcccagccaagtggatgtggggaggcagctgagggaggagttgtgggagagaaaccaagggcacgagatgctcaggtcgtggcgcgacggtgacccgtgctcgccgtctccatgggaagggttctcttgccgatggaaggacggcaacctcttcgttgtcaagctgaacttttcttcaaagaaactgcaggggccgattcccgccgcgattggtaacttaacagaactagatgagattgatctgcaggacaacaacttcactggttctattccagaatctttctttgatctcacacacttgctgaagctgtcagtaaagtgcaaccccttcttgaacaatcagctacctcatggcctatctatcagcgtggaatttagctatggaggctgcgcttatcatagtccacctggagcttccaatcagagaatagctgttattggtggtgttgccggaggatctttggcatgcacttttgcacttggatttttcttcgtttgtttcgacaaacgtgaaaagaatcctcagaaaaaagactgctcttctacaagaaatcctgtttttgaagaatgtagcacccacaaagctacaaactctgcagtacaacagttatcccttaaatcaatccagaatgcaacgtgcaacttcaaaaccttaataggggagggtgggtttggatcagtttatcgaggaacattagcacatggtgaagaagttgcagtaaaggttcgttcaacctcgtcgacgcagggaacacgtgaattcaacaatgagttgaggctgctttctgctgtgcggcatgataatttggtcccactaattggatattgctgtgaaaaggatcaagaaattttggtctatccattcatgtccaatggttctctacaggatcgcctctacggtgaggcgtcaaaaaggaaagttcttgattggcctaccagactatctgtttgcattggtgctgctagaggactagcacatctgcacggttttgctggccgctgtatcatacacagagacgttaagtccagtaacatacttctggaccacagcatgtgtggcaaggttgcggactttggtttttctaagtatgcacctcaagaaggtgacagtaatgcatcaatggaagtcaggggaactgctggatatttagaccctgaatactattcgactcagtcattatcaaccaaaagtgatgtgttcagttttggagtggttctcttagaaattgtaaccggaagagaacctcttgatgttcagaggcctagggatgaatggagcttagttgaatgggctaaaccatacattagagaatacagaattgaagaaatcgttgaccctggcataaaagggcaatattgttcagaggccatgtggagggttcttgaggtcgcatcagcatgcactgaacctttctcgaccttccggccaagcatggaagatgttgtcagagagctagaggacgctctgataatcgagaacaacgcttcagagtacatgaggtccatcgaaagcacggggacacttggctccaaccgctacctgtccattgataggaagatgtttgcttcgggttcagctcgattcgcatcatttgacgctacgaaagggcatttgcaaacgatgccttcgcttccggggtagtttggctgtgcaatggctattgtttttatgacctcagggggatgtcatgcttgtgttgaaggcatcaagcaacgattggcaagataaggatatggagatgctccgtaaactatacccatctgtacagatatcagaattcagagatcatgcagtgatgatatgggaaaagcttcacaaacagagcagttttgcctttgcagtttgtactgattcaatgcttctgaaagtgccctcatatactactctttggtttcggtcttagatcacttcattgtttcgattcctcctccttcagaaagtatagtacaaaggatgtaattcatttaatgctactatattgccttttgcaatctttcagacaatttgagtcgcagttatcaacaattggatgagtgcgtctttgttcaaacaaggattatcgatctggttcacttaaatcaagctgtactgttcccgatgtttcttcccaagcgctatgatacaggaagtgtcaattcaaatggc

SEQ ID NO: 24337 - DNA, 720 bp, Oryza sativa
  ref <308>: DATABASE ACCESSION NUMBER: AK099779
  ref <309>: DATABASE ENTRY DATE: 2002-08-28
ggatttgctctagctagctcgtcgttagccacccatggctgcttctcctgcttccactgccgccgccgtcgtgaatgcgccggcggccaccggcgggctgctgctgccgcgggggaggagtagttggagttggagttgctgcaacaataacaattcttcgatggggaggaggtggcgggcggcggcggtgggggaggtggcggcggaggggaacacgtacctgatcgcgggggcggtggcggtggcgctggtggggacggcgttcccgatactgttctcgcggaaggacacgtgcccggagtgcgacggcgccgggttcgtgcgcaagggcggcgccacgctgcgcgccaacgccgcccggaaggacctcccccagatcgtctgccccaactgcaacggcctcggcaagctcggccagatcgacaagtaatcatccatctctacctacctgcttcatcgacgatccatccatccatccatcatcatccagctgccagcttctgatcatctgatcactatatacatgtgtgtatctcaccatctgtgtgcgtcgtctatataactatatactataatcgttagtttggaacgctggaataattccatatatatggtctaattccagtgttccaagccggctatatatcaatcgctacttaaattcaatgtacttgtgttgctgagctactttgtctctgatatacatattcattgtctctc

SEQ ID NO: 24338 - DNA, 3618 bp, Oryza sativa
  ref <308>: DATABASE ACCESSION NUMBER: AK099780
  ref <309>: DATABASE ENTRY DATE: 2002-08-28
gtttagtaacaccaaagatggagtctggaacttgcagaatgaacagacaaaagaaaggacagctattgcctttctaagagttgatgatgagcatatgaaagtgtttgagaaccgtgtcaggcaaatccttatgtcctcagggtcaactacattcactaagattgttaacaagtggaatactgctcttattggtcttatgacatatttccgtgaagcaactgttcatacccaggagctcttggatttacttgtcaaatgtgaaaacaagattcagactcgcataaagattggactgaactcaaaaatgcctagcaggtttccgcctgttatcttctatacacccaaggaaattggaggtctgggaatgttatcgatgggtcacattctgataccacagagtgatctcaggtacagcaaacagacagatgttggtgtgacacattttcggagtggtatgagccatgaagaggaccagcttatccctaacttatatcgctacattcagccctgggagagtgagtttattgattcacagcgggtttgggctgagtatgctttgaagaggcaggaagcacaatcacagaacagacggttaacacttgaggatcttgaagattcatgggatagaggtattcctcgtatcaacactcttttccaaaaagaccgtcatactttggcatatgataaaggatggagagtgagaacagactttaagcagtaccaagtgctcaaacaaaatccattctggtggacacatcagagacatgatggaaaactatggaacctaaacaactataggactgatgtcatccaagctcttggtggtgttgagggtattttggaacacaccttgtttaaaggaacgtatttccctacttgggagggtctgttttgggagaaagcgtcaggttttgaggagtccatgaaatacaagaagctgacgaatgcacaacgttctggtctcaatcagatacccaaccgaagatttaccctgtggtggtcaccaaccatcaatcgtgcaaatgtgtatgttggtttccaggttcagctagatcttacgggcattttcatgcatgggaaaattccgaccctgaagatttctttaatccagatcttccgtgcgcatctgtggcagaagatccatgaaagtgttgttatggatctttgccaagttttggatcaagagctggatgcactggagattgagacagtgcagaaagagacaatacatccgaggaagagttacaagatgaacagctcctgtgcagatatcctcctttttgctgcacataggtggcagatgtctaaaccgagcttagtctctgagtcaaaggatgtctttgatcagaaagctagcaacaagtattggattgatgtgcaacttcgatggggagactatgattcacatgacattgagcgttatacaagggccaagttcatggactacactactgacaatatgtcgatatatccatctccaacaggggtgatgattggaattgatctagcatataatttgcactctgcttttggcaattggttccctgggtcaaagccccttcttcagcaagcaatgaacaagataatgaagtcaaatcctgctctgtacgtgctgagggagagaataaggaagggtctacagctgtattcttcagaacccactgagccgtatttgtcttcacagaactatggagagatattcagcaatcagatcatatggtttgtggatgacacaaatgtctatcgagttaccattcacaaaacatttgagggtaacttgaccactaaaccaatcaatggtgctatttttattttcaatccaagaactggtcaactatttctgaaggtcatccacacaagtgtatgggctggacaaaagcgtcttggacaactggccaagtggaaaacagctgaagaggttgctgcattagttcggtcgcttcctgtagaagagcagccaaagcaaatcattgtgacaaggaagggtatgttggatcctttggaggtccatctgcttgacttccctaacattgtgatcaagggcagtgagctgcagctgccattccaagcttgtttgaagattgagaagttcggtgatcttattctcaaggccacagaaccccagatggttctttacaacatatatgatgattggttgaaaagtatctcatcattcactgctttctctcggattgtgcttatattgcgtgcacttcatgtcaataatgagaaggcaaagatgctgctcaagcctgacaaaactattgttacggaaccacatcatatttggccaaccttgactgatgagcaatggctgaaggttgaatgtgcactcagggacctcatcctgtctgattatgcaaagaaaaacaatgttaatacgtctgcgctgacacaatctgaaattcgtgacattatacttggtgctgaaatagctccaccatcacagcagaggcaacagattgctgaaattgagaaacagtctagagagacgactcagctgaccgcagttactacaaggacgaccaatgtgcatggagatgagctcatcatcacaacgaccagtccatacgagcaacaagcatttgcatcaaagactgattggcgtgttagggctatctctgccacaaacttgtatcttcgtgtcaatcacatttatgttaactcagatgatataaaggagactggctacacttacattatgccaaagaatatattaaagaagttcatatgcatagcagatttaaggacacagattgcagggtttctgtatgggctgagcccacaggataatccccaagttaaagagatcagatgcatagctattcctccgcagcacggaactcatcagatggtgacactgcctgcaaaccttcccgagcacgagttccttaatgatttggagccactgggatggatgcatacccaaccaaatgaagctcctcagctatcaccacaggatttgacatcacatgccaagatcttggagaacaacaagcaatgggacggtgagaagtgcatcattttgacatgcagctttaccccaggatcttgttcattgaccgcgtacaagctgacgccaagcggttacgagtggggccgtagcaacaaggacaccggaagcaacccacatggatatctcccgactcactacgagaaggtccagatgcttctcagcgacagattcctgggattctacatggtgccggataacaccccttggaacttcaacttcatgggagtcaagcacgacccgctgatgaagtacaacatgaagcttggcacgccccgggacttctatcacgaggaccatcggccgacgcatttcctcgagttcagcaacatcgacgagggcgaggtcgcagaaggtgatagggaggacaccttcacgtaagcaggcgccacgaacgcctatgctaccatagcctttctgctacgaacttcgcgctgtttcgagtagagatccgtaacctgtaacttgacgcaaccggtagtagcatatgatgcttgttttgaggagattgtataccctgatgtagtctgcccttgaaagaacagggtgtttgtagtttgtacaagtgcacgccatgataacagtgaagattttgcttactctcg

SEQ ID NO: 24339 - DNA, 2021 bp, Oryza sativa
  ref <308>: DATABASE ACCESSION NUMBER: AK099781
  ref <309>: DATABASE ENTRY DATE: 2002-08-28
gatacgcaccactgaaccacctgcaagacggaggtggtttcagagtttagagataagatggcgctgcatcttcttcacctgcttgccttctccctgctcttcgcagtggcgacccctatcagggacatcaccgatgtgtgctcgtcacagatcaaggatttccagtacctgaacagcacgggcctgcaccttgagctgcaccacccgcggagcccctgctcgccggcgccggtcccggccgacctcccgttcacggcggtgctcacccacgacgatgcgcgcatctcgtcgctggcggcgcgcctcgccaagacgccgtcggcgcgcgccacctccctggacgccgacgccgacgccggcctcgccggctccctcgcgtccgtgccgctcagccccggcgcgtccgtgggcgtgggcaactacgtgacgcgcatgggcctcggcacgccggcgacgcagtacgtgatggtcgtggacacgggctcctcgctcacctggctgcagtgctcgccgtgcctcgggtcgtgccaccggcagtccggcccggtgttcaaccccaagtcgtcgagcacctacgcctccgtggggtgctccgcgcagcagtgcagcgacctcccctccgccacgctcaacccgtcggcttgctcctcctccaacgtctgcatctaccaggccagctacggcgacagctccttctccgtcggctacctcagcaaggacaccgtctcgttcggctcgacgtcgctgccaaacttctactacggctgtggccaggacaacgaggggttgttcggccgatccgccgggctcatcggcctcgcccgcaacaagctctcgctcctgtaccagctcgcgccaagccttggctactccttcacctactgcctcccgtcgtcgtcgtcatcggggtacctgtcgctcgggtcgtacaacccggggcaatactcgtacacgccgatggtgtccagctcgctcgacgactcgctctacttcatcaagctgtccgggatgacggtcgccgggaatccgctgtccgtgtcgtcgtcggcgtactccagcctgccgacgatcatcgactccggcacggtgatcacgcgcctgccgacgagcgtgtactcggcgctgagcaaggcggtggcggcggccatgaaggggacgtcccgcgcgtcggcgtactccatcctcgacacgtgcttcaagggccaggcctcgcgggtgagcgcgccggcggtcaccatgtccttcgccggcggcgcggcgctcaagctgtcggcgcagaacctcctcgtcgacgtcgacgactccaccacgtgcctggcgttcgcgccggccaggagcgccgccatcatcgggaacacgcagcagcagacgttcagcgtcgtctacgacgtcaagagcagcaggatcgggttcgccgccggcggctgcagctgagaacgccgagagcgccgccgaacgcgcacccaggcatggtccgcatggatacttgggtaaattaatgggcaatccatttgctattggctatactagctagcacgccattcatcaattcaaccacacaagctgttacataagcatggggatgaacatatcacaaggtagataaaaacgaattggtaaaggtgtttgctctagcgcttagataagaaaacacaactcaaaaacaatattagcgtaatgttaattaatttatgttgtcgaggccagggggtacagagtatttgaaagtggaacagcagaactccaaatatgatacactacacaaatccagtagaggtgacatatatagcttgtcatgtagtaattctttggcaagtactggccgaaatgtttactctgtaaatgtaaattaatgggtgtgtgtgtgctgcgtttgtagcttcttctttagtaagtacaagagctccaaaactgtaagcctgtattcgtgtgtgagtactttggacaatgaaatcaagttggtttatatactccaaagaaatatatatattcctgctatctgaattttcagatacttttgc

SEQ ID NO: 24340 - DNA, 5774 bp, Oryza sativa
  ref <308>: DATABASE ACCESSION NUMBER: AK099782
  ref <309>: DATABASE ENTRY DATE: 2002-08-28
ttggatgcaaactgttgaagcgatcacgcacgcctcgcttccgcctaatccgaaggagacaagcaaatcaaacaagcgaacaaaagcggcagcccgaataaaccagctgcgcagcatgctgcgtgagacggggagatgagcttgctgcggaaccgccgcgccgcggcggcggcgggttcgggggagcagacggtggtgcaggcggcgtacaacatcatcccgatccaggacgtggtgatgcacggggaccacccgtcgctgcaggtgccggaagtgcgggcggcggtggaggcgctgtcgcacgcgtcggacttcccggcgccgccgctggcccgcgtctgggacccgcaccgcgccgacatcttcgactggctcggcgccaccttcgggttccaggcggacaacgtccggaaccagcgggagcacctggtgctcctcctcgccaacgcgcagctccgcgccgcgccgggattccccaaggaccaccccatcgacgtcctccacctcaccgtcgcccgcggcatccgcaggaagctcctcaagaactacacctcctggtgcgcctacctcggccagaagcgccacttccgcgtgcccagcggcggcggcggcggccgccgcaccggcgctgccaccggcaacgacgtccgcatggacctcctctacacggcgctgtacctgctcatctggggggaggccgccaacctgaggttcatgccggagtgcctctgctacatcttccactacatggccctcgacctccaccacgtcgtcgagcagtccatcgacatcgagacagggcggcctgcgatgcccgccgtgtgcggcgaggacgccttcctcatccgcgtggtgactccgatctacaacgtcctcaagaacgaggtggaggccagccggaacgggaccaagccgcactcggcgtggaggaattacgacgatgtcaacgagtacttctggagccgacgagttttcaagcggctccggtggccgctggatccatcgaggagcttctttgtggagcctggaaagactgggcgcattggcaagactggctttgttgagcagcggtcattctggaatgtctaccgaagtttcgatagggtatgggtgatgcatattctgttctttcaagctgcgatgattgttgcatgggatggtaaaaccccatgggttagcctcagattccgggacatccaggtccgggtgctgtctgtgttcatcacttggggtggactgcgctttgttcaggcaatgcttgatgcgggtactcagtacagtctcgtgtcgagggagacaaaaacagtggctgttcggatggtgctcaaggtgcttgttgctgcagggtggacaatcacattcagtgtgctctataagcgaatgtgggatcagcggtggcgagatcgcaggtggtcctttgctgccaataccagagtgctgaattaccttgaggcagctgctgtgtttgtcatcccgcaagtgcttgcgattgtgctcttcatcatcccttggattcgaaattttctggagaaaaccaattggaaaattctatatgtgctgacctggtggttccaaacacgtacatttgttggccgtggtctgagggaaggtctcattgataacatcaagtactccatattctgggtgtgcctccttgtttctaagtttagcttcagctactttctccagattaagccgatggtggggccaacaaaggtaatcttcaaactccatgacatcaagcgtaactggtttgagttcatgcctcacacagagcgccttgcagtaatcatcctgtggctcccagttattatcatttacctcatggatatccagatatggtatgcagtcttctcatcactaacaggggcgcttatcggccttttctcgcatctgggggagattcgcagtgttgagcagctgcgcttgaggttccagttctttgcaagtgcaatgcagttcaatttaatgccagaggagcacctggataccgttcatggtggcatccgcagcaagttctatgatgcaatcaatcggctgaagctgagatatgggtttggccgtccatataggaagattgaagcaaacgaggtggaagctaagaggtttgcactggtttggaatgagatcattcaaacatttagggaagaggacatcattagtgataaagagcttgggcttcttgagctgccggcagttgtgtggagaattcgtgtggtacggtggccttgtttgctgctaaaaaatgagcttcttcttgctctcagtcaggcagcagagctggtggctgatgacaggacacattggaacaagatatgtaacaacgagtacaggcgatgtgcagtaattgaagcttatgacagcatacgtcacttgctgctggaaataatcaaggagagaactaatgaacacattattgtcaatcagctattccttgcatttgatggtgcaatggaatatggaaagttcactgaagaatataggctaaccttattacctcaaattcataagtatgtaatctccttagtggagcagcttctattgaaggacaaggatcagatcaagatagttcgtaccttgcaggatctgtatgatcttgcagtgcatgattttccaaaaatcaagaaggactttgaacagctgaggcgagaggggctagcactatcaagaccaaccgaatctcagctgctttttcaggatgccataaaatgcccagatgacaatgatgttagcttctataagcaggtgagaagactccatacgattctcacatccagggattctatggacgatgttccaaagaaccccgaggctcgtcggcgcataactttcttcagcaactccctgttcatgaacatgcctcgtgctcccaccgttcagaggatgatggcattcagtgttttaaccccatattacaatgaagatgttctgtacaacaaggaccagcttcgtcgtgagaatgaagatggcatctcaatcttgttttatcttcaaaagatttatgaagatgattggaaaaactttttagagcgcatgcaaagggaaggaatggctagtgatgatggcatttgggctggaaaattccaggatctccgactttgggcctcgtacagggggcagaccttagcacggactgtgaggggaatgatgtactactacagggctctcaagatgcttgcttttcttgataatgcatctgaagtagaaattacagagggaacaaaacagctggcttcttttgcttcagttcagtatgagaatgatgtatatcccatgaacgggggtttatcacaacgacctcgaaggaggttagagagaggaacaagtactgtaagtcaattgtttaaaggccaggaagatggtgctgctatcatgaagtacacctatgtggtcgcttgccaaatatatggaaaccagaaaaaggcgaaagatcaacgtgctgaagatatcctaactcttatgaagaaaaatgatgccctccgtgttgcttatgtcgatgaggtccatcctgagattggtgatacgcaatactattctgtccttgttaaatttgatcctgtcttacagagagaggttgagatataccgtattaggttgccaggtcaactgaaacttggggagggaaaacctgaaaatcagaaccatgccatcatattcacacgaggtgatgctgtgcaaacgattgatatgaaccaggataattattttgaggaggccctcaagatgcgtaacctactaggacagtacgactattatcatggaagccagaaaccaacgcttttgggcgtccgggagcatgtttttactggatcggtgtcttcacttgcttggttcatgtctgcacaagaaacaagctttgttacccttggacagcgagttctagctaatccgttgaaggttcggatgcattatgggcatcctgatgtatttgatcgcctttggtttttaacccgaggtggtataagcaaggcatccagagtaatcaatatcagcgaggacatatttgcaggtttcaactgtaccctacgcggtggcaatgttagccaccatgagtatatccaggttggtaagggacgtgatgttgggctcaatcagatatcgatgtttgaagcaaaggtttctagtggcaatggtgaacagaccctaagtagggatatctacagacttggtcataggctggatttctttaggagtctttctgtgttctatacaacagtaggattctacttcaacacaatgatggtggtcttgacagtttatacatttgtttggggacgcctctatctagctctgagtggtcttgaggctggaattcagggtagcgctaatgctaccaacaataaagccttgggtgccgttctgaatcagcaatttgtcatacagcttggcctcttcactgccttgccaatgattatagagaactctcttgaacagggttttctgcctgctgtctgggattttttcactatgcaaatgatgttttcgtccgtgttctacacattttccatggggacgaaaagccattactatggccggacaattcttcatggcggtgctaagtatcgtgctactggccgtggttttgttgtgcagcataagagttttgctgaaaattacaggctgtatgctaggagccacttcataaaggcaatagaacttggaatagtattgactgtgtatgcagctcacagtgtgattgcaagggatacacttgtttacataatcatgatgatatctagctggtttctagtggtatcatggatcatggctccatttgcttttaatccatctggctttgattggttgaaaacagtgtatgactttgatgatttcatgaactggatctggtaccctggtagtatcttttctaaggctgaacacagctgggaagtttggtggtttgaggagcaggatcatctacgaacaactggtctttggggaaagattttagaaatattgttagatctcagatacttcttttttcagtatggggttgtataccagttgaagatcgcaaatgaaagcagaagtattgctgtttatctgctttcctggatttgtgtggctgtgattttcggcatttttgtcctaatgtcatatgctcgagacaagtatgctgcaaaacaacacctttactaccgggtcatccaatctggtgtcattattcttgcagtgctagtgctgataatatttctgaaatttactaaatttcaaatcattgacatcttcacaagccttttggcattcattcctactggttggggcttgatttccattgctcaagtgattagaccattcattgagtctactgtggtctgggccagtgttgtttctgtggcacgtttgtatgagatactgcttggggtgtttgttatggcgccagttgcattcttttcctggttgcctggatttcaggaaatgcagacgagggtacttttcaatgaagctttcagcagaggcctccagatatcccgcattcttgctggcaagaaaacaattgcagtttgaggctctaacaaggttatcgcagttaggccgtcctccgtcacctctgtacagcttcttatgcaatgtggaaggctttctgtttactgatatagcttagatccatattgaaccttttagatggctgattagcttcagtcatcttactctagatgttcagatttgtactgagtaatttaggcctctccagttttgcaccttcttagagctagttgtatgtagatgattctgttgcagcattacccgtgaactctaatggcttgtttgct

SEQ ID NO: 24341 - DNA, 1416 bp, Oryza sativa
  ref <308>: DATABASE ACCESSION NUMBER: AK099783
  ref <309>: DATABASE ENTRY DATE: 2002-08-28
gctttggatttgttaactttgaaaatccagatgatgctgctcgagctgttgaagatttgaatggcaagaagtttgatgacaaggaatggtatgtttgtagagcacagaagaagtcagagagggagatggaattgaaagaaaaatttgagaagaacatcaaagaggcagcagataagaaccagggaactaacttgtatttgaaaaacttggatgatagcatcgatgacgatgagaaattaaaagaaatttttgctgattttggtactattacctcttgtaaggtcatgagagatttgaatggtgttagtaaaggatctggctttgttgcatttaagtctgctgaagatgcttcacgagctcttgtggctatgaatggtaagatgattggcagtaaacctctctatgtagcacttgcacaacgcaaggaagaaagaagggcaaggcttcaggcacagttctcacaaatgcgtcctatggtgatgcctccttcagttgctcctcgtatgcccatgtatccccctggtgtccctggtgtaggccaacagctgttttatggccagccacctccagcttttgttaaccctcagcctggatttggcttccagcaacatctcattcctggtatgaggcctagtgttggaccaattccaaattttgtcatgcctatggtccagcaaggtcaacaaccacaacgtccagctggaaggcgtgcaggcactggtggaattcagcaaccaatgccaatgggccaccagcaaatgcttccaaggggtagtcgtggtggttaccgttatgcttctggtcgtggcatgccagacaatgcattccgtggtgttggaggtttagtgccatccccatatgagatgggaagaatgcctctcagtgatgctggtgcaccaccgcaggttccaattggagcattggcctctgcactggccaattcacccccagatcagcaaagactgatgcttggtgaaagtttatacccgcttgttgatcagctggagcatgatcaggcagcgaaggtcactggcatgcttttggagatggaccagactgaagttctccatctcattgagtcacctgatgctcttaaggccaaggtcgctgaggctatggaagttctccgtaatgctcagcagcagcaggcaaataccccaactgatcagctagctgctctcaccctgagcgacggcgtcgtttcttaacttggttggcatcttatatctgagactgcaagtgatgtagtatgtacttggtgtgttttggaacttgaacctgtggggaagtctgtctttatctttgttaaacggcagttcagttacttcagcattgtgtggatctggatttcagttcctatttgtgttttcttaaaatattgggattgcaatatgatttactcttggattgatgccg

SEQ ID NO: 24342 - DNA, 3030 bp, Oryza sativa
  ref <308>: DATABASE ACCESSION NUMBER: AK099784
  ref <309>: DATABASE ENTRY DATE: 2002-08-28
gatatgctctctttatatgtgagatctaggaagaacccttgctcgatcaggtattccaagttcttcgtgatttatatagcgatacatcccaccgtgtaaataagcgaggatcttggacagaatgccctgcagtccgccatcttacctgttcattattgtcactggtgtactgcttgtgcttgtgcactcccagacctccttagatgaagactttataagcatcgattgtggccttcccagtggctttagctatgtggatgagaagacaaatatcacatatatttcagatgatcagtacatagacacgggagaaaaccacaacatttcttcacaactccaaggggcagaacaattcagatcaggtttaaatctcagaagttttcctacaggaggtaggaattgctatactctttatcctgccataaaaggtcagaagtatcttataagaggaatgttcatgcatgggaattacgataacaaaggccaggatcttgtaagctcaccagtgacattcgacatccgcatcgggctcaacttctggaaccggctgaacataatcaatgcaaccatgacttacacatctgaagctatcgtagttgccattgtaaattcagtatcagtttgtttggttgataatggagaaggaactcctttcatatcatcgttggaaatgaggccaatgaagagttcaaattaccctgcagcaacaccaaatcatccccttttgcttcaggatcgacgaagcatgggcgcaagtagaataattaggtatccagatgatccctacgaccgtgtatggtggctgccacagattacatctgggttgataaagatttccacaagaagcttgatcagccgctacactgatgatgtatatgaggtgccagttgcagtcctgaagacagccgccacaacatcatcgacctctaccgccctgaatttcttgtgggctgctccaacaggctgggacgcaacacctggatacttgattggcttacacttcactgacttccagcaggggcagctgcgtgagttcgacatatactacaacaacgacctgtggaactatgataataagaaaacaaaaccgccctatctcctggctaattatatcaatggcaccactccatacacgtctgacaattatctatacaacatctcactcgttgccaccaatgcatctgtgctgccccccatgctcaatgccattgaaatatactaccaagtccaacaagatgagaagatgacctactcggaagatgttgaagccatgatgactgttaaaattgattatcaagtgaagaaaaattggatgggtgacccatgcttaccagaaaagtacacatggagtggcttgaaatgtagaagtcaaggagttacgtcaagaattatatccttagacttgtccagtagtgatttgcagggtgcaatatctgaacaattttccatgctcaggtcactcgaatacttgaatttgtcgaacaatgatttaactggatcactacctgaatccttgacaaacttaccaaatatccatgttctagatctatcaggaaaccaactaaatggtacattccctgaagcattatgcaaaaatcgagcgctcacattgaggtatgacacggcaaatggagatccatgcagtccaagatcatcaaagaagaaacataaagcagtcttagcagttgctgtagtggttccagtggtgatagtagttatacttatatctgctatgctgatgctacttttctggaaaaagcaagccattgtgaagtctagaggtcaagaacaatatggagatcatatacatattcctgaaaaccgtgagttcacatatgaggagttagtgaaaattacaaacaatttctcagtattcataggtgaaggcggatttgggcctgtttttcatggtcagttaaaagatggcactcagttggctgttaagatgcgctctccgacatcaatgtcagggaagggaatgccagagtttttagctgaggtcgagagtttaacaactgtacaccacaggtatctggttttattggttggttactgcactgaccaggatcatttaggtcttgtttacgagtatatgcctaatggaagcctttatgatcatttgagaggaaaaaatgctattatccagagattaagttggcaacatcgagcaaaaattgcacacgaagctgcccaaggtctggactacctgcacacaggatgtgtgttgcctatagttcacagagatgttaagtcacacaacattcttctagggtgtgacctaactgcaaaaatatcagattttggattgtcaaagtcatatctgaatgttgcacagagtcacattacagccactgctgctggcaccctaggctacattgacccagagtactgtcttagtggcagacttactattagcagtgatgtcttcagctttggagtagttctgctagagattgtaacaggggagcctcccatcatacccacaaatggacatattgtgcagcgcataaaagagaaggttaatatgggaaatattgaggcaattgctgatccgcgacttcatggtgagtttgatatcagctcaatttggaaggttgtggacatagcgctgttgtgcacaaaagaggcatctagtgaaaggccaacgatgagtatggtggtagcacagctaaaggatgccctagcattggaagaagcccgtttaagctacagtaccagtgacattagccaaggtggtgccaatgccgaattgtcaatcaactccatgccaacagcgaggtaattaagccgagaaccgttaaaaataataattaagaaaacagcaatggataaaggacatgtatgtctgtccacagtgttgcaatagattttccaaatcctatgtatatttccaaatttccagcattgttctgtaatgtgtgttaagaggaacatttagaacccaaacatagcaagcatatagtatctctcagtaactatgtaacatgaatttaatttttaaaagcttaagtaatctggaggagtatgccg

SEQ ID NO: 24343 - DNA, 3540 bp, Oryza sativa
  ref <308>: DATABASE ACCESSION NUMBER: AK099785
  ref <309>: DATABASE ENTRY DATE: 2002-08-28
ggtccgcactatttccgtccccttgccctcccacacaatcgccgagtgtccgagacgcagccgccgccgccgccgccgcgcacccatcgcctcctcctcacatcgcacccccgagcagccgaatcctccgtcgcgcgccgccccttcctccccgctctccgccgctgcccgtgccgcaggcgcgggcggactctctcgattgggaggctagctgcttacaattgagtctttgacttgcttttgttgttgtcacaatgtcaggcctactgaattcaaacctgaacaattctgcatcaaaccttcaagactcatctggaagaccgtttacagcatccttttctggtcaatctggatcagttccaggggcgttccatcactctggcttgcacaacatccatgcaaattttaatctgccaaatatgcctggatcgcttgctcagaggaatgctgccatgagtggccttccatcctctggggttcaacagcctggagggagcatttctgcaagatttgcttcaaacaaccttccagttggaatgtctcagcttcctcatgggcattcaggagtcagttctagagtgaatgttggcggaggtccagcatttagtagtagcttgaatattggaggtaccattcaaggcttatcctcaaacttgggtgctggtggtaatcggaattctgttcctgggatgtcagtatctccagctttgggaaatttgggccctaggatcactggttctgtaggaaatattgtgggtggaagtaacattggaaggaatataagctctggtggattatctgtgccaagcatagcatcacgcatgaatttgagtggcaatattggcagtggcggtctaaatgtccaaggatccagcaggatgatgaatggcattcttcagcaaggacccggtccagattcgtagccagaaatcgctacattttggaatggagggagtactccgtagagtttaatactctttatgtggtcatgctttcatggctgcatacttgtttctctattcttgttatttttatcgtcaactattgtttgttaagaaatgctcttccatcgcaatgctgattttttgttgagtatatctacttactatattgtttgcttttagctgcaaacttagccctctttttcttgacatcagagttgggcatatgaaacaagtcctcggaaatacccaaatgataggtatttaatgaatttttaattaacattcttagtagctgccaatagtcttccttgagtaggattcctgtgctgttactagccaactaaaaagttttggtaagtgcgattataatcagaaacaagaaacctagtgcctgaacaagcttcctctaaatgaccaatacctcaagtgaaattcagcttgatgaagcactgaccacaacctatctgctggagtaattggtgctttcactctgttatcaaacacagtatggcttatgctttatcttatctttcatgttcccttacctgggcaagttacttgcaataactgcctttataatgtgattataacacccaaagctaatacattcagctgggcaatcttagtgtccactactccactgcgacactgcgtcctaatagaacaccaacctatatcggttgcatttgataaaattaagattattaatgaaaataccaacaatactagcatttgatacgtgtcaaagttagagataatattggtattcctcctttttttttgcatgcatgcatcggataccagaatattaattgcttaatttgataattgttaattttgtttatggttgtgatgtaatgtctctgtaatattttactgtttaacaagtggtatattgtatatcagtttatatctattgaagtgaaagcctgtgagtctttgcattcagccttttatttttaatctctgagatcaggatcgcctcaaatgatgaacatgatggggagttcatatccgacgtctggaggttcattatctcagaaccaaatacaaggaggaaataattcccttggttccatggggatgctgcatgatgccaatgacagtgctccatatgacatgaatgattttccccaattgactggtcgacctagttctgctggtggtccgcaaggacaatatgggctcactggcggaagcaaggagttggtgttaacaccattgttcaacaaaaccaggaatttagcattcaaaatgaagacttcccagctttacctggatacaaaggtagcacttcagattatgctatggagttgcatcacaaggaacaacttcatgataatgtgcctgttatgcaagcacagcaatatccgatgtcaaggtcagttggctttaatttaggaagtaactacccaccaaatcgtcagcaacaccagcaaggtgctaattcagttcagaatgctggtccccaaaatatcggattaagatcttctgcaagtcaaacttctagtttgggatcatacgagcaacttatccaacaataccagcagcctcaaactcaaaatcctttcagattgcagcaggtgtcttcagctacacagtcatacagagatcaaagtctaaagtccatccagggagggcaaacaccacctgatccttatggtttgatgggattgctgggagttatcaggatgaatgatgctgacttagcatctcttgctttaggaatggatttgacaacattgggtttaaacttgaactcaccagacaatctatacaagacatttggttctccatggtcaaatgagccagcaaaaggagaacctgagtttcatattccagcttgctacaatgctgagcaacctccaccgctacaacctatacattttcagaagttccagacgttaacgctgttttacatcttctatagcatgccaagggatgaagctcagctatgtgctgctagtgagctttacaaccgaggatggttttatcataaagaagtgcgagtgtggctcacaagaattccaaatgttgagcctctggtcaaaactcctcattatgaacgagggtcttacggttgctttgatccaaacaactgggagacaatccgcaaggacaattttgttcttcattatgaccaaatagagaagaagccagctatcccatcttcgtcccaaactgttaggggaaacatttcttgatacctcctgctcaagaaccttctttcatcgggaggaagaaacttttgtttatgctgagggcacaataccattgcctaactcatagggacagagaaaactcatagctagaccatgccgatctgcagaggggaggctgcagaacaaaagcgggaatgcctgcttagcccttgtaattagagtaaaatggtgaaggtttcattttctgtttcataccctttgagcaaaagttcctttagaacttcccaacttttaggaataaaagctttctttaccgttaaagcttctggtgacgaaacttggttggctttgcacatatcgacgttagtgtttacccttctttttaaagagttaatttgcagacaatactaggcgccagtttggtttgatgcacc

SEQ ID NO: 24344 - DNA, 1711 bp, Oryza sativa
  ref <308>: DATABASE ACCESSION NUMBER: AK099786
  ref <309>: DATABASE ENTRY DATE: 2002-08-28
gggtcaaacccatcgatcccccccagattccaatggcgctgctgctgccggacgacgccgtcgccgacgtcctccgccgcctcccgccgcggggcctcgccgcggcgcggtgcgtctgcaagccgtggcgcgacctcgtcgacgtccgcgcgctgctgcgcccgcgcctcctgccgcgctcggcgcacggcgtcctcatcaactacatcgaccacggccgcccgcacctcttctcccgcccttcctcctcctcgccgtcgtcggcggcggcgatcggcggcgagatcatcgacgggaacctcacgttcttgcccaacgacggggacagggactggtggtgcgtcctggaccactgcgacggcctcctcctctgcgggatcgagtgggggagccagctctgcgcctgcaacccggcgacgcggcggtgggcgacgctgcccgccgcgcgccaggggccctcgcgctacgccgccgcgtacctggcgttcgatccggccgcctcccccgactacgaggtcctcctgatccccaatctgccggagaaaccctcgccgccggtacccaatcagccgcggcggcggcggcggcggcggcaggatgagctcgccggcccattctgcctccacatgctgttctcgccgctggacgccgctgatgaatcggatctggacggcgatgtcgatgtcgctgtcgatgtcgatgtcgatgtcgatgacgatgaggtagcaacaccagcagcatcatctgtggatgatgatcagtataagttgatggaatggccgccatcgccgtacttgctggaggtgttctcgtcgaggtccgggcgatgggaggagagggcgttcgtcagggaaggggagaaggtgaccaccgtggaagacatgatgccattgggatacccttaccggggcccgcgccgagggtacagcgtgtatcaccatggatcattgtatgcacattgtcgaggcgcttttgttacaaggtattcactggcaaatggcaagtaccaagtaattgaaacaccaataaacatggcgaactacaaatgggaaaaaccatatctagggaagtcagagatgggtgtgctcttcggaatgattcatggcggccagctatccgtttggatcctccaagaatcagcaggacagatggggtggatcttaacttatcaacatgaccttaggccctttgccaaagaagtaagctctctcagatacaatggtaacctgactactggttcttggactgtagaagaaaatagtactggtatgcatggaaacagagatactctgtctgcagaggatttcgagtgggactctgacaatgatgatttcctcgcggttgaagttagaaacgaggaatatgatgatgactgtgaacactttgacattcttggatttcatccttacaaggaagttgttttcttggatcagtcattcaaaacaatcgcctttcatttcaatagctcaaagattcaatacctgggttactcgcgcccaaagtgctactaccggaactacacaaatggtatatatgagtcgttcgtgtacactccctgcatgattggagagcttcatggagttattgggcagagctcatcttgaagattagcaccgtatatgtacaactcaggcagttggaaaacatatcaggatataataatggcaaacactgggttgttttttggtttattattatttccatattttcc

SEQ ID NO: 24345 - DNA, 2938 bp, Oryza sativa
  ref <308>: DATABASE ACCESSION NUMBER: AK099787
  ref <309>: DATABASE ENTRY DATE: 2002-08-28
gggtttctctcgcgtcgcctcctggttttttctcctcctcatccgcttcgcctccggctccgtctccggtcccctccgatttggtggcggccgcttcgccttcacgaaaaaaaagccgggagagggtggttgctcgcggcggagatggcgtcggaggcggaggcggaggtggcggcggggccggaggtggtgctgccgatcggcgcgcagaagcacgacccggcgtggaagcactgccagatggtgaggtcggcggggcgcgtgaggctcaagtgcgtctactgccacaagcacttcctcggcggcggcatccaccgcttcaaggagcacctcgcgaaccgccccggcaacgcgtgctgctgccccaaggtgccccgcgaggtgcaggagacgatgctccacagcctcgacgccgtcgcggcgaagaagaaacggaagcaatcgctggccgagggcatcaggcgaatcacccactcggctcccgccgccgccgcctccgcctctccgccggctccggccgatgccgccgagatggagagccccatccacatgatcccgctcaacgaggtgctcgacttgggctccgttccactcgaggagacaccaccggagaccagggagatgaaggggagtattagcaagaagagaaagaaattggctgcgaggcaagcctccacggcgccccttgctcatcagaatcagcagcctcttcagtctactcctgctggtctgacccagccttttcatcagatggtcgtggcgtttgattcggctgcatcgcaactgatgcattttgaccagcccggctcgaacaaggagcaggtttatatggcaattgggaggttcttgtatgacgctggtgtgtcactggaggcagtaaattccgtttactttcagcctatgcttgaagctgttgcctcagcaggagggaagcctgaggcgttctcgtatcacgacttccgtggttccatattgaagaagtcgctggatgaagtgactgctcagttggagttctacaagggatcatggacccggacagggtgcacattgttggccgatgagtggactactgacagaggcagaacattaataaacttctctgtgtattgcccggaaggtactatgtttctgaagtcagtcgatgcaactgacattgtcgtgtcgtcagatccgctgtatgagttgctgaagaatgtggttgaggaagttggtgagaaaaatgttgtccaagtaatcacaaacaattctgagattcatgcggtggcaggaaagaggctatgcgaaacttttcctacattgttctggtctcaatgctctttccagtgcatcgatgggatgcttgaagatttcagtaaggtgggggcaatcaatgagatcatatgtaatgcaaaggtcattacgggatttatctataacagcgcatttgcatttaacttgatgaaaaggcatcttcatgggaaagatctgctagttcctgcagaaactcgtgctgctatgaactttgtcacactgaagaacatgtacaatctaaaggattctttggaagccatgattagctcagatgaatggattcactacttgctgccaaagaaacctggtggggttgaagtgaccaatcttattggcaatttgcagttttggtcttcgtgtgctgcagtggttcgcatcaccgaaccacttgtgcatcttcttaagttagtcggtagcaataagaggccatctatggggtatgtttacgctggattgtatcaggccaaagcagcaatcaagaaagagctggtgaggaagaacgactacatggcttactgggatattattgactggagatggaacaaggatgcaccacgaccacttcatttagctggttttttcctgaacccattatttttcgatggtgttcgaggtggaacatcaagtgagatattctcaggtatgctagactgcgtagaaaggttggtttctgatgtgaaaatccaagataaaatccaaaaggagctcaatgtataccggagtgaggcagctggggattttcgtaggcaaatggctatccgagccaggcacactttacctcctgctgaatggtggtatacgtatggaggagcttgcccaaatttgacgcgtttagcagttcgcattctcagtcaaacctgcagtgctaaaggatgtgaccggagacacatttctttcgaacaaattcatgaccaaagaatgaatctttttgaacgccagcgaatgcatcatctcacatttgttcagtacaatctaaggctacaacacaggcaacaacacaagaccaaagcatttgatcctgtctcagtcgacaacattgacatagtcgacgattgggttgtggatagatctgcacttatatctggccaggcagagcagtcaaactggacggagattaaccaaccagtcaacaatatcacatcaatgggtccaagtgatgatgatgaattcgagtccttcattgaaggagttgatgacaaaatgatccaaggtgcttctcggggaactcaggaggatgatgaataactctgaggaagagagccgtcacctgtgcttataggtggagtcattacgattgggtagtagggatgctagttttagcttggataggatgtaaactaatgttgcatggagccatggacacaatctggcattgcttgtcagttgtcaacattttgcaagtagttcttttttcctcggcaaccaatctaatgtcctctgtttggaacacaagaaagcccgttcagttctcgtatgaatcagaagaatccctagaaccatggcctgaactgtctccatttgttgtcatctttttgtttgataccttgctaatatttgtcatgttcatcttttgttgtaaaagcagaacattaggacagcatttttttaggttttcattgtctttttcccatgatgagaagcaggctgc

SEQ ID NO: 24346 - DNA, 3409 bp, Oryza sativa
  ref <308>: DATABASE ACCESSION NUMBER: AK099788
  ref <309>: DATABASE ENTRY DATE: 2002-08-28
gattgctgctactctctctccccttctcttctccggttctccctctcctcctcccacctcagccgccgcttaccggcggcgccgcctgctaatctgccggcgtgagcaccggcggagatgtgttactgctacccaacctataacgcagctctcccgcgcagtgcctctgtctctagctagggttttcctcttgggggagacgacctactatggtaaggtggggagctgaagccggcgacctggtgctgtccggaggaagctggagctcgtcgccgtcggatggacgccgatgaggccgcggggagtagcaggaggatggatctgaacctctaccttggcctcccacgcgccccgcgcccgcgccgctccgacctcggctccgacctcgccctcagcaccccgatgccctcctccccgtcctcctccgcagcctccgtcgacgcgccgccgccaccgcccgagctgtcgcatcccccgtactccccctctcacgccgacctttcccctccgctgcaggaggtctactccctgtacaaccccgacgacccgcctgcttccgagacgcacctgccgccgtatgcgccgcctccggctccggtggtctcggagctccctgacgacctcgagtttggcctccaccccccgccgccgctggtgcgtgccagcgaactgctaggttgggaggaccggccgtcttcgtcgacggcatcgtcctctttcctccctgacaccgcagcccgttactggcggcttctcgagcagactggaagcagatggctccgtgcgaggcggtttaggtcggaccttccgccactcagttctgaagcttacccagctgggcgtgatgctgccgcagtcccagtgctgcagcatgaaccgatgaatgatactgttgaacataataaggtagctgccgatggcgcggaagtaggcgcctccgaggaatcggaggagcagggcaggagcgctgccacatttgagtgtaatatatgcttcgatatggccagcgagccggtggtcacctcttgtggccatctcttctgctggccttgcttgtaccaatggctcaatgtttattccaatcacaaggaatgcccagtctgcaaaggcgaggtgactgaggcgaatattactccgatctatgggagagggaattcatgtttggatgccgagaaggctgtggaaggtgggaaacaaacaggtcctactatcccaccaagaccacatggaaatcggctcgaaagcttcaggcagcagtttcaccatttgcgaccgatctcaagaaggcttggtgaggctcatgggttattgtcatcatggaggcgccttctggaccaacagattatgaatactgcgagtaggtttgaaggtccgcctgaatcagctgtgcaggaaatggttgacactgctcacgctcagcacaccagtcgcctaagtagattggcgtcaaggatgagagcaagacggttgctgagagaagcagacaaccctaaccctcccgatggcggatccacttcccctgacagtggtttgatcagaaacaatgcatcggatccatccagaaatggtccgagctcattattaccagatggaattgactggttgcgtggacttacccttcttgggtatgaagacacggaaagatttgcatctgccatgagtgattttagaaggataactggaccaagccaatatggtgcatcggcttcatcatcgaatcctccaaatctcgagtcaacatttgacagaactcatgttgttgcagcaccttctgcagaccaagcatctaactcaagcactgctgcagtgatacagggggatgctggtatctctgagagtgcaggagaaccaagtaacgcggggtcatcaagatccctgaggaggagagggaggagcagtgccctgggttctttggatgctgatggcgggggcctccaacggaacaagaggcgaaggataaactgaacattctgtgttgtggtgttgatctaaactctgcatgccatgctcgctgattttcaactattgcatttcatttcttcgggtgatgtctcctgtgttgtagtgtaacattttttcttctcttttcattttcccccgtaggttgcactgaaatgtttatctgtttagttctcatgtagcctgtacctgtttaatttatggaaagttattgatcaagacatttttgcattcgaaaggtaatgaatggttcaactgcatttccatgacaataaattggatgctgaaatgtgcatccaacacaatggtattcttgtgcatcaaataataggcataaacattgtgtttttatttgtgtcaataagctccttcagacatatagaaaactaacaggtcaataatgtagtatattgaagttggaaggaatacccagagaatggatccatggacacaattgtcttttgttgcttgggagaaggtacatagcctgatctttagtccttgtttatcctccaatgaaaatactcacgcattgattgtttcaatagacaaggtaaactttgccatcgccgtgaattttatgatccatggaagctgtttcattgagcagtggtgggtgtaactgtgataacctttatattacttgcttgcttttaaggaatagcacactttttgtggggatgggattactcccctttttggaactacatattgaggaacggatttaacatagaaagagcttaatacatttaagtactgattgtgtgcatagaaaggggtttattatttggaacaaaattgcttagctcgtagtaataaggaagttcatagtattgaactttatatgacatgtgagttatatatatcatgtttgtctttggtcacttctattttatgaccatgtaacatttatttcatgtggaacttggcagaagagaatttgaagagatttcttctgattgatttccatttcggacaaaatacaaagctcccagaccagctgtcacaaagaggtctggttgattttccagatttgtatgcctgtctctagccgagagtaacaggtatttttctgcatctatgactggcatggatagtagattggcatatggaaacaaactcggaagggtttgggtggtgcttaggtgctcttggcagggaagggagacaactctgtgtttttgggttttcagtacatctatcctacatatcttccaaaagctcacacataagccagttaattgtttttttttttggcttgcagaattacctcaataacttccatgtaaatattttactcttttgcagtattacatgaacagattcaatgctatttttctgcagaactgccccaagatgtaaaatgaaaatgcattgagtctgttcaattagaaaacacaagatcactgtgtatactgttcaaagaatgtgctaaacatattatagaacc

SEQ ID NO: 24347 - DNA, 2645 bp, Oryza sativa
  ref <308>: DATABASE ACCESSION NUMBER: AK099789
  ref <309>: DATABASE ENTRY DATE: 2002-08-28
gattcatccatctgaagcagacgcctttgctttcctcctgctctagggttttgcgtctcgcgccggagatctcaccaatggcgcctcccgccgccgccgccgccgtgacgctcggtggcaagggcgccgcgctcacccccgccgccgtctacgccctctcccacggcctcgccgaccccgcgatcgactgctgcgcgtccccgctcgtccgcgtcgccgacgccgtcgccgcgctctcctgcgaggccgcgcgcggggacgtcgcggcctttgatgtgccgacctctggtgatggtctctccgccaaggacgaggctgatgtcgccgccgatgtcaagatgctcctcttcgggtccaagctcgtcggcgcagccggtggcgccgatgccgcgtctttcactaaggtgcccaccgtgaatggaatcttccgcgaggcagtgcgcgcgctgcacgcgagggtgcgtatcgagctcaacgctccagtgaagttgggaaagagggacgctgtccaaaccggtgagggaaaggaggaggcattggttgctctggcaacgcaactcgcgaggccggtacaggcaatgctcaagcttagcgttgcgcgggcaaggcctttgtgttgcgagaattgatgatgctgagctccggaagaagcttactgatggtgttgaagtcgatgatttgaaggggatgcttggcaaggtcacgattgattcggatgctgtatctgttttgcggggtgtgtacaactccctgctcaagttcagggatatccttgcatgggaagcagctgttgccatggcggtgatcgaaatggatagttcaattgagaagccacaagcttgtgaggagaatgaggcgggcagttcaactgaaaatccgcatgctagtggagagaaaccaaaaggtgacaagaagagcaagaagaagaaaactttggggaagggtacttctgctgtactgatgttgcttagggaccttgtgaccaacggaaaggaggttctttcggtgaattctgcactacttgcagagtggggaaccgagctctcactgttgtttgatccaaagtgtcccagattggtgtcccttgtggacaaggtgaaggagattgttgagaccaatgaagtgaggagattgcctaaaattcccaagggaacacgtgactttgggaaagagcaaatggccataagggagcatgccttctcaataataacaggtgtattcaagatgcacggtgccgtttcacttgatacacctgtatttgagctgagagaaacacttatgggcaaatatggtgaagactcaaagttgatttatgaccttgctgatcagggtggagagctttgctctttgcggtatgatctgactgttccatttgcccgatatgttgctatgaataacataagttcattgaagagataccagatagctaaagtatacaggagagataacccgtccaagggaagatatcgagaattctaccaatgcgactttgacatagctggagtatatgaaacaatggaaccagattttgaagttatcaaagttttaactgagttgttggatcagttggatataggcacgtatgagataaaactaaaccacagaaagttgcttgatggaatgttagagatctgtggtgtgcctcctgaaaagttcagaacggtttgctcaagcattgacaagctagacaagcaaacatttgaacaagtgaaaaaggaactggtggacgagaagggcatatctaatgaaactgcggataagattggtgatttagtgaaaactaggggaccaccgctggaagttttgctggaattgagaaaggaaggtagcaagtttatggggaacgctgggtctgttactgcactaaatgagctggagatactattcaaagctctagataaagcaaatgcaataggcaagattgtttttgatttaagccttgctagaggccttgattactacactggtgtgatatatgaagctgtgttcaagggcaccactcaggttggctccattgctgctggaggcaggtatgacaaccttgttggtatgtttagtgggaagcaagtccctgccgttggtgttagccttggaatagaaagagttttcgcaatcatggagcaacaggagatggaaaagaatcagatccgggccaccgagacggaggtattggtgtcgattatcggcaaggacctcatattggccgctgagcttgttagtgaactgtggaatgctgggataaaggcagagttcaaactcactactaggatacagaaccacttgaagtacgcgacgcaatctggcattccgtggatggtgctggttggtgagtctgaaataagcagtggaaaggtgaagctgaagaacttggcagccagccaggaagaggaggttgacaggacagagtttgctcaggtgttgaaacagaaattgagaaacccatagagaagatttttagaatataattttgtagttcatgtttcaacttgtgatgcatcatacttgcctgtgtgagttcctggaaaattccgttcggcgttttgatttatactggctgtttgaattggtttacatgttaaagcgcttggtgtaattgaatcaaattaccaaattcaaaacattactctactgattggtgaccaact

SEQ ID NO: 24348 - DNA, 1314 bp, Oryza sativa
  ref <308>: DATABASE ACCESSION NUMBER: AK099790
  ref <309>: DATABASE ENTRY DATE: 2002-08-28
gttttctcctgctggaatctgccactaggcttagcgttggagccactctccggcgccatagcggccggcaacgccgttgttctgaagccctccgagctcgcgccgtccaccgccgcgttcctcgccgccaacatcccgaggtatctggacagcagggcagtgaaggtcgtcctgggaggccccaatgttggagaggaactcatggagcacagatgggacaaggttcttttcaccgggagtgccagaataggacgcattatcatggctaaagcagtcaaacacttgaccccggttgcacttgaactgggttcgaaatgcccatgcatcgttgattggctggacagtaagagggataggcagattgcggtgaaccgcataatcggagcgaaatggtcgacttgtgctggtcaggcttgcatcgccatcgatcacgtaatcgtcgaggagagatttgcaccgattctgattgagctactgaaatcaactcttaagaggttcatggccaaaccgggtggcatggcccgtatcctgaacgcaaaacattttgagaggttgagtggctatctggaggataatagggtggcagcttctgtagtgcacggtggttacatggaccccaagaaactgaatattgagccaaccttactgctaaatcctcctgctgattctgatgtcatgaccgaggaggtatttggcccgattctcccaatcatcacggtaaagaagatcgaggattgcatcgcgtatttaaagtccaagccgaaaccgattgcgatgtacgccttcaccaacaacgagaggctgaaacgccggatcgtagaggaaacgtcgtccgggagtgtcacattcaacgacgcagttgtgcagtacgctcttgaaagcgtccctttcggcggagttggccatagcggattcggacagtaccacggcaagtactcattcgagctgttcagccacaagaaggcggtgttcaagagaagctttctgatcgagttcatgttcagatacccaccatgggatgagagaaagatcgggacgctgaggcacgtcttcagctataactacttcttgctgttcttcaacctgctcggctttaggagatgaagaagccagccgaagaaagatttcggctgtgaagaagtaagcagagaaagaagctactactatatagtagtatatagtagtagtaatatactacagctaaacacgtggattatatacggttctaccttgtgtgatgtgataatgtatcactatacttcagttgcatattgtattgtcacgttctatgctcttatttattgtactctttgg

SEQ ID NO: 24349 - DNA, 3171 bp, Oryza sativa
  ref <308>: DATABASE ACCESSION NUMBER: AK099791
  ref <309>: DATABASE ENTRY DATE: 2002-08-28
cagagctccccctccaccaccgccgccgccgccgcggctgccactctcggttcctcttcctccccaccgagctccaccccccacgaatcttagcctcccactcctcttcacgccgcgccgctaagagcgatcgagccgggggtttccgtcagagacgccgcgaaaatcgccccagatcggtggatgggcgatctgtgagccgcggcagggggagagagagagagagagaggaagctgaagccatgatggtgagttctaggtttgtggccgtgcttcttctggtggcgctggcgccggcggcgcgggggcagggaggaggagggggcaactcgagcgccccggcggcgtcgccgccggggccgttcgtgccgcgggacaacatcctgctcgactgcggcgcgacggggcaggccaacgacacggacgggcggctctggaccggggacacgggctccaagtacctgccggcgaacctcgccgccgcggccgccaccgcgcaggacccttctgtgccgcaggtgccgtacctcaccgcgcgcttctcagcggcgcccttcacctactcgttcccggtcggcgccgggcgcaagttcctcaggctccacttctacccggcgaactactccaaccgcaacgccgccgacgcgctcttctccgtctccatccccgaccccaacatcacgcttctctccaacttcagcgcctaccagaccgccctcgccctcaacttcgactacctcgtccgcgaattctccgtcaatgtcactgcctcaaccctcgacctcactttcacaccggagaagggccacccaaacgccttcgccttcgtcaacggcatcgaggtcgtctcctcccccgacctctttggcagctccaacccgatggaggtcaccggcgacggcagcggcacgcctttcccgatcgacgccggtactgctatgcagaccatgtaccggctcaacgtcggcggcaacgcgatctccccctccaaggacacgggcggttatcggtcatgggaagatgacacgccatacataccctttgcgtcattcggggtgagctacgcgaatgacaccaatgttcccataaattaccctgacagtattccgcagtatgtggcgccggcagatgtctactctacggcgcggtcgatggggcctgacaacaatgtgaatttgcaatacaatctcacctgggcaatgcaggtggatgctggttatcagtatctcgtgaggctccatttctgtgaaatacagtctgggatcagtaagatcaatcaacggacatttgacatctacatcaacaaccagactgcttttagtggcgctgatgtgattgcgtggtctactgggcttggcattccagtgtacaaggattttgtggtgttccccatgggttcagggcctatggatttgtgggtggatctacatccaaatgtcaaaaacaagccacagtactataatgctatcctcaatgggatggaggtttttaagttgcagcttactaatgggagccttgctgggctcaaccctgtccctagtattgtaccaacagcgtcgggtggaaattctgggaagaagtcaagtgttggtccaattattggaggagtgattggaggtctggtagttcttgcacttggatgttgctgcttctttgtgatctgcaagcgtcggcagagagcaggtaaggattcaggaatgagtgatgggcattctggttggttgccgctctcactttatggcaactcacacacttccagctcagccaagtcacacactactgggagccatgcttcgtctttgccatccaacctgtgccgccatttctcatttgtggagatcaaggctgcgacaaacaactttgatgagtccctcctccttggcgtgggtggttttggtaaagtttaccgtggagagattgacggaggagcaaccaaggtggctatcaagcgtggaaacccattgtctgagcagggtgtgcatgagttccaaacagagatcgagatgttgtcgaagctccgccaccgacatcttgtgtcgcttattggttactgcgaggagaagaatgagatgatcctggtctatgactatatggctcacggaactcttcgtgagcacctgtacaagacccaaaatgcaccactttcttggaggcagcgcttggatatctgcattggtgcagctcgtgggcttcactacctacacactggtgcaaagcacaccatcatccaccgtgatgtgaagacgacaaacatcctcctcgatgagaagtgggtagccaaggtttcagattttggtttgtccaagactggtccaacaatggatcatacgcatgtgagcacagttgtcaagggcagttttggttatcttgatcctgagtacttccgcaggcagcagcttactgacaaatctgatgtctattcttttggtgttgtactgtttgaggtcctatgtgctcggcctgccttgaatcccactcttgcaaaggaagaagttagcttggctgagtgggcattacactgccagaagaagggtattcttgatcagattgttgatccccacctgaagggaaagattgctccacaatgtttcaagaagtttgcagaaacagctgagaagtgtgtttctgatcagggcattgaccgtccttcgatgggagatgtgctgtggaacttggaatttacccttcaaatgcaggaaagtgcagaggagagcggaagccttggatgtgggatgtcagacgacagcactccccttgtgatagttggaaagaaggatcccaatgatccatctatcgagtcaagcaccacgacaacgacaactacctcgataagcatgggtgagcagagtgttgcaagtattgactcggatgggctgacgcctagtgctgtcttctcgcagatcatgaaccccaagggacggtgaggtaacaatgtctcggtttgttaccctgcaggcataatctattcattcagcatatgttcatgagtttgcccttatgttctcttgaattatggatcggaagtcagataattgtttcaaattagatggttctgtctttccctgtgttttctccctgatgtagtgcctataagcttatcggcatgtattgtaatataccataccactgctattgacccaacgaatgatactgtatgagagagtgatacgc

SEQ ID NO: 24350 - DNA, 4332 bp, Oryza sativa
  ref <308>: DATABASE ACCESSION NUMBER: AK099792
  ref <309>: DATABASE ENTRY DATE: 2002-08-28
gggccgccgcttcgccgccggcggcggcggcggaggtcgttgtatccctccactctgtcccagccaactaatagcgtaagagacaggagaatcgcggcgcggagcggcctctataggagcaggcagcgggcgcctcatcgtcctccgattccattccgccatggtcgacgacccccatcttcctcctcgcctgcggcaagcaaggaggatgcatattggggattccaactcaaactacaagagcagggatttgaactgttctatgtgaaatttatgcaaaaattcgtatggaactctactgttccagacagtttggcattagctccggatggggattattcatcaattcgttattcctttcttgttcaattcctaaccaatcaatcagtcatacttgctgcttattttagcaagaagatcacagagctcccttggtttggagcacatgatgttgtggtcggctccagcaatctcctcgacttccgtgcccgggctcaacgtgatcaaataacgatgcagctccttgatgtcatcccccatgcctatcaggcacaccctcttcaccgaaccatagttggcactggtaagcagcttgtcatccttcatcatcggatcatcctggaactggctgccaggtgtcatcaataattttgccagggtcaaatcctacccaaaaaaaaaaatcaaatgctagtctaatgagatttgagataccagttaccagctattaggacaatagcaatcttaattccaaattaaatgctaaactggaacttgcaagaaaccagagttcatgatgctagttgattgcctcagctggacttagtggataacacctctctgccaagaaatttgggcctagggttactgctgttcctggacctcgtttgttgttcattggtatcattttgctatccatgagcagacctttgggagctctttccctcatcaactgtacatatatcaagaaaaatagaagcattagtagttaaataaatgttcagaaattagagcgagtaataaggcaaagtttttgcctttgttctaaaaaaaaactttgctgactacctccctgacgattcccatgtgcttgccgacgcatggcatggacgaggcggcaaacacggccacggcgatcttgtccgggaacctctccattgcgagcgcgatgcttaggccgccgaagctgtgccctacgaggatcagcctctcacccgcaggagccacagccactgtgtcgaggagcggtcgcgactagtcctcgaaagagtgcacctcgtcgatgcgtgccgggtgcacgccggacgcagcgaggtcgagtgccgtaacacggtgcccctcagagcggagcatggtgaccaccttgtaccagcaccatgctccatggcaaaggccatggacagggatgaaatgcttgctactgccaccgccgctgccttccatttcctgtaagtgtcttggttgtagtgtgtctctctttgagtttctgatatatttatacagaagttgctacggattgattgccattatcaaatatatatatatatggtagtagcatttacctaaacactgtagttaccatttaggttgatgatctattcactgagttggacgtgctagctgtcagccttcatacactaaattgtatggactttgatcatgatccatttgacagtgatcatgaattgctctagtttggttaagtacttattacaggttctaagactaaacccaacaagtttatatatgtataatgagctccaggtagcctcaaatttactttgtagatgttcatctttttctggaatttccccctcaattttcaaccatctcttctcttttccatgattccatctaattcattgtgctggttctacctttcattttgtgagactggttccctgagctccctctcaatctgtcactcagccacacgctgccccagctctctacccctcttgactactgctgcttctgtatgctaattaagaatctatccaagttcagttagatcaccctactgtgatgtgtgataaatcccaatttggaagtaatggtggacaaggtggttcccttggataattttgaaaggatagttcctccttggatgattaatcaacctagagctagaatctggacaaggtacaggaaatgattgcaaattcaaatcatgacagtaattttctgatgtgtatacgcccatctgtttgtgaggttggtggaggcgtggagtctggttggaccggggaccctaatggtagctggcttggatgcctggggtggacaggtgacctaaacagtagctggggtgtgaaaaaatggtactgtgtgctttactgctttctggaggagattttggaaagtgcatgggtactgtttgctgcaatgctccctttgtccccttctcttacttcatacttactccctctatcccaaaataactccaaccctatcttcccaaggtggatttaagaccaaaatacccataattaataataaagttatattggtgggtgggtaggtttggggtattgaagggataaaatttctcgatttgcggatcaatgataggtaagaaggtagaagctagtttattttgggacaattttcaaactataaaattaatttattatgggacggaggagtagttcatatctaacactgaaaatatgtaacttgctaattaattgttcctcttgtggcttggacatgattggttgctggattgtggctttcctttgtatgatgaaagatgaccaagggcatctccatgcgttgttcacaaacatagagcatgatactgctacagcaaccgcaacattgattcttttgtcgcagcgggctggtttggtgctgggtccacatttttatcgttcttttctccttaatttttctcatgggcgatttctttactaactctggtttgaacgagcataccatctatcttgttatgcaggctcccgtggactgagtccatctcttctaggttcggtcatttgcatacactggagatggcctaagctagatgtgctgctctctcggatgctcgggatcactcactcttggcaggtcctatattatgaggcatcaaatggcttacaagagcatgaaatatttgcaaaattcatatgaaactcaattgttccaagcagagcctgcattagctgtggacaggatttattcatcattttttttcttgcccaatttctaaccaatcaattagtcatacttgctacctatcttagcaagaagatcagagagctccctcggcctggagcacatgacggcgtggtcggccccggcaatctcttcgacttccacgcccgggctcaacgtaatcatgtaacggtgcacctccttcaagtcatcctccatggccatcaggcacaccctctttaccgaaccgtagttggcactggtaagcagtctgtcatccttcatcgttggatcatccacgaactggctggtaggtctcaccaataatttcgccagtgtcaagtcctacaatataccgtagatatgctaatgtaatgagatttgagatatcagttagtctgaattctcaaattaaatgcaaattggaactttcaagaaaccagagataatatgctagttcattgcctcagctggacttagtggataacccttctccgccaagaaatttgggcctaggaggattgcagttcctggaccttgtttgttgttgatcggtatcattttgctatccaggagcatatctttgggagctttttcccttatcaactgtacaaacaagaaaaaatatcagtaattgaataaatgttcagacatcagagtgagtatttatcagtttgctgatcagtgatcacctcggggatgatgcgcttgccgacgcacggcacggccgcggcgacgaacacggccacagcaatcttctccgggaacctttccatggcgagggcgatgctgaggccaccgaagctgtgcccgacgaggatcagcctctcgccggccggagcctcagccactgcatcgaggagcggctgcgagtactcctcgaaggagtgcacctcgtcaacccgtgctgggtggacgccggacgcggcgaggtcgagcgccgtcacgcggtgcccctcggagcggagcatggtgaccaccttgtaccagcaccatgctccgtggcagaggccatggacaaggatgaaatgcttgctgctactgctgctgccctccatttcctgtaagtgtttgtggtttgctcttctgcaagtttctgacgctgtgatagtagcgatgaattgatttatacatacattatcgagaaatatatatgacagtggcatttataatttt

SEQ ID NO: 24351 - DNA, 2712 bp, Oryza sativa
  ref <308>: DATABASE ACCESSION NUMBER: AK099793
  ref <309>: DATABASE ENTRY DATE: 2002-08-28
gcggcttccccctcattcatggccattaccacgatgtgtcaccccaccccaccaccgcccgctgctccacttctcctcctcctcctcctcctctcctagtagtagcaacctacggacatcacccccacccgcttcatttatcacttgtctccccctctccctcgcctgctccgctgctcttgtgcttcgcgcctcgcctgacctcgctgtcgctgccgccagccatgaccgggatcgacctcaacaccgtcgaggaggacgaggaggaggcggcggaggaggtggcggcgaacggctcgtctccggctccggcgagggcgggcgcggtgtgcctcgagctgtggcacgcctgcgccgggcccgtggcgccgctgccgaggaaagggggcgtcgtcgtgtacctgccgcaggggcatctcgagcacctcggcgacgcgcccgcggcggcggcggccgcggccgccgtgccgccgcacgtcttctgccgcgtcgtcgacgtcaccctcctcgcggacgcggcgaccgacgaggtgtacgcgcagctctcgcttgtcccggagaaggaggaggtggcgaggcgggcggacgacggcgagggcgaggacggggacggcatgaagcagcggttcgcgcggatgccgcacatgttctgcaagacgctcacggcgtccgacaccagcacgcacggcggcttctccgtgccgcgccgcgccgccgaggactgcttccctccactggattacagccagcagcggccgtcgcaggagcttgttgccaaggatttgcacagcactgaatggaggttccgccatatttaccgaggccagccacgtcggcaccttttaccacaggttggagtgcatttgttaacagaagaagcttgtttctggggatgccgtactatttttgcgaggtgatgatggggagctaagactgggagttcgccgtgcagctcagcttacaaatgagtacacttatcaagcactgtcacaccagtgtgctaatcatggtacgcttagcaatgtagcacatgcagtggctacagacagtgtgttcaacatatagtacaatctcaggttcaggcagtcggcattcattgtccagtactggaagtgtcattaagagcctcagccaaccattttctgttgggattaggttcataatgagatatgatagtcaagcatgctcatcaaagaaggtactccggtataacagctgtaagtggtcatacataccctatgtggcatggttccaaatgtgaatgttcgttggttacatagaatgtgttcgctgagttccgtcgtcccagcagggtctatccttgaagcattgagccactagttcagtgtcaggatcccatttgtccaccccccattcaaagcgattggtaaccatgtcttccccatgttaatccagaatacatggttccacgtgcaggtggttgtcctgattttgcggaatctgcccaattccacaaggtcttgcaaggtcaagaattattgggttttaaatctcatggtggtactgctgctgctacttctcagccatatgaagcaaggcatttacagtacatcgatgagcggagttgctccagcgatgcgagtaacagtatcctaggggttccaagacttggtgatagagcaccacttggaaacccaggattttcctaccattgctcaggctttggggagtctcacagactccaaaaggtcttgcaaggtcaagaattatttcgtccctaccgaggaactttggttgatgcgtctatgggtagtaatgggtttcatcaacaagatagtcctcgtgcaccaggtgtggtgaataaatggcaggcacaacttcatggccgtgctgcttttcatggaccaccagcactggctcttccatctcaatcatcatctccgccatctgtcctaatgtttcagcaagctaattcaaagatgcccaggttggagtttgggcatggacagttggacaagcacgagaatgataggcgtgttaggtttggtccttctgaaggaattgaaagaagagagcaaagaataccactccagccttatcctacttctggagaagtgatagatggacaggttacagttgagaagtctcactcccctggtcgacatggaaaggatggtccagataacaaagctgttggcacaaatagttgcaaaatatttggcatctctttgactgagaaggttccagcaagagaagaactagatgatggcgacgccaactattcactccagtctttgaagcaagtgccaaaatccctgggcaatagttgtgctaccgttcatgagcaaaggcctgttgttggcagggtgattgatatttcaactatggatatgatgatctgatttatgagctggatttgcaaaattatctggaggtgaagtaacactaggattgcttccaaccacatattttgctgtggatctccagatggtggccgagtatcagggagatggagggactgatgattctgatatttttatcttagatgtaggcgttggagcacttatcatgtgacatagtacctagctgctcgtctgcatttgttgcctctgcaactttaactgtcagcggcatttgtcgccgctggaaccatctaagtacgtgtttataagctgtaagctatgacaagcgcattagagggtgctggtactgttagaacattaattaatgtcagtagcatgctttgatctt

SEQ ID NO: 24352 - DNA, 878 bp, Oryza sativa
  ref <308>: DATABASE ACCESSION NUMBER: AK099794
  ref <309>: DATABASE ENTRY DATE: 2002-08-28
ggcccgtctcctcttcggccgtctttgctcgaccggagcggagcgcagcgcaggccaacggcgtggacgacgcgcgccccctctggatcgccgctcccccgcgcgccacagcttccatccggcgactgcaaggccgcccaagccaagagggtttctttgcaagctttagccgctcgacgttcattgacagaacatgcctaaaataaagacaagccgtgtcaaatatcctggaggatgggagcttattgaaccaactatccgtgagttggatgccaaaatgagggaagctgaaaatgacacacatgatgggaagagaaagtgcgaagccctctggccaattttccgtatttcccatcaaagaagtcgctacatatatgatctttattacagaaggaaggagatatcaaaagagttgtatgagttttgcctggaccagggttatgcagaccgtaatctgattgcaaagtggaaaaagccgggttatgagcgcctttgctgtcttcgatgcatacagacacgagaccacaactttgcaactacatgcgtctgccgggtccccaagcatctcagagaggagaaggttatagaatgtgttcactgtggatgcagaggctgtgccagcggtgattgagatatcgtcattatcttgtttgaatctgtcaaactaagcagacataatgtttcttgagcgaaatttcggctaaaaacgtttacgaaaacgttttgtaaacccgcctaccgggtatgacgttatttaagtacctgagattgtggttacggtctgcattaatctgccgcatggtcattgcttgatcatcggcctcaacaccctgcatatgtgtattctaaagttttttaatggaaacatctgttactct

SEQ ID NO: 24353 - DNA, 2538 bp, Oryza sativa
  ref <308>: DATABASE ACCESSION NUMBER: AK099795
  ref <309>: DATABASE ENTRY DATE: 2002-08-28
tccctggcaaacttccctctagcgtgcatccgctggaagctgacaatgctggaatggttgtcatcaaggattttatctcgaaagaaatcatatctcagtttagggctcacacaagtcccatatctgctctttgttttgaccctagtggaactctgttggtcacagcctccgttcatggccataacataaatgttttcaggatcatgccaaccgtaatagctaacagctcaggctctatacgctatgattgtacagcatctcatgtccacctttacaaactgtatcgtggcatgacagcagctgtcatccaggatatctcttttagccattttagccagtggatatctattgtttcatcccgaggtacttgccatatttttacattgtctccttttggcggtgatgcgagtctgctgccacagaattctcacagtgatgggctaccccttgccccatgtcaatcaaggccatggtggtcaaagccatcattccttatggatcatcagcttcatccagctccttcaactgtaactaattctgtagtcagtaggataaaaaacagttcttctggttggctaaatactgttagtaatgtggctgcttctgcaagtgggaaactatctgtaccatctggcgctgttactgctgttttccacaattccaactatgaaggttcattgccagttccatcaaaggctaatgccatggagcatctattggtgtattcaccatctggccatgttattcaacatgaactactgccttcaggttctgaatcctctgatagcagtccaatagttgggcctggttccttgcagatccaagatgatgagttgcatgttactgctgaaccgactcagtggtgggatgtatgccgtaggacaaactggccagaaagggacgaaaacattgcaaacatagtcttccataatcaacgaaatagtatgatggcaatggatgcttctgactgtgatagtgagcattcagattccgttccatcagatggtatttctgggaaagagatgatgagatctcgagaaagatcaagttggtacctctcaaatgcagaggtacagataagttcatggaggattcccatttggcagaaatcaaagattttcttctatgtgatagatcaaccacctgcaaaatcaggggaatctcttagctctagtgggggagagattgagattgagaagctgcctctgcatgaggttgaacttcggaggagggaattgctccctgtattcaagcagttccactattctgaacagaacttcagtgacaggaatcttgcaataggacggtttcagaatgcattgacatacatcgacaaggataatggtgctcatggatccaaggcggggttccctatatctggattttacagtgatatgaggaaaatgcagaacatgaatggtttagaggggcagttattgttggaacctatcactaatgatttacaaccaatggaaaaatgcaattctgttcaatctcctaaagtggcaaattttactgcccttcacaatgtagataatgagagcatgaaccatgtttcaacagcaactggagcaaccacatcagtcacaacagtggacactttaccttcaaccatcagaccattgagcagctactccctcttggatggatctcttgatgatggattaccatcacctgcaagtaatgtatcattcaggcctcagataaccaacaattcttcagtaagcaatggtacaatgactgacatctcaaatgggtgtctcacgagcatcaattctggacagaatgaagcatctgattctcacaactcagtggagtttacccagtatttccaagagggctattgtaaaatatcagaactcgatgactgccgtgagttaactgaagctgttactgatgctgacagcagcagcagccactgcgagagagagaagcccgaggaagatggggataacgatgacatgcttggggctgtttttgccttcagcgaagaaggttgaacctaataatatactctgcttttacatagagaatggaaaacagtgcccgtgatattacctagaaaatggtggatttccattaggctttcgtggaataaattggtgctgagatgataatctactatttggtacatattagaaaggtgaagcttgtgctcgatatccatttgtgagaagttttactcaggaattgagatcaagatccttccttccgggccattaactaatccacggatccacgttaaggggagcttggtgttgtcgagaagttgctgctgcctgccgcaacactgccccttttccgttgctttgtacatactgtaaaagaccatttgttttgtgaaatacgtctctggaacattggacggtccaacttccttggcagccatatttgttgactgcttcctgccaaggcctgttaatgttccttgtttatttgtacagtcttttctgtttcattaaggaaaaagaaaatctagcaaggattaatgtgacataactgtataaacattcagtaaagaatttccgtttacgaagt

SEQ ID NO: 24354 - DNA, 3673 bp, Oryza sativa
  ref <308>: DATABASE ACCESSION NUMBER: AK099796
  ref <309>: DATABASE ENTRY DATE: 2002-08-28
ggctgaaagaatccgccgccgccgccttctcctcttcctcctgctgctgctggctcccaacttgctctccgggctgaggctgcggctgctgctcccccgcctgcgcgccgccgccgccgccgccgccgtcgtcaggaaaatgtcatcaaatcctgatggaggcagaagttttgctcggagagatattttactcaagatccagtcagatgctcaaaaatggtgggaggagagcaaggtttttgaggctgaacctgggaataaacctccgggccctggggaaaagttctttggcaactttccatatccttacatgaatggcttgctacatttgggccatgcgttctccttgtctaaacttgagtttggtgctgcatatcagaggcttcgtggttcaaatgttcttttgccatttgctttccactgtacgggaatgcccatcaaggcctcagcagataaactctctagggaggcgcaacaatatggatatcctccagcgtttcctgaagtagaggatgattcaagtgcagaagttgctgatagtagccaggctgacaatgcggcttctgttgtcccagataaatttaagagcaagaaatctaaggctgcttcgaaggttggcatgcagaagtttcagtgggagatcatgagaggctttggcttatcagatgaagaaatcgccaaatttcaggatccttaccactggttaacttacttccctccattggcgaaggaggacctcaaggcctttggtctgggctgtgattggaggaggtcattcataactactgacatgaaccccttctatgatgcatttgtccggtggcaaatgagaaagctgaagaaaatgggcaaggttgtcaaagatatgaggtacacaatctactctccattggatggtcaaccttgtgctgaccatgatcgagcatctggtgaaggtgtacagccacaagaatatgtgttaattaaaatggaagttgttccaccttttcctcccaagttgaagaccatggaaggaagaaatgtttatttggcagcagccacattgagacctgagacaatgtatgggcagacaaactgttgggtattgcctgatggaaaatatggggcctttgagatcaatgacactgatgtcttcattgttacatcaagggctgctcttaatcttgcatatcagaatctatcaagggtcccagaaaaaccaacttgcttaatggagttatctggttgtgatctgattggtttaccactgaaatcccctcttgccttcaatgagatcatatatgcacttcccatgcttactatcttaacagataaaggtactggcattgtgactagtgtcccaagtgattctccagatgatttcatggcactacaggatttagtcgcaaagccagctttgagacagaagtatggtgtcaaagatgaatgggttcttccctttaaggttgtaccaataatcaacattcctgaatttggagacaagtctgctgagaaggtgtgcctcgatcttaagattaagagtcagaatgacaaggagaagcttgctgaagcaaaaaggatgacatatctgaaaggttttactgatgggacaatgattgtaggggagttcaatggcagaaaagttcaagaagcgaagccactgataaagaacaagcttttggaagaaggcacagcagtgttgtatagcgagcctgagaagaaagttatgtcgagatctggtgatgagtgtgttgttgctctcacagatcaatggtacattacttatggtgagactgaatggaagcagaaggcagttcaatgcttggagaagatgaatacattctcagctgaaactcgtaatggttttgaacacacgttaggctggctgaaccagtgggcctgctctcgttcttttggcctaggtactcgcattccatgggatgagcagttccttgtagaatctctttctgattccaccctctacatggcatattacacaatcgctcaccttttgcaaaatggcaacatgtatggcaaggaaatatcttctatcagaccagaacaaatgacagatgaagtctgggattatgtgttctgtgatggtccagcacccaatagtgacatccctcctgccctcttgagcaaaatgaagctggaatttgagtactggtatccatttgatattcgtgtctctggtaaggatcttatccaaaaccatctgactttcagcatttacaatcatacagcacttcttccagagcatcattggcctcgtggtttccgctgcaatggacatcttatgcttaattctgagaagatgtccaagtccacagggaatttccgaactcttcgacaggccattgaagaattctcttctgatgccactagatttgcccttgctgatgccggtgatggtatggatgatgcaaactttgtctttgaaacagcaaatgctgctattttgaggcttacaaaagaaattgcatggatggaagaggttatagccgctgaatcttctctgagagctgggcctccctctacctatgctgaccatgtgtttgccaacgagataaacattgcggtgatagaaactgagaagagctacaatgccttcatgttcagagatgcccttaagttggggttctatgacctacagttggctagagatgagtacagactctcttgtggagcagcaggcatgaatcgtgaattattatggcggttcatggaggtgtagactaggctcattacccccatttgtccacactatgctgagcatgtgtggcgaaacatcctgaggaaggaaggatttgcaataaaggcaggctggccaattgctggaaccccagatcccacactaagaattgctaacaaatatttacaggactccatagttaaattcaggaagctgctccagaagcaagaatctggttccaagaaacccaagaagggaactgcacctcctccatctgagcaaaacaagctgactgttggtctggtctacgtcaatgagaactattatggatggaaagagcaatgtttgagggttctccagtctaaatttgatagccaagcacgtttgtttgctcctgatgaggagattaatgaagcattgaagaactgctccatcggacaggaaactaacttcaaacaagtccagaagctctgcatgcctttcatcaagtcgaaaaaagatgaggcgaggagtgttgggccccacgctttgaatttgaagcttccttttggtgaaatgagtgttctcgaggagaacttggagctgatcaagaggcaggtaggccttgaacatgcagaggtcctgtctgcttctgatgaggctgctcgtgctaaagctggcgtgcatgcttctatgctggacaagaccccgccttctcctggtgagccagtagcaatcttcatgagcaaactagacctcgaagcgcggtgctgagcttaactgtcacaatgaaattgcaaaatgaatagttaggaggagttcactgagatttccttattttcatgcacaagttaaagttatgttagcttgcagcttctacagtatcatagtattttgtggaaaagaacagtttggttattccctgtaacagtgatggtataagaaacccattttgaagaataattgagtgtattgaatgagttttatttgcatcaggtttgaatttgatgcttctatacc

SEQ ID NO: 24355 - DNA, 3650 bp, Oryza sativa
  ref <308>: DATABASE ACCESSION NUMBER: AK099797
  ref <309>: DATABASE ENTRY DATE: 2002-08-28
gactcaagtcctcccatccagcagctcagccgccacaagccatggccgatgcgagctcggccgccgtcgctgcccccaagccccaactggccgccggcacttgagcaccaagcagggccagctcgacgacgccgtcgccgcccgccaccaagctcgaacagatcagctccagcaatgttcaatccaacgacttttgcattgattgattgattttctctgctcgtgtgattgtgtgattggaatcgactagcttgaaccaattgatagtatccctgtgctgtgcgtgcattgcatgtgtacatattaccaaatctctgttgcatatggatccactcttggatatcggttttcgcttgaatgccgttttcttctgttattttgttgttcctttttttaagctataaaacccaaccttctctttatgatctgtttgttttcaatattgtaattttttttctggaatttgttgttaattataaccttttcattatctcctgagctagcagattgatgatgaaacaatttctccaagcgtttgttacgctgacatccatatatgatggagggctatgttaccatagccttcatagttttcaatctgaaccatctgctgctcaatcattttccccaggttttttttacagcgattgtttctccattgctaactgttctgtattgatttgggattcaaattcctttcatggtttttgctcgttttctttacaatctcattcatttgtctgtgcaacatttgggaaaaattgggagaagtgatgatattatatccataccacatttctgcattcactatgatgatcattaacttcatgcactaccatctgatctcccactacacataataaagttatggtacaaggtatataaattgaagttgtgcaatgatggactgattttcatttacacgctgaatttattttgttaattaatgtgcaatctgtgatgcaaataatcccatttgctgaatcactgtgattattgcaatcaaaatcaccatctttcggctgagattgcacattgttattctgcaaaatttatctttgttttaaattaaggtttatgccatttggtatctgacacataatcatttctctgattatgtgtctcgaaacatggcagaaagtgagggggaacggtccttgcgacactggttgctactatatgagcttctagttactatatacccgtttacatttccttgcttttttagtatttctgtttaacttttgtcatgcctatgtgttgtgatgcattagttttgtactgtggagattgtacccctgtcaaaccacttaatgaaattacagataattattagactgaaaatgccgtcttttggctgaatcactctgatcaatcaaaatcaccatatttcagctgagattgcacattgttgttacgcgaaacaattttatctttgttttaaattaaggttcagccatttggtatctgacacataatcatttctctgattacatgtctcgaaacatggcagaaagtaagggggaacggtccttgcgatgctggttgctgctatatgagcttctagttactatatacccgtttacatatcctttgctttcttagtatttctgtttggctttattcattagttatgcctatgtgttgtaatgcattagttttgtactgtggagattgtatgtctatcaaactacttaatgaagttacagataaatattagactgaaagtctaaaatcactgtagcatattgggctaaaaggtatagtttgtttacttggaatctctcgaaagtttgtttgattgctgaatttgtgctccagtttgtttgctgtttcttacatgaagcattacctgtcctgatgttatttatcacttatgagatttgtgtatgcagtttccattttttcagtgcctgttatgcagatgccaagcgtctcattggccggagatttactgatgcttctgtccagagtgatattaagctctggcccttcaaggtcattgctggacctggtgacaagtcaacgattgtggttcagtacaagggtgaagagaagcaggttgcagctgagatgccaagcgtctcatcggccagagatttactgatgcttctgtccagagtgatattatgctctggcccttcaaggtcatcgctggacctggtgacaagtcaatgattgtggtccagtacaagggtgaagagaagcagtttgcagctgaggagatctcttctatggtcctcatcaagatgcgtgagattgctgaagcttaccttggcaccaccataaaaaaagctgtcgtaacagttcctgcttacttcaactactcacagaggcaggctaccaaggacgctagggtcattgctggcctcaatgtcatgcgtatcatcaatgagcctactgctgctgccattgcctatggtcttgacaagaaggcttccagtgttggtgagaagaacgtcctcatcttcgaccttggtggtggtacctttgatgtctctcttctcaccattgaggagggaggtcaaggccacagctggtgacacgcatcttggtggtgaggactttgacaacagaatggtgaagcactttgttcaggagttcaagaggaagagcaagaaggacatcactggcaacccaaggcctgtcgggaggctgaggacagcttgtgagtgggcgaagaggactctctcccctccacttcccagaccacccaccattgagattgactccctgtacgagggcatcgacttctactcgaacatcacctgcgccaggttcgaggagctgaccatggatctcttcaggaagtgcatgaggggataccaagatggacaaagagcagcgtgcacgatgttcatccttgttggtggctccaccaggattcccagagtgcagcagctcctccaggacttcttcaatggcaaggagctctgcaagaacatcaaccctgatgaggccgtcgcctatggcgccgctgtccaggcccccatcttggtctggagacggccagaggagtgatgacctagaaggagcaggccggtcttctccacctactccgacaaccggcctggtgtgttgatccaggtgtacgagggcgatgggagaggaccatgacaccattgagtaagtgaggagatcgagaagatggtccaggacgcggagaagtacaagtcggaggacgatgagctacatcgaagaacatgcacaaacaccatcaaggtccgagcacccacgcggcggccaagaagatgggaggacgcggtgggagattgagccaagatggacgaggacgtgccgttaaattttggctgatcatggtggttaaattttggctacgttgtaatgaaaaatgcattggttgcttcgttaaagtaatagtactacaattgttctgtttcggttcatccgcatttgccttttgatttttgtttagctgctacttaaatcgcgtttattttgcatacagtatctatctgtcttctccaaagcgttggggtgtgcttttcttccccggtggtattcactattcagagtcttttgtcgtcgtgtctgctctaatatgccatccattgtagggagtggattacgtccccccatcgtgtatctttttctttcaaaatcaatgcaaatagttgttaaaaattctg

SEQ ID NO: 24356 - DNA, 1962 bp, Oryza sativa
  ref <308>: DATABASE ACCESSION NUMBER: AK099798
  ref <309>: DATABASE ENTRY DATE: 2002-08-28
gattttccgccccccctctcgccgccgccgccgccgccatggccacctccacctccgccgccaccgcccccctcacctgccaccacctcggcctccgcctccgccctcgcctcccctccctccccctccgccccctctccccctccccctccctctccctctcccgccccaccccactcaccccttctcctcctcctcgccaccgcgcccttcatgcctccgcctccgctgctccagcggcgccgccgtcgcagccgccgaagccggtgcttcagggggcggcaatcaagccgctggtggcaaccatcgggaccggggtgctgatatggctggtcccgccgcccgcgggcgtggcgcgcaacgcgtggcagctgctgtccatcttcctcgccaccatcgtcgggatcatcacccagcctctcccgctcggcgccgtcgcgctgctcggcctcggcgccgccgtgctcacgcggacgctcacgttcgccgccgcgttctccgcgttcggcgacccgatcccgtggctcatcgcgctcgccttcttcttcgcccgcggcttcatcaagaccggcctcggaagccgcgtcgcctacgccttcgtctccgccttcggcggctcgtcgctcgggctcggctacgcgctcgtgttcgccgaggcgctgctggcgccggccatcccgtcggtgtcggcgcgcgcggggggcatcttcctgccgctcgtcaagtcgctgtgcgaggcgtgcggctcgcgcgccggcgacggcacggagaggaggctcgggtcgtggctggtgctcacgtgcttccagacgtcggtgatctcgtcggcgatgttcctcaccgccatggcagcgaacccgctggcggcgaacctgacggcggggacgatcgggcaggggatcgggtggacgctgtgggcgaaggccgccattgtgccgggcttgctgtcgctggtgtttgtgccgttgattctgtacctgatctacccgccggaggtgaagaccagccccgacgcgccgcggctggcgaaggagcggttggagaagatggggcctatgagcaaggaggagaagatcatggctggaacgctgttcctcacggtaggtctttggatctttggtggaatgctgaatgtggatgcagtgtctgctgcaattcttggcctatccgtcctcctgatttctggagttgttacatggaaagagtgtttgggggaggctgtagcgtgggatacccttacatggtttgctgctcttattgcaatggctggatacctcaacaaatacgggttgatctcttggttcagtgagactgttgtgaagtttgttggtggccttggtctctcatggcaactatcgtttggtgtcttggtgctgctgtacttctactcccactatttctttgccagtggcgcagcgcacattggagcaatgttcactgcatttttgtcagtgtccagcgccttgggcactcctcctctaattgctgccatggttctttcattcctctcaaacatcatgggtggactcacgcactatggaattgggtctgctcctgtcttctacggtgctggctatgttccactggctcagtggtgggggtatggatttgtcatttccatcgttaacatcatcatctggcttggtgctggaggcttctggtggaagatgctcggcttgtggtgaggagcaaagtaaatgcgggtttttccgtttctgtttcggtagaagactgaaagaaacctagctgaaattgcggtagcacaggtacagccatccgcaaattttgtcgacatgattttgcaaccagcaacccattcttttagtttgtaccaatacatttgtttcatccttgggttctaactgttaattgcaaagcctgggcacagttttactggcaacaattggtatgttgaatggatcttggtgatcttaacctgcagattgtgacccttgtgcctct

SEQ ID NO: 24357 - DNA, 1605 bp, Oryza sativa
  ref <308>: DATABASE ACCESSION NUMBER: AK099799
  ref <309>: DATABASE ENTRY DATE: 2002-08-28
gagctccacagcctccccacgctaccctcccaatgccggcgctcgggacgctctccggcggcgccgccggcgtggccggcctcctccgcctccgccgcgccacgccttcccccgccgtcgctactcccttccccgccgcggccgccgccaggtgcgcagccgcagccgccgccgtcgtccccgatggaggccaactcgtgtggggcaggcagctccgccctgcgctgctcctccccgccgctggaggccttctgcagccgccgacgtcgccgtcgtcgtcgcaggccggcaggaggcaggcgctccgcccgcccgccgccgccacctcaggggaagcgaagccagcggggttcctggagaagtaccctgccttgatcaccggcttcttcttcttcatgtggtacttcttgaacgttatattcaacatcctcaataagaagatatacaactacttcccctatccatactttgtgtcggtgatccatctgcttgttggtgtcgtgtactgcctcgtgagctggaccgtcgggctcccaaagcgtgcgcctatcaattcgacactcttgaagctgctctttccagttgcgttgtgccatgctcttggtcatgtcactagcaatgtatcgtttgctactgttgcagtttcatttgcccacaccattaaagctctggagcccttcttcaatgcagcggctacccagtttgtccttggacagcaagttcccctgcctctttggttgtctcttgcccctgtcgtgcttggtgtttcaatggcatcactgactgaactttcatttaactggacgggcttcatcaatgctatgatctctaacatctcattcacttaccggagcatttattccaagaaagctatgactgatatggatagcaccaatgtgtatgcttatatctcaataattgcccttattgtgtgcattccaccagcagtgatcatcgagggacctcaactattgcagcatggttttaacgatgcaattgcaaaagtaggcttgacaaagttcgtttctgaccttttcttcgtgggactgttctaccacctctataaccaggttgctacaaacactctggagcgagtggcccctctgacgcatgccgttggcaatgtgttgaaaagggttttcgtcattggattctccatcattgtttttggcaacagaattaccacacagactgtaattggtacttgcattgccatagctggtgttgccatctactcgtacatcaaggctaagatcgaagaggagaaaagggcgaagagtgcatgatgaggtggtttctgtgaatatggcaaggtggctgcggtgcgtgcgttagttttactcgcctcagggacaacatgggcgaggatcatggcgtcttcttcttgcgtatcttgtttttgcttttggggttatttggtcaaattgttcctagtctggtgttgaacagcatattgcggtggtaagattggttatcatcagttgattgtcgagagagcccaaatgtgtagaaataaacgctcatacttggaaaagcttttcattttgtatgtaataaccgagaatgttattcgtgtctgtgaccttgtctttgttggctctgagg

SEQ ID NO: 24358 - DNA, 2921 bp, Oryza sativa
  ref <308>: DATABASE ACCESSION NUMBER: AK099800
  ref <309>: DATABASE ENTRY DATE: 2002-08-28
gcggcgaaggggcgaagcgtactccttccctgcagctgcttccatcaatacaatacaactagtgatttcgttgcagtgatcctttctgtcgatggcgcagcagcaggggcagggggcgggtactactacagtggcgatgatgagccggaacccgagctactactactccggcgagggtgagctgagcctggcggtgcagcggcaggactcgctgtacagggacgcgagccgcgccgggcagcatgagcaggcgcatggcgaggggtgggcgcgcacgctgcgtctggccttccagtgcttcggcgtcctctacggcgacatcggcacctccccactctacgtctactccaccaccttcgacggcggcatccgccacaccgacgacctcctcggcgtcctctccctcatcatctacagcttcctcctcttcaccatcatcaagtacgtctacatcgccctccgcgccaacgacgacggagacggcggcactttcgcactctactccctcatctcccgccacgccaaggtcagcctcgtccccaaccagcaggccgaggacgagctccacctccacatcagcaagtcctcctcgctccgccgcccctccgtccagcgcctcgcctccaccgccgaggagcgcgcccagtgggtcaaggacctcctcgagaacagccgccccgtccgcatctccctcttcctcctcaccatcctcgccaccgccatggtcatcagcgacgcctgcctcacgcccgccatctccgtcctctccgccgtcggtggcctcaaggacaaggcgccacacctcaacactgagcaggtggtgtgggtgacggtgggcatcctggtgatgctgttcgcggtgcagaggttcgggacagacaaggtggggtacctgttcgcccccgtcgttttgctgtggctcctcctcatcggcggcgtcggggtgtacaacctcgccgcccacgacgtcggcgtcctccgcgccttcaacccaaagtacatcctcgactacttccgccgcaacggacgccacggctgggtctccctcggcggcgtcctcctctgcttcaccggcaccgaggcactcttcgccgacctcggctgcttcagcatccgctccatccagctcagcttcgccttcggcctcgtcccggccgtgctgctggcctacgccgggcaggccgcctacctgcgcgtgtacccggaccacgtcggcgacgccttctacgcgtcgacgccgcaggtgctgttctggccaaccctggtgctggcgctggcggcgtccgtggtgggcagccaggccatgatctcctgcgccttcgccaccatctcccactcgcaggccatggggtgcttcccgcgcgtgaaggtggtgcacacgtccaggcagtaccaggggcaggtgtacatccaggagatcaacctcctgctgggcgcggccgcctgtgtggtgacggtggcggcgcgggacacggtggtgatcggcgaggcgcacggcatctgcgtggtgctggtgatgctcatcaccacgctgctgctgacggtggtgatggtgctggtgtggcgggtgaacatcgggtgggtgctggtgttcgcctgcgtcttcgcctccaccgagtcggtgtacctgacgtcggtgctctacaagttcgcgcacggcgggtacataccggtggccatgtcggcggtgctgatgggggtgatgggggtgtggcactacgtgcacgtcaggaggtacaagtacgagatggagaggacggtgtcgacggagagggtgagggagcttgtgtctcggagggagctgcagagggtgcccggtgtggggctcttctacacggacctcgtgcaggggatccccccggtgttccctcacctcatcgacaagatcccctccatccacaccgtcctcctcttcgtctccgtcaagcacctccccgtcccgcacgtcgacccctcggagcgcttcctcttccgccaggtggagccgcaggagcacaagctcttccgctgcgtcgcgcgctacggctaccgcgaccgcctcgaggacgcccgcgacttcgtcgccaacctcgtggaaaggctgcagtactacgtgcgggacgtcaacctgtacggcgccgccgccaataataaggtgagctacccgagctctcgttgcgacagcatgggcatacccaagtcggcttcctacgcggagaggctgcagctgcagagggccaggtcggtggccatgctccactcgcattctcagcatcagcggttcatacagagggagatggagaaaggggtggtgttcatcctcggggagagcgaggtggtggcgaggcctcactcctccctcctcaagaagctcgtcgtcaactacgcctactccttcctccgccgcaactgcaggcagggcgacaagatgctcgccatccccaggagccaactcctcaaagtcggcatgtcctacgagatctgatcgatctctcatgcatcccccatccattccttcataagcaaaccttccttaattattgctttcatttcttcttccttcttcattatttcaatctcgatccatctactctactactagttcttcatttcttctctgctactccagtatactccactggttatggttagtactagcagctaagctaagctaagctagtttcataactataagtgcctttattgatgcatgcatgccagtatatatagtgatcatatatatacatacacatatactagcggaggagtatgtaactagttgctagtattgctgattgataattaattgtacaattggatgcatgggatgggagaccactgaattgatccaggttcttcctacatgtttgtatgtatgtatgcttgtagaagcttgcacagatatattgatcatatgattgtcaattccttgttgcaacctc

SEQ ID NO: 24359 - DNA, 3958 bp, Oryza sativa
  ref <308>: DATABASE ACCESSION NUMBER: AK099801
  ref <309>: DATABASE ENTRY DATE: 2002-08-28
gagtcgggttcccccctccggactgctgcttaccgtgtgctctcccccattcccccactccccccttccgcgagcaggttcgaggtttcggtggccgaaaatggcggaatcgccggctgatcggagcccaatctgagcctggacgcgcagataccgcgccttcctggcccgatctctcgaaaccccttgaaaaatccgagccgaaatggcggccaccgccccgatcgggcttgcgaagcgcgattcggtggtgctctggcctgggggtctcgcgagctgcacttattgtgactgaaagtgtggtcggctctttgctggttggtgtgggcttgggtcgcggagagagtaaagggtttgtggcatgatcagcgctagcgctgtggcgatgcgtggggagatgggtggcggtggcggcggcggcgatgagggagagctggaggacgagcttgatgccctcctcggaaccggtggcgctggcgcgcgtcggcgaggtgaggacgcgggagagagggaacgggagctcaacatgttcaggagcgggtcggcgccgccgactatagagggttcgctgaacgccatcagcgggctgctccgcggcggtggagaggcagccgttaccgttgcagcgattcccgacgctgagacgttgaacgggcatggtggtctcctctcggaggatgagctccgggctgacccggcctatctatcctactactactcgcatggcaatctgaacccaaggttgccaccgccggtgctatccaaggaggactggcggtccacacagagactgaaggcgggggtggttggaggaattggtgacggaaggaaggtatcgccggaggagactggacatgagccgacggtggggaggcctgtgttctcgcagaatgttggttttgatcaggaggaggctgcaaggaatgatgtaggtggtgctgcagagtgggtggatggtggaggtgatgggctgattggtttgtcgcttgggcggcagcgcagctttgctgatatccttcaggacaatattggccgcagaactcctgcttcagagcatccctctcgtgcagttagtcgcaattcttttcttgacaatcaggaactactaaattctgctgatagccagtactccatgcataatgatattctggaagcacaacgtgctgtcggaaatgtgcaaaatgtcagtggccttcccagtattaatgcatccgcatctcaaacttttgcatctgttctgggttcatctatttcaaggaatgccacaccagattctcattatgtccctagggtccctagtcctggccttccacctgtcggtgttaggattaattctaatgagaagaagctgaattgctcatcatcattcaacactgcatcttcaaaagcagttgagcctgatgatattttagctgcaatatcaaacatgaacatgtcaaaagatggtactttgggtgacagtaacagcattagtcaatcaaagttccaaagtgagataagtgaccaccagaatatttctcttgatccaaaagctctccaagttaataagaatcagcattcgctgatgttggaagctgatactgattatttgggtataccaccaatttcacaaccttcaaatccttccttttctgatattaacaagaatgtctcaggtttagcgaacataagaaattctactaacacacgtatagatggacacgcggagatgcaaaggtcttctactttgtctactcggtcatatcagaagtccccaacatcttccaatgcgagcccaggtggttctcctgctcaacaccagaatattgacaatataaattcagcctttttgaactatggactcggtgggtatccactcagcccgggtttgccttctatgatgatgaactgtatgggctctggcaatatgcctcctttgttcgaaagtgcagctgctgcatctgctatagcttcattcggggcagattcgagaaaccttggtaacaatattttgtcgtcacctaccttaagtctatctgatgtgcataaccttggcagaactggtaaccaaacagccacaggtcttttgtcgcctctttctgatccattttatgtccagtacttgaaggcaactcaatatgcagcacaaggaactgccaactgcagtgatccttccttggaaagaggtttcatgggtagtcaatatggtgatttaactgctgttcagaaagcttatattgaagctttgcttcagcagcagaaacaatatggaatgccacttggtaagtcaaccacgtcaaaccatggctattatggcaatttggcttttggcatgggcatggcataccctggaagccctttgggaagtcctgttgcttctccatctggtcctggcagtccacttagactcagtgagcggaatatgagatttccttctaacttgagaaacttgggtggctggaattctgatccaagtggctatatgaatgataacttcccatcttcactattggatgaattcaaaagtaataaggccagaagttttgaacttgctgagattgccagtcatgtggttgagttcagcgctgaccaatacggaagccgtttcatacagcaaaaacttgaaaccgcaacagttgaggaaaaagacatggtttttaaggagatcatgcctcaggctctctcgttgatgaccgatgtatttgggaactacgtggtgcagaagttctttgagcacgggagtgcagcacagcgtagggagctggctgatcaactatttggacatgtgttagctctcagccttcagatgtatggatgccgagttatccaaaaggcaatagaagtggttgacctggaccagaagacaaaaatggttactgagcttgatggccatatcatgagatgcgtgcgtgatcaaaatggaaaccatgttatccaaaaatgtattgaatgtgtaccggaagattcgattcagtttatcatctcaacattctatggtcaagttgttccattatccactcatccctatggctgcagagtcatacagagagtactggagcattgcactgatccaaaaacacaggaaatagtcatggatgaaatattgcaatctgtgtgcatgttggcacaagatcaatatggaaattatgttgttcagcatgttttggagcacgggaagcctcatgagcgatctgtcattattgaaaaactagctgggcagatcattcagatgagccaacagaaatttgcctcaaatgttgttgagaagtgtttaacatttggcggacctgcagagcgggaagttcttataaatgaaatgctcggaactactgacgagaatgagcctcttcaggccatgatgaaggatcagtttggtaactatgttgtacagaaagtactggagacttgtgatgatcagcagcgtgagttgatcctgtcacgagtaaaggttcatttaagtgcactgaagaaatatacatatgggaagcacatagttgcccgggtagaaaaacttgttgctgccggtgagaggaggattgggcttcaggcacaatatccttcataatggcatgaaaatgacaatgtacagctaaccatggctagccagatctaccctgtgtctcctgctttgggctgctacaagccaactttaaaaataaacgtgttgtactaagaagattgtacattttgtagtttttgcttatagtcatgtcaggggtgaggctcagagtttatttacctgatgacgctgcagagaagataggcgttttgtataagtcggttaggtgtaaaaagaggaagaaagtctatattttgcgatgagactgtacaaatctgcgatcctgagagagctaccagctgttcctgtttaggataagattttaatgatctcccatgtttatcactgatgaatgtactcaatactaatgtaattgttccagcttctgaaggcatgtgccttttacaaccttgaatcctg

SEQ ID NO: 24360 - DNA, 3626 bp, Oryza sativa
  ref <308>: DATABASE ACCESSION NUMBER: AK099802
  ref <309>: DATABASE ENTRY DATE: 2002-08-28
gactagcttagctacagactcctctcaccatggtggattggtgggcagagcagacgagcagcatcgtgcttgtattccggcgggtagaccctcgacggcctagcgtccaccgcggtgcttgtatgctgcgaggcaacgcgctgccgttggacgctcgttgtggcgtgctcgatcgccggggccttcgtgcgcttgtacgacgtcgtcaggcctgcctgctagccgcaactcattgcacgctgcgcatatcgagcgttctgctgctagctgatattccagcgtcgcagcgggctgcagctcgtggaggtcgcaactaaccgccgctccgcaccagcttccccggcgggggacagcctgttgcgttgcagctcttctagcagctgcacgagctcatcagagtttgttggttggagcttgggaggaaggggacgggtatcttttggtccaaatatttcgacaagtgaagtgaagaggtaggaagtgccatgtctccaatacttatataattgtgatggtatgattataaatagatgaataataatggtatattacaaaaccttaaaaaaattacagtgtcatgatccaattaaccgttgtgttcaaacagtcaaagacagtctgacaagatgcggacccagtagtatattcaacattagggtgtgtttagttttttgggtgtaaattttttttaagtatacggacacacatttgaactattaaacgtagactaataacaaaacaaattacagattccgcctgtaaactgcgagacgaatttattaaacctaattaattcgtcattagcaaatgtttactgtagcatcacattgtcaaatcatggcgtaattaggcttaaaagattcgtctcacaatttacatgcaaactgtgcaattggttttttccccatttaattaatgccccatatatgtgtccaaacatttgatgtgacgtttttggccaaaaatttttaggatctaaacaaggcctgtgtttagttcacgctaaaattggaaatttgattgaaattggaacgatgtgacggaaaagttagaagtttgtatgtgcaagaaagttttgatttgatggaaaagtcgagagttagaagaaaaagtttagaagtaaactcagccttagtttattttcatggtgctaaactgctactgctgcttatctacatgcccatagcatcctagacttatctctttctcctcccccttatctctttcttctccctttcatagccacatacaacttccctctctatctgtcccacacgggcatgaacgattcttttttatttgtttcttttgtgtgactgagacatgaacgatatatctcttctgaacgatatatctcttctgtttgattcagttcttagatagaatgattttattaatttaggcatcgatctagcatgcggtcggtattaatttaggcatcaatatgtgattttgtcatagccggcttgaatagagctcctccctgttttgttatacagaggaggcgctgccgatgcaatcctatcaagcttagctggggtattggatttgtgtgttcttttccttcttttctttcctcccttctgcttgagttctctaagaactgattacctgattggattttatattggtttttaattttattttttgtccgacatcccgattgaatcttgcatcaattttgaatttgttccttgtccgggcagagggcatcgctcgcagacgaacgcgtaaaaagaaacggacaaaaacggattgacgaacacaaaaattatgtgacgaacggagagttattgattttttaagtagtagttattactatattattatacgggatggctatttggcagtcgaatgttttttcttgcctctatcattcgttttttaagccgtcggatttctttgtgattcgtactggcttgtagttcattttgtagtgtcggtgtgtgggcttatgagctttttatttgtgtctgggcttttgggcttttttttgtgtgtggtaattatgtgggacccacatcagaaattcttttcgacagcctgtgtgggacccatgggcactgttcgaattttgaaatccgcgcttgtcttttttgtgccgacggagagagagtgagtcagatagagggagagagagagatatttctctcgttctcgtcgtctcaggcgacgcggcggcgattccgtcgggcggagcggcggcgtttccgtcgggaggagcggtggcgattccatccggtgattgtgcagtcctgttgcgcagtttgcgggaggtgaagtctttggtttgctggtggctacgacgcggctgtgaagttggagctgatttcgtcatgggtcatagaaaaagatcaaaagtggatatttctagtgaatctaacagtgacaatgattgtagtttgagttctgataatcatgatggtgatgttcatttatctaatcatgatgaaagttctgataatcatgaccaacattttgaggaaaatgatcctttgcttcatttaactaaagaagagcttatgaagaaattgaaaataaagcttggtaaaaggccatttacagatgaccataaaaagaagagacataaagttgaatcagactcaattatcgatgatgcattgttagagattcacaatgatctagttctccattctttgaaaatgaaattaagcatgcttggtgaacagtctaaaaataagtcaagaagctgttaatattgatggagttcactgcaaattctcatcttttggttcttcattcaaacaaggtggagaattatcaaattttgtaatgtttgtgttctgtcgatatatgtttaaatcgattcatccttcaaaatccaaaagacactatttcttctcttcaattgggaatgatcttatgaaacacccttcaaaaactaattttggaatggtccaaaagagtttttctagagcatcacttgctagaccaattgagatatgtgacatgctgtttttcccaatattgcatttgaggcattggtttctgtttgttgttgatttgaaagatgagagttttgttttcattgactccttatttgaagaagaagaagactatcaatacaatgctagatgcagattgatatcaaaattttcaattgtatggaggaaatttgtctctgaacatccaattaactttgctagtttcaagataatatacccacctcgtccaagacaaacaaatcgccttgattgtggtatttttactctgaaattcatggaaatttggcgtccaagagttctgctaaccaaccagttctctcaaaaagacattcctaacataaggattcaatatgtcaacaagttgtttttccatccatgcaacattatgctgaactctgcaacaaagaaacttgttactgactattatgcaaagggctgatttgattcaacaggaatactttgaaaaccaagattactttagctcaacagtttatagtagatttgtatagatacaatttctgtgccatattgtaactattacagtaagataacaacttgaaaggtcacatcacaaaaggtaccaaacttcatatattgtaactattctgaacgactattacaattgttcactacgcaggaatataacttctcatactcagt

SEQ ID NO: 24361 - DNA, 1707 bp, Oryza sativa
  ref <308>: DATABASE ACCESSION NUMBER: AK099803
  ref <309>: DATABASE ENTRY DATE: 2002-08-28
ggcacaagcaaagcaaaccactcgccgaacaccaactcctcgccgccgccgccgaggaggaggaggagggagcgagcttgacgccgtgccggcccccatgtccggcttcgcccagaacgcccgcgggatgggcctcggcatgccgcagaacgtcatgagcgggttcaagccggagtccgtgccggtctacgccgccctcaccgacgagttcgccgtgttcgatcggtggttcgcctccgtgcccacctccacccagcccaatcgcctctacgtccattccgcgacctcccatggcctcaccttcaatgcccgcaaggacctcatccatggcttcccgcagaagaccttcttcgatagcctcgaggagaacggcttgtcctttggcatctactaccagaacatcccggccacgctcttctaccagagcctccgccgcctcaagcacctcgtcaagttccaccagtacagcctcaagttcaagcttcacgccaagtggggaaagctgccgaattacgcggtgattgagcagaggtacttcgattgcgagatgttccctgcaaacgatgaccacccctcgcacgacgtagcgagggggcagaggttcgtcaaggaggtgtatgagacgctgcgagcgagtccgcagtggaacgagactgctctgatcatcacctatgatgagcatggtggattctatgaccatgtgcctacgccggttgtcggggttccacagcctgatggaattgttggccctgatccttactacttcaagtttgatcggcttggagtgcgcgtgccttctttccttatctcaccatggatcgagaagcgcactgtgatccatgaaccaaatgggccgcaggactcctcacaatatgagcactcatccatccctgcaacagtaaagaagctatttaatttacattctaacttcctgacaaagagggatgcatgggctgggacctttgagaactacttcaaaatccggaaaacacccagaactgattgtccagagaaactcccagaggtcacaaagtctctgcaaccgtttggccctaaggaagattcatctctgtcagagtttcaagtggagttgattcagcttgcttctcagctcaatggtgaccatgtactcaacacctacccagatattggcaggactatgactgtgggtgaagcaaaccgctatgcagaggatgctgttgctagatttttggaagctggcaggattgctctaagagctggtgcaaatgaatctgctttggtcaccatgaggcctgcactcaccagcagagcctcaccgtcctctgatttatcatctgaactctgatggattgttctcagatttatccacaattctgcatcatgatttgcaccgcgtcagcttttggttgatgagaactcgtacaatgtgctaagaaaacataggtaggttggtgtacggcaaagtgtgctagtattatgtaattgatagatcttaaacatggctttgtacatagacatcatgatacttgatatctcaagcttttacttcagctgtcctctgataacgctgagatatcagctcagaagtatctgataagatcctactctggataagctggagagggaatttgtaaaccatcgatattcagctctgtacctgcttattcagcagttgaactgcacttctgatgaaatactttatgtacaccagttatagtggtattg

SEQ ID NO: 24362 - DNA, 1838 bp, Oryza sativa
  ref <308>: DATABASE ACCESSION NUMBER: AK099804
  ref <309>: DATABASE ENTRY DATE: 2002-08-28
aactatcaaggtgtgggctcgtctcggctcgcaggaactcgtcgccctcctcgactccggctcaacacacaacttcatcaacgatgccatcgcgcaccaggctggcgtccctctacagcgccgccccggcctcagcgtagccgtggccaatggagatcgcgtgccgtcgccaggcaggtgcccgccacagcgcgtctccatcggctcgcacgagttcgacatcgacttctatgcactcccgcttggcggctacgacattgtgctaggtgcacagtggctcggcaccctcggaccgacgctatgggatttttctcgacaatccctcgccttcggacccgcccacgaccgcgtcacgtggacaagtatcgacgctgcaccggcgcccgcccatgctgccgccatcgacggtcagccgggcgacctcatgaccgatctgctcgacgtcttcaaagacctcttcaccgagccgcacggactatcgccagaacgccatctctgccaccgcatacgactggaggcaggggtatcggctgttgcggtgggcccgtatcggtacgcgcacatccagaaagatgagctcgagcgacagtgcgacgatatgctccgccacggcgtcatccgacccagctcgtcggcattctcgtccccggctttgctgatcaagaagcgcgacggctcctggcgcttctgcgtcgactaccgcgccctcaacgacaagaccatcaaggataagttcccgatcccggtcgccgaggaactcttcgacgagctgcgcggcgccaaattcttcaccaagttggatatgcgttccggctaccaccaagtgctgatgcatccggacgacgtgcacaagacggcgttccgcacccaccaaggcctctttgagttcttggtgatgcccttcggactcacgaacgcgccggcgacattccaagccttgatgaacgacgtgctgcttccgttcctccgccggttcgtgctcgtcttcttcgatgatattctaatatacagctcgtcttggtcggagcacctccgccatgtacgcacggtgttgcaaacgctgcaggatcattgcctccacctcaagcgctccaagtgtgagttcggcctcacctccgtcgcatacctggggcatgtcctctccagtccttcaacttccggatttcaaccgcgacttcatcgtcgaatgcgacgcgtcgggtacgggccttggcgccgtgctccaccagggcggcggtccagtcgcgttcttcagcacgcccatcgccccccgtcacgccaagctagccgcctacgagcgcgaattgatcggcctcgtcaaggcggtccgtcactggtgaccgtacctctggggccgccgcttcatcattcgcacggaccattatagcttgcggttcctgctcgaccaacgcctctcgaccattccgcagcatcattgggcgagcaagctgctgggattcgattttgccgtcgagtacaagcctggaacggccaatgtcgtcgccgacgccctatctcgccgcgacgaacacttggcggaagcgtttgttctatcggcgccgcacttctcgctgctcgacgacgttcgccgcgaggttgcctctactccagccctggcaagccttcgcgacgacatcattcgcggcgctaaacccccgccgtgggcattcaaagatggactgatcgtattcaaggatcgggtgtttatcccggagtccttttctcatatattttggtacacttctgttatgatctggaactgagcaactgatatttgtgtgggtcggtgacagcaactgtgtctggaatctggatgttttttcaaggctgggttggcg

SEQ ID NO: 24363 - DNA, 1832 bp, Oryza sativa
  ref <308>: DATABASE ACCESSION NUMBER: AK099805
  ref <309>: DATABASE ENTRY DATE: 2002-08-28
gagagagcgcagacgcgagcgcagcgcaaaagatggcgacgatgtccctcgccgcggcgtcccccctcgcctcgactccccgtgggctcgccgtctccactccccgcacggccttcctcggcctcctgaccggaggggcgtcgctggcgccgttcccgggactggcggcggcggcggcgccgccgcggctgccagcggggaggggcgacgcggccgtggccaggatggcgaagagggagcaggagctggaggagattcgggccatgccgacggagaagatcgaggaggaagtggtggacctgaagggggagctcttcatgctccgcctcaagcgctccgcgcgccaggagttcaaatccagcgagttcggccgcatgcgcaagaggattgctcgtatgctgactgtcaaaagagaacgggaaattgaacaaggaatcaacaagagattgtctaggaagcttgacaggaaatggaagcaaagcatcgtggttagaccaccaccatctctaagggagaacaaggaggaatagagagccacaaaagcagacagtctgtagaagtcatttcatgcatgtcttgaaggaaggtttctttctccctgtggtttcattccttataatggattgatatgtaattcacattaactgatttccaagtccttgctgtcaaaaccaaaagttctattaccaattccatttgtgtaaatttcagtttattcaaaatgtgttgtccatatatgcacttatattactgatatatgaaactgtgcttaacgagtgtatgctatacacttgttgaaactcaaactgcctattcaaattcacctgtcacaaagttgtgggtacgtacatactataagaggcagatatgcagagttctaaagaagtgtctctggaatacggagtaacaaaaacaagagaattaggccatgtctataatagttcgcttggaattttggtgccctgctttgctccaaactcaagttcactgttttatcaaacgtttcaaaactgtacaactgtctccaagcccacgttcttgtggcttgttgtgtcggtcacctagatttatgttattgttcaacactgatttatgcttaaactagctctgttagactgtcctaaagcatgttgggctttccccttctactctagctttagagtatgctgcaggtatctctgcacagagctagggagccatcctagatccatcatcagtttcataagcaagcccaggtggcttggcccttcagccaaaacttgttattctgatctcttcaacagatcttaacttgagatgtagagaggcttcactcacaaggtaatcttttagtcaactattgtcttcctctttttttagctaattgtttagtgagcagagtactgagttggtgattgtttgaagataaatgccaacaagtagaaatagcatccatgcaattcttttgttgaaagtctcaagtcatcaaggtcgaagtgatgttgctgataatttggttgggtagataagaaatgaaatgaagaggatatcagccccagttaattgcagcaattttatttcaaacgccatgccttgtctttgttatgccttttggcactgagccgctgactctctcactgacaggtgtggttcaggcccaatgccactgagagaagctaatggcaaaatcttaactgcaacttgaatctatagcaagaacaagatttccactagttcagtttgtccagtgtttttcatgccttgaatagggtggtgcattcaattacccaaattagatttgtttcgcacggactagttgtggtttaaaatcttcaggatgaatttcattttgt

SEQ ID NO: 24364 - DNA, 1900 bp, Oryza sativa
  ref <308>: DATABASE ACCESSION NUMBER: AK099806
  ref <309>: DATABASE ENTRY DATE: 2002-08-28
gattaataattaataaaaaataaagctcgtcgtcgtcgccgtctccctcgccgccgacgagtcaaagaggcggcggcggtgccggtaccggccgggcgcgccccggccgtgtccccgccatgcccgacctcaccaaacccccttcccctcgcccccgccgccgccgctgccgcctctgcggcatctgcctcggcaccgcgctcctcgccctcctcgtctcctccctcgcccacctcttctccccgccgcagccacagccgcagctgcagccgccgcggccctccccctcctcctcgccaccgcgcttcgcggtcatcatcgacggggggagcaccggcagccgggcgcacgtcttcgccacggggcccggcgggcggccggatctggcgcggtcggccgtgatgcgcgtcaccccggggctctcctcgttcgccgacgagcccgcgcgggccggggattcgctgcggccgctgattgatttcgccagggagaaggtcgggggcgccgcggcggaagtgcggctcatggccaccgccgggctgcggctgcaggaggggcgcctccaggaggccatcctgtcgtcctgcagggacgtgctcagggcttccggattccggttcgaggactcttgggccgaggtgatcccaggctctgatgagggtatctatgcttgggttgcggcaaactatgctcttggcacacttggaggggatccacacaaaaccattggaataattgaacttgggggcgcctcagcacagctgacatttgtttctgatgaagtacttcctccggaactgtcaagaaatttcacttttggtggaacaacatatactctctatagcaacagctttctaaactttggacaaaatgctgcacaagaatccttccgtgaaatactgcggtcaaaagactccaaaaatggtacacttgttgatccatgtgctcctaaaggatattctcgcatcaaagaagtaatatcaagaccaagcagtgcttcaaaatcaaaattagagaatcaatttgctgatagtggggatggagactttacagtgtgcagatcttcttctttggcactgctgaaaaaaggcaacgaagagtgccgatatcaacaatgccaacttggaccaacttttgtacctgagcttcgtggacatttcttagcaactgaaaatttctattttacatcaaagttctttggactgaagcaatcttcatcactgtctgattttgtgcttgctggagaacaattttgcaacaaggacttgtctactcttaggaaaatgtatcctaatcggtcagatgatgatttttcacgttattgcttctcatccgcatatattgtagctctactgcacgacagtcttggtgtaccactggatgacaagaggattgagtattcaaatcaggttggagacactcaagttgaatgggccctgggggctttcatctcaaacataaaaggcgtaattgtagagccatcagcaactggtagatcagcccatagaagtagaccattgcttgctgtgctgctgggggtgtttcttctaggtggagcactttgcttggcaagatggaggaagcccaagacgaagatcatatacgacttggagaaaggccggtacataatcacacgcatcagctgacgctgacctttgtgcagaggaatcacatatatatacgacaggaatagatgtttgttatgtgtaccatagtgtacgagttcaattctttgtattctttctcctttttaagagctgggtgggagccttagaggagagatcaaggatagcatgtgtgtatgtacaggacttgtagagcattttgccatttacttattctatttatttgatgatggaataacctagctttgctcatgtacgtgatatgtctcagatcc

SEQ ID NO: 24365 - DNA, 3198 bp, Oryza sativa
  ref <308>: DATABASE ACCESSION NUMBER: AK099807
  ref <309>: DATABASE ENTRY DATE: 2002-08-28
gtctcctctcctcctcctcttcgcgtcgaatcctcctccgagaagaggagagtacatgaatcctagcgcgaggatctcgcaggtagcaatggcggcgatactgccggacctggcgacgcaggtgctggtcccggcggcggccgtggtcggcatcgcgttcgcggtggtgcagtgggtgctggtgtccaaggtgaagatgaccgcggagcggcgcggcggggaggggtcccccggcgcggccgccgggaaggacggcggcgccgccagcgagtacctcatcgaggaggaggaggggctcaacgagcacaacgtcgtcgagaagtgctccgagatccagcacgccatctccgaaggagcaacttctttcctcttcactgaatacaagtatgttggactattcatgggcattttcgcggtcctgatcttcctcttccttggatctgttgagggattcagcacaaagagtcaaccttgccactacagcaaggataggatgtgcaagcctgcccttgcaaatgctatcttcagtactgttgcctttgtgcttggtgcagtcacctctcttgtatctggtttccttggaatgaagattgcaacttatgcaaatgccaggacaacccttgaggcaaggaagggtgttgggaaggcattcattactgctttccgctctggtgctgtcatgggtttcctgcttgctgcaagtggccttgttgttctttacattgccatcaacttgttcggaatttattatggtgatgactgggaaggtctttttgaggctatcactgggtatggtcttggtggttcttctatggccctatttggccgtgtaggtggcggtatttacacgaaagctgctgatgttggtgctgacctagttgggaaagtagaaaggaatatccctgaagatgacccaagaaacccagctgtcattgcagataatgttggtgacaatgttggagatattgctggaatggggtcagatctctttggttcctatgctgagtcatcttgtgctgctcttgtcgttgcttcaatctcttcttttggaattaaccatgaattcactcctatgctgtacccgctcctgattagctcagttggtatcattgcttgtctgataaccacacttttcgccactgatttttttgagatcaaggctgttgatgaaattgagcctgccctcaagaagcaacttataatttccaccgttgtgatgacggttggcattgcacttgtcagttggttaggcctcccatattccttcacaatattcaactttggtgcccagaagactgtgtataactggcaacttttcttgtgtgtggcggttggtctttgggctggactaatcatcggatttgtgacagagtattacacaagcaacgcctacagccctgtccaagacgttgctgattcctgcagaaccggagctgctactaatgtcatctttggccttgctctgggatacaaatctgtcattattcctatttttgctattgcttttagtattttcctcagcttcagccttgccgcaatgtacggtgtagctgtggctgcccttggaatgcttagcacaattgcaactggtcttgccattgatgcctatggccctatcagtgacaatgctggaggaattgctgagatggctggcatgagtcacagaattcgtgagagaactgatgctctggatgctgcaggaaacaccactgctgccatcgggaagggtttcgccattggctcggcagccttggtgtctcttgccctctttggtgcctttgtgagccgtgccgccatctccactgtcgatgttctgacacctaaagttttcattggactgattgttggtgctatgctcccatactggttctctgctatgaccatgaagagtgttggcagcgcagcgctcaagatggtggaggaagtccgtaggcagttcaactccatccctgggctcatggagggcacaaccaagcctgactacgcaacctgtgtgaagatctccactgatgcatccatcaaggagatgattcccccaggtgctcttgtcatgctcagccctctcattgttgggatcttctttggtgtcgagaccctctcaggactacttgctggtgctctcgtttctggtgttcagattgccatctctgcatcaaacactggtggtgcctgggacaacgcaaagaagtacattgaggctggtgcatctgagcatggcaaggaccctgggcccgaaaggctcagactgccacaaggctgctgtgatcggcgacaccattggggatcctctcaaggacacctcaggcccctcgctcaacatcctcatcaagctgatggctgtcgagtcgctcgtgtttgccccgttcttcgccacccatggaggcatcctcttcaagtggttttagatggtgacgatagatttacgaggacgttatttttgccaggagggcgctggaaatcatccatatattatagagttcatcgagttgacacatatagttccctccgtttcctatttgttattactgtctgtccatcagtcgatcatgctaagcttattagcatcatacctgtgtctagtttttttgagtctggtagttgtagccgatgggagcaaatcactggccacctacaggtttggacaagagtaccttgaatttgcgttttcctgtaggttggatgatacgatgatggtgatgattattgtacgtgcacggaatgcacctgtctcagtgaaattttcccgggaaggttctgctgtttctttatgtccttgtgggaatgttaggatgatcttgtacaaaaaagaaaacaactctagtgatagggggtggagtacatgtgtgccaactaagtttgagttgtcttgaattattgaagtaaaatactttagctaaaatgacgtagtagtgcgtgtgcttgcttttgttttaagatagagaattatagtattattttgtatactatattttcctcctttcttgcttcgttcgtttcatattataagactttctagcagactcacattcatatatatggtaatgaatctaaatatatatgtgtgcctagatccattaataactatatgaatgtgggcaatgctagaaagttttataatatgaaacggaggtaataatatgaaatggaggcagtatcttatattttctttatcctaaataaataaatctaaatttctgg

SEQ ID NO: 24366 - DNA, 3423 bp, Oryza sativa
  ref <308>: DATABASE ACCESSION NUMBER: AK099808
  ref <309>: DATABASE ENTRY DATE: 2002-08-28
gggccaccaccaccggtcacccctgcaggcctgcagctgctccaacggctttccccctccgtcacccactccctatccgcctatcccatcccaaaacctcctctcccctccccccccggcagccgccgcctccaaagttctctgctttcgtcaccgccagcctccctccaaggtattgttcgatccggagtagtgagtctatgcccttgtccggatccgaatggctgccctgcggatctgcacgccgggtggtggtgctccggaggccagaagaggcagtcttgctgctgccgggagcgcggttcagcatggaccggatttgatcgggttcagttcttgggtgctgccaatcagcgccggatatgccgtggaccggaggcacgcagcagctggtggagttgccgcatgccatgggctctcgtgtgctgacagtgggaggaggaagaatcatcccagggcaagtctggtgaatggtgtggtttcatctctggaggacagtagcggcggggagcctgcgctatgcgtatctgattcacctgaagacgctagctccagtggaaaagtgttgtccgatttgcgtcgggacatggtggatggtattagtggtattccaagaatttctgcgggaaagaagaaggggatgaagttcaggagaagagggcagggtggaaatagattgacacggcgtagtgctccgaggcgtgccagtggaaagagtgggcaagatcagaggattttgttgagcgaggatgatattgctgcaattttgtccagtgttacccatgaatctagcatcgaggagtgcaattctgttctcatctgtctcgagaagtatagtgataagacagctcttggtttctttgagtggatgaaggctaatggaaagctgaagggaaatgctgaggcgtatcacctagcgcttcaagcgatcgcctggaaggaggattgggaagcagctggacagttgcttcatgaaatggttgctgattcgggttgcgctctggatgctcaagcatttaatgggcttatatatgtttgtgccaaacggaggcttgttgactggggaacaaagtggcttcatatgatgcttgaaagagatgtgcagccgaatgtgtctacagttggtatgcttatgggactttaccagaggattgggaaccttccagaagctgaattcacttttgctaaaatgaggaaatgtggcattaagtgtgttaatgcctactcagctatggttactttgtatacacggttaggccattttgccaaatctgaggaggttattactctaatgaataatgatgaagtagttccgaacatggaaaattggttagtgcggctaaatgcttattgtcaacaaggcaaaatggaagaagctgaattggtattgaagtccttggtagatgaaggaattgctctgaatgttgtggcatacaatacggtaattacaggttatggaaaagtttctgacatgcagaaggcaatggaagtgtttgataggcttaagagtgcaggtttagctcctgatgaaacaacctatagatcaatgattgaaggttttggtagagcagacaagtacaaacaggcaattttgtactacaggaaactccgaaactctggatttaaaccaaatgcatccaacttttacacaatgattaacttgctagcaagacatgatgacagtgaaggtgcaacagagattctcgaggacatgcgggcagcaggctgccagtgttcatcgattgtcactgttcttgtccgagcatatgggtcagtaggaaggatgcataaagttcttcagattctaaaagcatgcttctataagaagattttgtttgatgccacctcatgctctattttagtaacaggattcgttcaaaattctctagtagaagaagctatgcgtgttttgcgcgaaaagaagtggaaagattctgattttgaagacaatttatatcatatcttgatctgttcttgcaaagaggctggctgttgtgatgatgctgtcaggatatataatcagatgcctaagtcggcaacacatccaaatctgcgtatttattgcagtatgattgatgttttcagcatcatggagagattcactgatgctgaagctttatatcttgaactgaaagcatcatcctgtgttcttgacatgattgcctacagcgtaattgtgaggatgtatactaaagctgggcgaccagaagatgcctgtttggttttggaagacatggagaaacaaaaggaaatagttcctgataagtaccttttccttgacatgcttcggacttaccaaaaatgtggcctactcgagaaattatctgatacatattactggatactaaagagtcaagttgaattggatgaagccatgtacaactgcattataaactgttgtgggcgggcaataccggttgatgagctctcaagaatttttgatgaaatgattcaacaagggcacttggccaacactgttaccctcaatgtattgctagacatatatggaaaagccgggctttttaataaggcagaaaaggtatttctcatggctcgcaagcagggtatggcagatatcatatcatacaataccattattgccgcgcatgcaaaaaatggggattttcgtagcatgatttatttcgtccagaggatgcaagaggcagggttccctgtttctctggaggcgtacaactgtatgctggatgcttacggtaaggcaggacagttggaggagtttgctgctgttctgcaaaaaatggagagagcaggatgcgagtttgatcactatacttacaacattatgatcaatatatacgggaaaaagggttggatcgaaggagttgcaaacgttcttgcggagctaaagagccgtggtggcgagccagatctgtacagttacaacaccttgataaaagcatacgggatagcaggaatgcctgaagatgctgttaaactgatgcaggagatgaggattaaaggcattgccgctgaccgagtaacctatactaaccttatagctgctctacagaggaatgagaatttcctggaagcagttaagtggtctctctggatgaagcaaactggagttgctgcaactcgaacatgatgtgcctaagaattcagagttttggttgcatgcaaattctggcatccgcacacgtttatatttcatctttcagtagagtacatacatacatgtgagtgacattgtacagagaactatttctgattgttctacacatcctatgggtaccggagattcagaaaaacctcctacctttccattctcttacaagatgaaactcaatcagtggatagcaagataggaacttttatcataccaatcatacaattgtaatttttttaccagaactggtttgaacttctgataataatgatcaaagattcattgagaaaccc

SEQ ID NO: 24367 - DNA, 3128 bp, Oryza sativa
  ref <308>: DATABASE ACCESSION NUMBER: AK099809
  ref <309>: DATABASE ENTRY DATE: 2002-08-28
gtgttaaggtggtgacgcctgctagcaatgtcttggttgatgatttaactctccgagtagaaaggggttctaatcttttgatcactggtccgaatggtagcggaaaaagttctctttttcgggtccttggaggcttatggccattagtttctggtcatattgtcaaaccgggtgttggctctgatcttaataaggaaattttctatgtcccgcaaagaccatacacagctgttggtacacttcgtgaacagctaatttatcctcttacagcagatcaggagattgaaccccttagctacgatggcatggtggaccttctaaagaatgttgacttggaatacttgctagaacgctatcctcttgataaggaagttaactggggtgatgaattgtcccttggtgagcaacaaagattaggaatggcaaggttattctaccataaaccaaagttcgccatccttgatgagtgtactagcgctgtgacaattgatatggaagaacgcttttgcaaaaaggttcgagcaatgggaacatcatgcataacgatatctcatcgcccagctttagttgcgtttcatgacattgttttgtctttggatggtgaaggagggtgggatgtccagcacagaagggatgactcatccttttctactgaagagtctgactatacgttattggaaactgatcgtaaatctgatgcgcttactgttcaaagggcatttatgggcagggcaaagagcaatgcttcatcaaggtccaaagaacattgctacactacaaaggttatagcaacttctcccaagttggaaatagaacaaacaatacaaacacatagagtcccgcatttacggtgcttcccaaggcctctgcctgccagagtagctgcaatggtcaaaatattggttcctaagctacttgacaaacaaggagggcagttgcttgctgttgcactacttgttttctctcgaacttggatctcagaccgaattgcttcactgaatgggacaactgttaagtttgtcttggagcaggacaaagctgcatttattcgtctgattggtatcagtgtcctgcaaagttctgcaaattcttttgtggccccatctttgagaacccttactggaagacttgcccttggatggcggattcgcctgaccaatcatttgcttcaatattatttgaaaagaaatgcattctacaaggtattcaacatgtcaggtaaaagtattgatgcagaccaaagattaacacttgatgtggataaattgaccaccgaccttgctggcttagttactggaatggtaaaaccacttgtcgacattctttggtttacatggagaatgaagcttttgtctgggcgaagaggagttgctatcttgtatgcttacatgctgctaggtttgggcttcctgagagctgtatccccagactttggtcatcttgctgggcaagaacaagagcttgaaggaactttcaggttcatgcactcgagactgcgaacgcatgctgaatcaattgctttctttggtggtggatcaagagagaaagctattgttgaggctaaattcatgaaattgcttgaccactcaaagattctgttgagaaagcagtggctttatggtattgttgatgattttgtaacaaagcaactccctcacaatgtaacatggggtcttagtttgttatatgctctagagcacaagggtgacagagctttgacttcaactcaaggagagttggcacatgctctgcggttcttggcatctgttgtgtcacaaagtttcatagcctttggtgacattcttgacttacacaaaaagttccttgaactttctggtgggattaaccggatttttgagcttgaggagcttcttcgtgtatctcaaagggatacttttgtgccttccgatgccactagtgcagaagaaaccatttcatttcacgaagtggatattgtaacaccatcgcagaaactgttggctagcaagctgtcgtgcaatgtggtacaagggaaaagccttcttctgactggccccaacggtagtggaaagagctcaattttcagagttctgagagatttatggccagtgtgttctgggagagttaccaaaccttcagatgggatgtttcatgttcctcagcgtccatataccagcttgggtactctgagagatcagatcatataccctctctcaagggaggaagcagagatgaagatttgttcgttatacaatgatggtaacgggtctagtgcttctaatctgctggatgatcacctgaagacaattctagtgaatgttcggttggtctatcttctagaaagagaaggatgggactcaacttcaaactgggaagatgttttatcgttgggagaacagcagaggcttgggatggcccgtttgtttttccaccatcctaaatttggtattcttgacgaatgcacgaatgctacaagcgttgatgttgaagagcatttgtacaagctagcaactagcatgggcatcactgtgattacttcctcgcaaaggccagctttgatccccttccattccttggagctgaaactcatcgacggagaaggaaactgggagctatgcgagatccaccaatgatttgtctgaccggttcgcatttctcggcattcggcttcccagtcccagctgctggcctgctgctgcttgttgatgtcaggctgtctagaagtgtgtacaattgcaaagcagctgttgtgagtgaaaagtacaggttttcagtctcattgtctttgaagaaagaaaaaaaaaagaccttgtcgacaatttggcgtagaacatggcatttgtagtttagttcatacggaggtaggtgatgggagttgcagggatgagcatagagagatgtggtatttgtttttaagtagataataaatgataaggtgatagtacagtacagatcttccggcattgttaatattaattcgataagtaataatgtggcttccttcttgctgccatcaagttatggcatataatgtatgaaaatattgcatgtaaatgcctagtgattcttgaatattgggtttgaagttgtatcagagtatcagactgctgcttcttgtccccttcttgcaactgcgttatcgattcttc

SEQ ID NO: 24368 - DNA, 1599 bp, Oryza sativa
  ref <308>: DATABASE ACCESSION NUMBER: AK099810
  ref <309>: DATABASE ENTRY DATE: 2002-08-28
ttggtgctcgtgcgtaaaagaaagaaatctcccgtctcctcgtcgttcctggcgagcagagcaggagaggggaggagatcctgatctggaagaagaaggagctcttctccgaatttcagaaccctaaacctcaatacaagcaacagtttgtttgttcccccaaagtacccccaccaatgtcccaagctggatcggaatccgccgctgccaaggagccgtcgttcaaggagggcgagagagtgctcgcctaccacggcccgctcctctacgaggccaaggttcaaaagtccgaaaacaaggaggatgagtggcggtatcatgtccattatcttggttggaataagaggatacgagtgagtgcctggagcccggatgactgacatatatttaaatatgaccaatccattttctacgtgtgaattgaagtgatggcaacacaaatttttttaatagttgtgctggatgaaaaatttcactgaggcccttgacagtttaaaagtgtctaagttggattttggaccttgagttggatatgaatgaccttatgcatgttctaatgtattattttttttctggcagtgccatattgttgtctaccaccatgtttgggtagtctcacatctttgcccttacggtgcaatttttttttcttaatagtattttcatgaatcctgttgaggggcttgtttctatcattgcactgatgctatttagttgtctttctgctctcctaattcaagtaaacagtcttcttaatatgtttattttcaatgagtacagctgggatgaatgggtcacaaatgatcgcttactgaaattgaccgacgaaaatatccgcaaacaacaagagcttgaaaagagccaagtagttgacaaaagcgtaaaatctggacggtcagcgcagcataagccaaaaggctctaatgatgcaaaaactgataaagaagacaccaagattattatcaaggggaagaaacgcaaaagtcagcctggtgggactgaggagaaagaaagaaaatcatctgagagtctcttcatgtcacattttccttcaacgctaaaaaagcaacttgttgatgattgggagtttgtcacgcagctgggtaagcttgtgaagctacctcggtcccccacggtcgatgatattctaaagaagtacttggagcaccggacaaagaaggataacaagataaatgactcttacgctgagattttgaaaggattgcgatgctactttgataaagcattgcctgcaatgcttttgtataagaaagagcgacagcagtactctgaagaggttaaaggcgatgtttcgccctcaactatatggagctgagcatctactgcgcctttttgtgaaattgccggagctacttgcgtctgtcaacatggaagaagatgcactcaacaaactacagcagaaattgctggacattctcaagtttctgcagaagaatcagagttcgttcttcctttctgcgtatgatggtggttctaaaggtactgatgggataaagaccaaatagaagcaaactgttgcatctgtatgttgactgtacttaactgtctcgctgagtaattttaattttcatgtgattg

SEQ ID NO: 24369 - DNA, 3203 bp, Oryza sativa
  ref <308>: DATABASE ACCESSION NUMBER: AK099811
  ref <309>: DATABASE ENTRY DATE: 2002-08-28
gtgaaactggatcatattcttgcttttctttcaccatttgatttcactgtttactattaccagcaaactcaaagtggtgatgatttgaccagatatagaaacagaattgatcaagagaaacaatatgcttctatattgcgtgctttcagggtttttagaagagaactgcaatttgcatgaaaaaaagaacttttggtatggtttcttacaggcacgccttataggtttcaactgagggaatctgactgttccgttatttaattattcttttcttgaaagacccatgttgcctactgtctgttgaacaacttgggatttctgaacaattttcctcctagtccttgcttctaagccttgtgttgttgagctagagctgtccatgtatatatattgacagttagtgaagttgataatttacatattaaaaacaagacctaaatgtttatactttacggcgtagcttcggcctaaaagaatccatacaaagaatagacaatataggacaacacactgcaatatttagcgtaataacacgacttgactccttcatgtggtattacttttgtaattattttttattgtcataacagcaattttcgttgctttgatgtttttgttgatggttacaaaactacaatgatatatgggtaagtgattatgcatcatggtgtgtttaccttgtttgatacagtattacagtcaccagtacagcctgttaattctgaagattgtttcttttagatttttagtttgtctttccgcagcccgtttctcaagaaaacctctagctaggaatggcatgtctcattgttaggcttgcatgctaggcctaattgaagtgtcccttggccaaagtggtgtgattatgccatcgtgatagtcgcaccacaaggacgaggagagaagggagaaataagtacttttgtttatttcttgcttgccggtaatgatcacagtagactcatagtgggccttttttcctaatatatatagatatcgatttggttaataccctgtctagctaagagataatataccaaataaccagatagacatattcctaagtaataaatatgtccctaatccttgcatggtgatcacttaaacatggtacattaacaccaaccttaggaaggcatgattactattctattgctccatcacatgggccttaataggttgcacacggcattgattagttcactgttgctctttatgtttcatcctttagtcattgaaccattgttctttagtctagaagttgggatgccataatgacctattcttcttttgttagtgtaatgcacttttgctacgtgtgctgcacactaatacttgggctgcgtatactcccactttctcattagttctcttgaaatattttcaggcctttatgctgggttgaacatatgtcactggacaatgaaactggattagataaaccaggaataagagttcggccagtcacaggcctagtggcagcagactattttgttcctgggtattttgtttgggctgttttgattgcaaatttagctcgtattggatatgaagaaaagaccatgtacatggctgcatatgattggaggttatctttccagaacactgaggttcatgatcaaactttgagcaggataaaaagtaacattgaactcctggtagcaactaatggtggaaatagggtggtggtgatcccacattctatgggggttctctattttctgcattttatgaagtgggttgaggctcctcctcccatgggtggtggtggtggtccaaattggtgtgcaaagcacatcaaatctgtaatgaatattggcggacctttcttaggagttcctaaggctgttgcaggacttttctcatctgaagccaaagatgtttctgttgctagagccattgcaccagaagtcctagactctgacttccttggacttcagaccttacgccatttgatgcgtatgacccgcacatgggattcaacaatgtcaatgattcctaagggcggtgacaccatttggggagatttggattggtctccagaagatggttttgagtgtaaagctaagaatcagaaaatcaatgattctgaggtttctaaggatgctaacgggaagaatgaggttcatccagaacctgttaagtatggaagaattgtctctttcggtaaagatgtagcagaggctccatcttcagaaattgagcagatagaatttcgatgctgtcaaaggcaataatattgcccactcaaatacatcatgccgggatatatggacagagtatcatgaattaggatggggcggaataaaggcagttgcagactacaaggtttacactgctggctccattatagatcttcttcgttttgttgctccaaggatgatgcagcgtggaagtgttcacttttcgtatgggattgctgacaacttggatgatccaaagtacggccactacaaatactggtcaaatcccttggaaacaaaattaccaaatgcacctgaaatggaaatattttcaatgtatggagttggcattccgacggagagagcatatgtctataaattagccccacaagcagagtgctatataccttttcagatagacgcttcagctgagggtggggatgagaatagctgtctgaaaggcggcgtttacctgtctaatggtgatgagaccgtaccagttcttagtgcaggatatatgtgcgcaaaaggctggcgaggaaaaacacgcttcaacccttctggcagcaagacctacgtcagagaatacagccattctccaccctcaaatctcctcgaaggcaggggcacccagagtggtgcgcacgttgatatcatggggaattttgctttaatcgaggatattatcaggattgctgctggggcaactggtgaagagcttggcggtgaccaggtttattccgatatattcaaatggtctgataagattaaattgaaactataaaactttaaaaaagcatggtagttttgtaggagaattatttgtttcctggccaaaattttatgagttttgattcgatattgtaatatgattttttttacctttcccttaagctcttaattcagtagaggctgacttgatttgtattattttgtgatttgagcggcattgtatattaaaatgtacagatgtattcatgggaattgtgttacgatttgaagttgagtactccccacatt

SEQ ID NO: 24370 - DNA, 1505 bp, Oryza sativa
  ref <308>: DATABASE ACCESSION NUMBER: AK099812
  ref <309>: DATABASE ENTRY DATE: 2002-08-28
ggacgctccgaaccccagcaatggcggacccgccgtccttccgccgccacccgcaccccttctccatcgacctcatccgctggctcccctgctcctcctcctcctcctccgaccgcctcctcgccgccgccgtccacgacccggcggcgccctcctcctcctcctcccacctccacctcctcccgctccacgacccctcctccccgctcgccgccctccccctcccctcccgcgccgcctccctccgctgctccccctccgtcctcgccgcggccacctcctcggggtccctccacctcctcccctcctccctcgacgccgccggatcggccggggtgtccgtccctgccggcgccgggttccacgtgggccccgtccgcggcctcgactgcggcggcggtggggaggagtgggtgacggccggggaggacggcagggtgcacgtggtgggcggtggcggggatgggagggtggtggcgaggaggctgtgggatgggaaggggatggccgggtacgaggccgccaggtgggcgtcggcggcggagttcgccaccggtggcgccggctgcggcgttgcagtggtgggacaggaggaagggggacgccgtggtggcgcagtgcaagggcgtttggggccgtggcattgtcactggtatggttcattccattgacattcatccatcaagaaagcatatctgtgtggtgggagggtcctcagggacaatatttgcttgggatctgcggtggccgcagcaaccaataccactctctggtttaggccttaatggaacagcacagcctgtgtctgagagtgaggtctgggaggttctttttgacaattacactcagtctactgatatcatctcatctgcctcgacgagaatattacctgtgatgatgtgctcagaggatgggatccttgcagtcgtcgaacaagatgagaggccccttgaattgcttgctgaaccttgcgctatcaactcctttgacatagatcctgagaacccttctgatgtggtttgtgccctggaatgggaatcaattggtgtactaacacgtggtagagatacaatggctgaagaatgaaaagttctatttcgttaaaaatttcctgcatggtcttccttaaattgtgtggggcaactatgccaagataaacgtcttctaggaatgacactgattcaagtcgtccaacttatgtctggtgctggagtaaattgtcttgcgactttgggtcgttggttcgttgccttgtcggtgtaattgaagatcgtggaaatttgatgtgaaagattatcgttcctagtttcctacatgtgtaactgcgctttacgggagttgggtgttccattcttgaaatgcaagttggaatggtccaaaactattttggcaagttctttgttgtagacagtattttggtgctcagggatgggtcgactgttgtgagaactttttgttccatgtgctcccaagtcatgctaatgatggctaccatacaaaattcc

SEQ ID NO: 24371 - DNA, 2648 bp, Oryza sativa
  ref <308>: DATABASE ACCESSION NUMBER: AK099813
  ref <309>: DATABASE ENTRY DATE: 2002-08-28
ttaggatatgaggcactgactggttccttagatgattttgggtttgaagattatcttaactaagaagaaaaataaggattcaagcaccaagaagcagccggcgagggaggccgctgctgcgaacagcgagtcgagggcgatggtggcggagagggagaaggaatacgaccggctgtctaagttcctcgtggtctaccccaatgctatttgagacgctgcggcctccgaggatggctgggtcctggggcgtggagctctggaattgctgctcggcggcaccgcctacacacaagcgacaagtgcgccacaaatctctctctcgatgcagcaagtgcagcggagggagctgcaactggtcgccgtttctgccatgctgatagattgcaagtacgaggagatttgggccccagaggtgaacgacttcatcttcatatcagatagtgcatacactagggaacagattcttgcaatggagaaggggattctgaataagcttcagtggaatctcaccattcctacaccatatgtcttcattatgatgctatctgcgtctgcagataacaaaagtgacaaggagtacgggctggtggcatatgcctctgctgtctatgcagccaggcccaatcctcgtcatttctatatatgaagaaattgctggatccatcctctcggctaactaggacgttgttccactagatctccattattcctagtgcaggtttatttggattacataatcccctatcggtttagttccctttattgttgaacaattggagataatatctttcacgataattcgtaccactgagcaaaattcaatgatgcaattattttatatgcaactcatttggtgaacaagatgtatcttgtggcaaacaacgagatgaaaagttacttgatccttcaggcatacctgtgattttccaatctattctttgcacgttcttggaaagattggttgtccctgatagctgtccgtagtgattcatggatactgtgtggcattttactttggggctcattttggatttgataaagaagtcaggtttcaaaggagcatgggggtttcatgagatttatccaggtttcttgcctaggagcatcggcctcttcttctagaatgctgagggccaaggctgctggggaagaatctgtgttgaaggaatttcctgaggctacaattatgaggcctgcaactatgattggcacagaagatcggattttgaacagatgggtacagtttgctaaaaattgattcccggtctacaaagattcagcctgtttatgttgtggatgttgctgctgctattgtcaactccctcaaggatgatggcaccagcatgggaaagagctacggacttggtggaccagagatttatactgttcatgatctggctgagctgatgtatgagacaatatgtgaatggccacggtacatcgatgttcctcttcctattgcaagggtatgaacttaaataatatcttgtgttggtcaaggcgaatggccacggtacatcgatgttcctcttcctgttgcaagggctatcgcatctcctgaaagctgatagattgggattttttttttcaatactctaagcctctaatgaaaggtgcatatggacttttattttagatgttctaactttgttttgtctctacctctcaaattgttactatatatgtactcttcaacctgccgcataggttggcacatgtttataaggtaatggaatatatttcttgtgtttttactatcatttggtttagttctttcacacagcaatgttgctatttctattgttgcttcccgccctggaaaaaacacggctcaagccgtgaggtcttcatttgcttctcttgtgaccaattaatctgtaggtttgggtccaaagtatgctttcgcaaccaagtgatgaaaaaaaaaacaatctggttggggatgtcaattggttggttcatacaagtgagttgatttgattatttaatttcctctaaacaatacctctaatatttaatggtcaaggatgccataccatatatactgttggcacttgtataccacgtgcttaggctgccataaaatgatttgccatttctggcaaatgatgtaaatgatgacatagaaaagtaaaaaattgcaggaataaacctatgacattcgcaactttttcaagtgagggatctgttttttggttgcagctgacagtgtcatcacgttgtgggatcctggtaataatatcacatttgttggtatgattaaagaggcactatttagtggtatgctactatctttgaaatgttgtggatgaagcactgtgagttgcttgtgaggaagatcaagcacatggttgctgtaattctgcttctacctacaatatctttttagatttttttttatcaatgaaggattctcctattttagtagttagtaccacatattttgtagcagtttggttgaggtcttgatgaaaaacgaaactcgaaagttctctacatattcccatctttgttatattagaaatcataacattctttgcttaatagtcatttactctgaatatttctattttttgctatagtccaagcattaaatgaccatgctctgatttatagtgttttcaagaatgccgagctattggaattcc

SEQ ID NO: 24372 - DNA, 1912 bp, Oryza sativa
  ref <308>: DATABASE ACCESSION NUMBER: AK099814
  ref <309>: DATABASE ENTRY DATE: 2002-08-28
cctcccctcgtcgccccccctctcccggctcgcgccgtcacgcgacgcgccgcgccgcgacgccgacgcgagctcgcggggttacaaagacagctagctcgcctcgcctcgcctcgccgcgccgcgccgccgccacccgcacgcccgcatagcggaggccgggcggcattcgggccgatttggcgagctgggggagccggcggatgggagatctggcggcggggttggaggaggaggaggtggtggtggtggtggtggtggcgtcgagatagtgagcgcggctagagtggtggtggtggtggtggtggcgtcgagatggtgagcgcggcctctagccgcgcgggaggcggccccgctcgacacgccccgaggggcggcgcggggcccgggagcccgcgggtctctgcgcagcgaaggaggtggtggtggtgggcggcgccgctgccctcggcctcgggcgcgtcgtcgctggagcgcgtggcgctcgcgttcttcctggcctccgtggcgctcgtgctgtcctgcgcgctctacctctacgtgttccggtacctcggccgtgggagcgccgtcgccggcttcgtcggccgggacctcgagccgtgcgacgtgttcgacggcgcctgggtgcccgacgccgggtacccgctgtacaacagctcgctgtgcccgttcgcggagcgcgggttcaactgcctggccaacgggcggagggacaccgggtacctcaagtggcggtggaagccgcggcggtgcgacgcgccgaggttcaccgcccgcgccgcgctggagcggctgcgcgggaagcgggtcgtgttcgtgggggactccatgagccgcacgcagtgggagtccttcatctgcatgctcatggccggcgtggacgaccccaagacggtgtagaggtgaacgggaacgagatcaccaagacgatacggtccttggcggtgaggttcgcgtcgttcgacctcaccgtggagttcttccgctcggtgttcctcgtccagcagcgcccgccgccgaggcacgccccgaagagggtcaagtcgactctgcggctggacaggttggataatatcagcaggaaatgggtgaattcagatgtgttggttttcaacaccggccactggtggactccgaccaaattgtttgagatgggttgttattttcagtctggacgagtgcttaaactaggaacatctgtcgaggctgctttcaggacggcattggagacctgggcttcatgggttgaaaaaagaatcgatttaaacagaactcatgttttcttccgaacatatgagccgtcccactggagtgatacaaatcaaaaggtatgtgaagtaacagaacagccttcatcagaggccaaaggaaatgataagagtgaatttgggactatacttgccgatgttgtggcaaacatgaaagctcctgtcactctactaaacgtgactttaatgggagcattccgaagtgatgctcatgttggcacctggagttatcctcccactgtacttgattgcagccattggtgtctccctggagttcctgatgcttggaatgaactggtattttcataccttttaacaaatggttggcgaaagatggctcggtgactgctgactcttgacagtatactcaatataatgtttttcagcttgaatatttcgaactgcagttttgtctgctaaagaacaagaaaacatgaaacagtgtattttcctaggttgtttactgtgcttctacattttttttcctcttgtacaaggtgatgcattagattttggatggtttcatttgtctgtacgtagtgataatacattctatacgttgtaaattacatgtttcaacatgtatgtactattgtactaacaattcacttcatacgttgtcataatatctgctctttttc

SEQ ID NO: 24373 - DNA, 1243 bp, Oryza sativa
  ref <308>: DATABASE ACCESSION NUMBER: AK099815
  ref <309>: DATABASE ENTRY DATE: 2002-08-28
gcgttagtcactccccgcgagctaagctctcctccccatcactccgatggcgctgtccgcggcggcgccggcgaactcctcctgcttccacccgcgcgccgccgccgccagcgcgccctcatctctcagcgtgggcaccaaggtcttcgtcgggttgaaggcccagaccaagctaggctcgtcggagtcgtcgtgcccgaatgtcaccgccgggttctacaccgccgtcaaccggaggatctctctgggattatcaaacaagagggctaccagggcgcgcatttcaatgatgcctgttggtacaccacgggtgccttacagaacacctggtgaaggaacttggcaatggcttgatatatggaatgctctatatcgcgaacgaattatcttcattggggacagtatagatgaagagtttagtaaccaagtattggcgagcatgttgtatcttgacagcgttgataacactaaaaagattcttctatacattaatggtccaggaggagatcttacaccatgcatggcattatatgatacaatgctaagcctaaaaagtcctattggtactcattgcctgggctttgcattcaacttggcaggatttattcttgcagctggtgaaaagggttcacgtacgggtatgcctctttgccggatttcacttcagtcacctgctggagcagctcgagggcaggctgatgatatagaaaatgaagcaaatgaacttattaggatcaagaactatctttacagcaagttgtcagagcacacaggtcatcctgttgataagattcatgaagatctatctagggtgaagcgcttcgatgctgaaggagctttggaatatgggattattgaccgtattattaggccttctcgcatcaagaaagagggatccactgctcaaaagaaggatctacgtaatctgggacttggctagtagatgctattgtatcagttatacgtgttagattgtattgttctcccctcattactcctgctttgaaatcctactgctttatttcatcaacaggagttcatgtggagatatgagatttgttttgctgtctccattggtattggacttaaaagagagaataatgttgtagcagtcataagagaaatacggtactctagttgccattctggtgatctcattttgtcaaacatatcgagagacgcgtcatacattttgtgatatcaggcgagaatgttcttgttaaataatgtgttcgttgcctgg

SEQ ID NO: 24374 - DNA, 3658 bp, Oryza sativa
  ref <308>: DATABASE ACCESSION NUMBER: AK099816
  ref <309>: DATABASE ENTRY DATE: 2002-08-28
aacaacccaagctacagctagtcttccacaaacataacagcaacaacatccatagtagcggatagatgattcctataggaactctcactccctcacttctcacttttgctgtcctgtatgctttcttgaccctcccattaattccgtcactaagtagcaccgcactcgatgatgaatccaacaaggatctccaggccctcctttgtctcaagtctcgtctctctaacaatgcaagatccctagcctcatggaacgagtctctccaattttgcacttggcccggtatcacctgcggaaagagacatgaatctcgtgtcacagcactgcacctagagtccttagacctcaatggccatttacccccctgtattggcaatctcactttcctcacacgaattcacctatcgaataataggttgaatggtgagatcccaattgaagtaggccacctacgccgtctagtttacataaacctttcttcaaacaatcttactggtgtgataccaaactctctatcttcttgctctagccttgaaatacttaatcttgggaacaacttcctccaaggggagataccccttggtctgagcaactgttcaaatctcaaaagaatcgtcctccatgaaaacatgcttcacggtggcattcctgatgggttcaccgcgctcgacaaactttcggttttgtttgcccatagcaacaacttgtcaggtaacattcctcattcacttggaagcgtctcgtcactcacctatgtcgttctcgcaaacaatagtcttactggaggtataccccctgtgctagcaaattgttcatcacttcagtggcttgacttaaggaagaatcacatcggtggagagataccacccgctctattcaatagctcctcactacaggccataaatttggcagaaaacaacttttttgggtccattccacctttgtcagacctctcatcaattcaatttctttatctgtcctacaataatctctcaggtagcataccatcttctctaggcaactccacttcactttactcacttctgcttgcatggaatgaattgcaaggaagtattccatcgagtttaagtagaattccgtacttagaagaactggaattcactgggaacaacttgacaggaacagttccactccctctctacaatatgtcaacactcacattccttggcatggcagaaaataatctgataggagaattaccacaaaatattgggtatactcttaaaagcatcgaaatgttcattctgcaaggaaacaaattccatggtcaaattcccaaatcattggccaaagcaacaaatcttcaattgattaatctcagagaaaatgcattcaaaggtattattccttattttgggtccttacccaacttgaccattctcgatctaggtaagaaccagcttgaagctggagattggactttcctcccagcattagcacatacacagctggccgaattatatttagatgcaaataaccttcaaggaagcctgccaagttccactggtgatcttccacaaagcatgaaaatattagttttgacatccaatttcatctctggcaccataccacaggagatagaacaactcagaaacctcgtactgcttcaaattgaccataatttgctgacaggcaaccttcctgactcacttggaaatctttcaaacttactcattctaagcttagcacaaaacagtttttatgggaaaatcccactttcaattggtaaactaaatcagttaactgagctttacctgcaagataactctttcagtggactcatccccaaggccttaggacaatgccaaaaactagatatactaaatctttcttgtaactccttggaaggaacaataccaaaggaattatttactatttccacactttctgaaggtctggacctctcacacaacagactctctggacctataccagtggaagttggtagtttgattaatcttggccccctcaatatttcaaacaacaaattgtcaggagaaattccctcagctctaggtgattgtgtccgtcttgagtatctcaacatggaggggaatgttcttaatgggcaaattcctaaatctttttctgcactgagaggcatcattcagatggatctttctcggaacaacttatctggtcaaattccagagttttttgagactctgagctctatggtgcttcttaatttgtcattcaacaacctagagggacccataccatccaatgggatcttccaaaatgcaagcaaggtttttctccaagggaacaaggagttgtgtgccatctcaccactactgaaattgccactttgtcagatatctgcttctaaaaacaaccacacttcctatattgcaaaggtagtagggctcagcgttttctgtttggtatttttgtcatgtttagcagtgttttttctgaagagaaaaaaagctaaaaatccaacagacccatcatataagaaattggagaaactcacatatgctgatttagtcaaagtaacgaacaacttttctccaaccaacttaattggttcggggaaatatggatcagtatatgttggtaaatttgacgccgaagcacatgcagttgctatcaaagttttcaaacttgatcaacttggagcaccaaaaagcttcatagcagagtgtgaggccttgaggaacacccgccatcgcaatctcgtaagggtgatcaccgcatgctcaacatttgatccgacaggacatgagttcaaagctcttgttcttgaatacatggttaatggcaacctagaatgttggctgcatccaacatcctacaagaatcgtccgaggaatccagtgaggttatctacaagaatagaaatagcattggacatggctgctgctttggattatctccataaccgttgcatgccacctattgtccattgtgatctgaagccaagcaatgtccttctggataatgccatgggtgcacgtgttagcgactttggattagctaagttccttcacagcaatatttcttcgacaagtgataggtctacaagcttactggggccaagagggtctattggatacattgcaccagaatatggcttcgggagtaaaatatcaacagagggtgatgtttacagctatggggttatcatcttagaaatgttgacagggaagcgtccaacagatgagatgtttaatgatggcttgaaccttcaccaatttgccaaggaggcatttcctctgaagattggtcaaattctagatccgagcatcatgccagattatgagaacgaagacaatgatgcaaacaatgatctagaccatgataattgtttgatggatggaatgctgaactgtgtcacgaagctggttaagcttggcctcttgtgctctgcagtggcacctaaagatcggccgacaatgcaaagcgtttacaaggaagtcgctgcaatcaaagaagaattttcagcactgcatggttaagccaaaggattatttcttttatgtcgcacatgctactagtacatttttcttgtttgagcttgtgatatgtcattttctcctcttcagtcttactagtgaatatttatgtgtgtaataatgtctgataactatgccagtttgtaacaaataattaaaattcagtattgagctcc

SEQ ID NO: 24375 - DNA, 2449 bp, Oryza sativa
  ref <308>: DATABASE ACCESSION NUMBER: AK099817
  ref <309>: DATABASE ENTRY DATE: 2002-08-28
gaatgccggccgtggccgcgtcccagcctcagttccgccgccgtcgcgtgcccgcggagcgaggagatggcgcggctggagcgcgggtcgctggtggtcggcgggcgggagctcctggagcgggcccctcccagcgtggccctccgccgccccgcggtcgtcgcccccgtccagccgccacgtgttctccctcggcaccctcgccagtgggtggaagtggctgtcctgttcaggttcaagatctggtggatgatcccgacggtgggcgaggacgccgccggcgtgccagcggagacgcagatgctgctcttggagtcgaggagcgaggcgggtgccgcgctgtacgcgctcatgctgccggttcttgacggcggcttccgagccagcctccaggggagtcctgagaatgagctccaattttgcttcgagagcggtgatcctgaggttcagacactggaagcagttgatgctgtattcatcaactcaggggacaaccctttcaagcttatgaaggaatcaatcaagatgttatctaagatcaaaggaactttcagtcatatagaggacaaagagatccctgcaaacctggactggtttgggtggtgcacttgggatgctttttataaatctgtcaacccagtgggaattgaagagggccttaaaagtttgtgtgaaggaggtgcaccaccaaggtttctaattatagacgatggctggcaagaaaccgttaacggattcaaggaagtggatgaggcctttattgaacagactgtgtttgcggagagacttatcgatctgacagagaacgataagtttaggggagaaacctgcaagaatcttggagaccatgtcaagaaaatcaaagagcactatggagtcaagtatgtctacatatggcatgctttacatgggtattggggtggtgtcctcacaacacctgatgcgatgaagaagtacaatccacagctagtttacccagtccagtctcccggtaatgttgcaaatttgagggatatagctatggacagcttggagaaatttggagtgggtatcattgatcctgccatgatatatgacttctacaatgatcagcacagctacctttctagtgtgggtgtggatggtgtgaaggtagatgtgcagaatgtgatggagactcttgggaagggttttggtggtcgtgttgcattaactcagaagtatcaacaagcacttgaggaatctatcgctcggaacttcaaaggaaacaacctaatttgctgcatgagtcacaatacagacagcatttttagttcattgaagagcgcagttgctagagcatcagaagatttcatgcctcgggagccaacgatgcaaaccctgcacattgctactgtggcattcaatagccttttattgggagaaattttcatacctgactgggatatgtttcatagtaagcatgaatcagcagaatttcatggagctgcgagggctctgagtggtggtggtgtttatgtcagcgacaaaccagggatgcatgatttcagtgttcttaaaaaacttgttctgccagatggcttgattctaagaacaaagcatgctggtcgtccaactcgcgattgcctgttcaatgaccctgtcatggatggcaaaagtctgttgaaaatatggaacttgaacaagttttctggagtcatcggagtgtttaactgtcagggtgctggaaattggacttatccagtgaaagaaaatgctcatgttcccactaccgtctgcatcactggtgatctctccccatcagatgtggagttacttgaggagatagctggggatgattggaacggagagactgcagtatttgcttttaattcatgttctctctcaaggcttcagaagcatcagactatggaggtttccttgtctactatgacatgtaagatatataccatagcgctgataaaggtttttggtggctttgttcagtttgctcctcttggactggttaacatgtacaactcaggtggtgcgctcgaaaacgtcacgagcacaggtgattgttcagagatcacaattcagatccaatgccgagggccaggtcggtttggggcgtattcagcaaccaggccggaaatttgcagtgttgatgagcatgaagtagagttcaaacacacagatgatggcttcctggcctttgatctctctcacggttcgtcccaggacaacctcaggaacattgagattctgtacagagcttcctgaacctccattttcagtgtgatttttatgctctttcgagcagattatgctgctctcaggctcttagctgtggataattattgcttcccgcaagcgtgtgttagctctgaattactgcatctcgcgtgtgttgtttgtgccaattaatttgggcttgttctaagtttcgaatctgccggagacagttataatacgaatatgtattttggct

SEQ ID NO: 24376 - DNA, 3971 bp, Oryza sativa
  ref <308>: DATABASE ACCESSION NUMBER: AK099818
  ref <309>: DATABASE ENTRY DATE: 2002-08-28
ggccctcctcctcctcctcctttcccttctctcctcgccttcgccttcgccttcgcctcctctcctcccgacctcccccatcgcgtcgccgcgacgccaccatgctcgctcctcgcgcgtcctagtagcggccgacgcacctccctccctcccccttccgcgcgccatggctcgggtctccgccgccgcagccgccgcggaacgccagctcgccgtggcctgattgattgtttgattgatttggctacgtcgaccgtctccctcgctctctctctgcacgtgcttttacggtagtccccccccttgacccctttcggtgcgctgttgcgattctgtggtgaattcgatttaagggtggatttctctgggtacgaatggatatggtggtgccgggtaatgattgttttgtgggcgtgacgggtgattggatacggtggtttttcagtagtggtagtcttgtgttagggttgttgattgcgcacggatttcctctgttgtcttgagctaaattgccagaattggtggttcggatgttgataaacgcctaggtagtacctgttaggttcgttcaatttgtcaccagaataatttctgaacgaatttttgccagtctgggtgttggtctgcttcttgttctggtgccgttggagggctatttctgcaagaactacagttatctgttcgttttggatggttatctggtgagctgaacggctgcatggtgccaatttgctccgaggtgaaaaccttgcttgggaattagagttgactgctagtgctgatgtatctttggagctttggtgatcaaagcctcaaaggacatgacctgtgcaataaacaattacaccttcttgcaacttggctgcattactttgacaaagttttctagtagactctgcagccaattgcatgggaaacaaaaatcaccacttcaattgttctgcggaattatcccaagtcccgagttttctgttgtgtgcagaaaagaatacgtggtgcttaatttgcatcaatattctatgcttcctcgagcatcagcacgtatgccagaattagtatattttagttgcttgtggttttgttagacttgggtctgttgttagtacagtggtcctgattatactatggaatatattccattattaacaatctgtgcttaaattttaatgtaggtactaggcctttgagttgttatacaacaactttttttttctggagaaagatgtctccaagtttgtagtattcactctgtttttctcaatcaacagtaaaatctgacccccttttttatcttttttcagaatctcgtaggcatttacctattatcaaaaaccagcacttctgatccaaaaaggatacaaaattgagagttagagatatccatgatgcctggttttggtacaagttcttccatgggttctgcatctcaccctgctagaatcgagtataacacaagtagcaatgtgtcatctcaatacatatatgagcagggtctttattatccagcaacaaacggctatgcttactatgcaggctttgagccaccagttgaatggagtgatcacactaattttgtgggggtagatggtcaaaacctacaactttcaaatgaaaaccttccatatgtatattgcacacctggctatggtttttcttattactccccagatcagtacacctatatgcctggcatggtaatgggagttgatggctcttttgtaggaagccaacagtattttgctagtccatatcaacttcctggctcgccatctggtttcttcccgatgtctattcagcccaccacagatttcagctcaactgtttctgcagaacctcctttacttagtactggcactggtacatctgctgttgctagtaggcttgctaacaccagtatgaaaaacaaatatcagatgtctggaaatacagctccagcttctcagactgccccttctggaagtccagctgttggacgtcctcagcaggcctacgaaaacgaaagcacaaataagccatctaatccgcctgatgctaacatgagtaggcgtgacaaatcctcaacctcccttgtcacagttccagtggatgcttcatcgactgacaaggatggaaaatctgatgaaggtaatcagtcaaaagaacatgtgcaatccattcaggttacttcaggtcccatgtctggcgaaagtggacaaggcaaagcaacatcaaacagtacattggaaaaaattatgatacatcctgaccaatacaataaggttcactttcctgttgatcatccagatgccaagttttttgtcatcaaatcttacagcgaggatgatgtacataagagcattaaatataatgtatggtcaagcacacctaatggcaacaagaggttggatgcagcctactcagatgtacaaggaagagctctgggaaagtgtccaatatttctctttttttctgttaatgctagcgggcagttctgtggtgttgctgaaatggttggtcctgttgattttcacaaagacatggatttctggcagcaggataagtggtctgggagcttcccggtgaagtggcacctagtaaaggatgtgcccaactccacctttcggcacattatattagagaataacgagaacaagcctgttaccaacagccgggatacacaagagattccttttaagtctgggacaaacatgctgaagctatttaaggatggcccattgacaacatctattcttgatgacttctcgttttatgaagggagacagaaagcaatgctagaagagaaatgcagatgttcgggtagaaattttgatgtacgcatgtatgttccagcatttatcgctaaaagcagtgttgttgcggtaggtgaaccttcagaagtaggtaaaggccagtttagcagcaaagatctacattcaggggatgttgaacaggataatggtgcatgtgagcaacctgacaagctgaaccaaatgaaagacatactggccactgaagcactcaaaacggatggtggagcatttgttgggcaacttgagcatgcaaaaacaaaccaaggtagtttagatgccagagttgatcatcagagtgaacattgttcctgttctaacccaccagaaaacggtgaaagaaaacctgatagcttgagcgaactagtaaaactaaatgggaagagtcagcgtgattctgaagcacaacctggaataaacttatcagaacccaattattcttctgtcaagaaaggtcttcctgaagagttctgtggtcagaacccctcaaattttatgaaagagggaggagctggtacagtcgaggatagaaagtctacaaaatttgttaccaaatcacagggctttccatctagtcgagtgaacaaggaagcgaaaggcaatggtaatgagatggcaaggatcactacaactggtgttgtgaaggttggctcagtgcacatcaaggtaaatgtggcaggtgagccgtcatcagagattataggtgatgaaaatgggcttccctgagagtttaaacgaatggtgcagaaggaacggatggtgttaactgtttagtggggcgtgtgtctctttgggggttgggagggagggttgggtggtgaggtgaggtgaggtgaggtcttagcttaatgattaattgtgttggtcaggttttgctttttgcgggcattacagttcagtgagcttgacattgaggttgctattgggtataggcatttcgctttgttttttgggtacataacctccaacaggtcatagatgttttgtggtgggaaaaatgtttccattttgttgttatggcaggcagtcctttagtttcatctgctcatatttggtgagtgaatgatatcaaaggagaggagccattcattgttgacagcgactgggttttgcatttggtggtattgggtgaaatgtaatcgtgttcaccattataccgaattaccaatacagaaaatatcgagc

SEQ ID NO: 24377 - DNA, 3733 bp, Oryza sativa
  ref <308>: DATABASE ACCESSION NUMBER: AK099819
  ref <309>: DATABASE ENTRY DATE: 2002-08-28
ggcttcccttcctctcgaatcacttcgattcgatttcgcttcgcttcgcctcgcgttcgccttctgcttcgatttcgacttcgattcggccggcggcggcggcggcggcgtcggtttggggggagttagggttagggttagggttagggtttccgggggtgatccctcccatggtgcagctgccgagctccgggaagcggccggccgagccggccatggcggcggcgtcggcggcgggggctacggtgaagctggaggcggacgagatgctgcatggcggcgaagaggacggcggcccgctcagcaagcgcgccaaggcgggggtccagatgcccgcgccgccgcctccgcctccgcccccgcagcagcaggtagatccggggggggggggggggttcgtgttctcgtattccgtttggtgggttttgatcgggggatgaggtggtagcgcgtcggattcgtaatgcttggcggcgagacggcgcgttttggtgctggattgtttgagggaggggaatcctttcttccctggcgtgtttttgacgcgtttgatccgaaaatactgtatatatgtggactcgagatggatggaatagaggggtataggtggatggaatagaatagtacagttttttttttggagtgatttgattgttcggatatggaatcgctagctgatgttgttagagagatcgcatgcacggtttgtgttgtaaatgtactgagaaatggttgttctgttcttagttgaatcaggtagggtcacagtctgcttgttggggttcaagtttatggatatgttttggatgtatctctatgataatatgctgtgcaggagcctggtattattgtgccattttgaggctgatggggcttcattgacgtccgatgatttgctgcagcggcacacttatttatatatttaactttgtgtattcatgtcacaagtcatgtgcatttgttcaatgtaatagggtaatgcctgtttatagtatgtcaaactgctaagttccgtactttgcgtgttatagaaaattttctaggaccaatcatcaatgctaacttccctttgcaagtagtgtacctatttggagcttggaataaaaatttttcgtcagaatccagtaagatgtgtgtgatataatcaataaccgatgcatagcacaccattttgagtgcttcctacttgggcagtaaaatgcgttgttagttcattttttcccaatcttaaataaaatctctagctggtattctttatgaaccatggaataggtgaaatatgccatatgactatcccatgcatgcattttctaacgcttgggagctagagcaatcctaatagttgaaatagcttataaatgtctgcccttttaacctattcaatgatttatgattctatattccatggaaaaagatccgtatcaggatttgctgattaggtgttgatatgtgacttggatatcaatgtttatttgtggaactgactgtgttctattcaagtagagcattggcatattatcaagctgatatgcaaattgcgttggtgtattaccaggccgacatgcaaagtgcatagacgagccatcatagagttcacgtgtagtttgcatgtagtactgtaatggttaacagagtcatcataaagttcatagacggttttggtcggaaagacgagaaaatgttaatggctacataaatgaaatggtcaaactagaatgctagatggtccaggatttgcctaggatgcatgcttgcttatcaatacacgaaagattgcttgcgttatttatgaaattccatatttgtcctcttcttgacttgttctatttgtgaaaatccaaatttgtcctcttcgccacttcgtgttatttgtgaaattccaaatttgtcctctttgtgactaattaatgttagttggtaatgtatacgtaaccaattatagtctaaaatggcagctttggtattcatattctttgctgacttgaacatttgcaggatatgtatcacaatgtacttgacgagcctagcccattgggtctgcggttaagaaaaagtccatctctcttggatttgattcagatgagactttctcaagcaaattcgactgcaggacagtcctctgcagatgattgcagttctgagcctccaaaaaagaaagaccttaaatcaggcacatcaacagctggggagcgcttgaaagcttcaaactttcctgcaaatattttgagaattggcacatgggagtatatatcacggtatgaaggtgatttggtggcaaaatgttacttcgcaaaacataagcttgtatgggaagttctggaaggtggtttgaagagtaagatagaaattcagtggtcggatattactgcattgaaggcatcttgccctgaaaatggacagggaaccttggatgtggtgttggcccgacctcctctcttcttcaaagagacggatcctcaaccaaggaaacacacactgtggcaagctacatctgatttcacaggtggccaagcaagtatgaacaggaggcattttctacagtgcccttcaagcttgttgagcaaaaactttgaaaagcttctccagtgtgatcagcggctaaaccaattgagtcagcaaccagacatcatattggactctcccgtttttgaacccagatgctctatatttgaggacccagttgaatcgaagtgccaaggttttactaatttgaaggacgaacatgaattatctgggttttcaggttctctgtcaccctgtgctggttcatccatgtctgctaagattgaagtcaatgattccattgcaacgcaagcaggatttcttgctcagccaggaaacccaggacctagtgcagtgaacgttcagggagtcagcagaaacgtaaatggtgctccagagttaaatatccccagctggtggagtcaactgaaagtgcctgggcttagaccgtctatgtcagtggatgatttggtaaaccacttgggaaactgcatctcggagcagatcacatcagtcaatcctacattgcccagcaacgaggtgccaacaaaagaaacactggaggagatcgctcagtaccttctcggagatgcacagggcccaccggcatcgacatccgacgagagatcgctgatggcgagggtggactccctctgctgtttgattcagaaagatacgccaccggtggcccagccaaagcctgaaccaaacgacagtgatagcattggaggcgatggcaccgaaggttccgatgaagaatttagctcggctgcatccacagtgaaaactacaggtcccgctcagccaccagccatgtcaaggaaggactccttcggagatctgctgatgaatcttccccgcatcgcctcgttgccccagttccttttcaagatacccgaggattctgagaattgagtctggatatcccaggacttcgatcctcaattcctcattccctaaatgagggaagcttctgtaaaaagagatttgtacctgagcaataagccagcccgaccccccctctcttgtcttctgtggatgagatgagagagctgttcttagtcttcagtatccaccctgtaaatgtgtaatcgattaggttgcttcggatcgtgtcggtatctttcaggattgctatgggtcgtggataaagtgttcattggttctttttaactcgggcttgcccttgtgcaaaattagaattcaagtcaaattgtttacaactttcttc

SEQ ID NO: 24378 - DNA, 3264 bp, Oryza sativa
  ref <308>: DATABASE ACCESSION NUMBER: AK099820
  ref <309>: DATABASE ENTRY DATE: 2002-08-28
gataatctccacgcctcctccttccttctttaaccgccgccgccgcagcttcatcgccaagccacctccgccgccgaagccaccaccgcttccctcccactcgggcgagctcccccgtctctccgtagccatggcgaagaagaaggacgtggaggtggaggagttggatgaggaggtggttgccgctgccgccgcccccgccgcggacggtggcgaggagcaggaggccgagccaccggcgcgtcggccgtcgacgttcgcggagctgggcgtcgtcccggagctggtggcggcgtgcgacgccatggggtggaaggagcccaccaggatccaggccgaggccatcccccacgccctcgaagggagggacctgattgggctggggcagacgggctccggcaagacgggcgccttcgcgctgccgatcatccaggcgccgctcaagcaggacaagccccaggcgttgttcgcctgcgtgctgttgcctacaagggagctggcttttcagattggacagcagtttgaggcactcgggtccgcgatcggtctgagttgcacggtgcttgttggaggagttgatcgggtgcaacaagcagtatcccttgcaaaacgcccacatattgtggtatgtgtattttagtaaatgatttcctctacctcataagacaatgtggttttggtctgttaacatcattcctatccatgagaactttgttacataaacctgctagtacaaatgagtgctttcatccggactctcaggatatttactgtatcatttccctcaaaacttaggttggaactcctggacgtcttttggatcatttgacagatacgaaaggttttagccttaataaattgaagtacttggtatgtcccctctgttctttttttccccatgttgcttcttgttattattcatacttcattaaataatttgatattgtggccttggatatatttttcaacattttctagttccacatatcaatatattcttgtcaaatccatcttttatgacaccatggtttgcccatctttaaaattatgctccttttccattgtgtcaatttttcttctgtttcattcatactccaactattatcgacatttttgggtataattttttacttaatcgaggctctgtctgaatcttgtgagttttagcaaggctggatttttttagtctagattttgttttttaaacttaaaatatcatctttgattgctgcaggtacagcctttaaaaatgaaggctttagtaatacctttttacttgttgaaatatatttttcacactctgtgcagcaaaatttaattttcattttatattaatttccacccctcaagtttaagtgttacaatcactattaataattgtaaatatgtgtgatgcaatggtaagtaccttgtcaactatgtcatgacatttgtaaatatgtgttgaatatggatcaattatattagtttttctaattaattgctttttttttatgtgtccttatctctttttttttggctaggttttggatgaagctgataagttacttaatgtggagttccagaaagcccttgatgatattctgaatgttatccctaaagaacggaggactttccttttttcagccacaatgaccaataaggttggtgaattggtagttttcagagaagaattattattcctctggattcaagaaagaacggaattaaacattgctggtatcccatcaatagattgtttactttatcagattgatgtggccatgctagcagcttaggttaatattataattatgacactggtttataaattcttgaggtaatgaaatggtagacattctatttattctgacgtatgctgtattgctactgtgctaccatttactgatattttgtattttctaaatcatggcctatttttatggcacctgatggctattatgctatctatttgtttacatttagactgaatttggttttctttgcaataacgtctattttctccaggtttctaaactgcagcgtgcttgtctaagaaatcctgttaaggtcgaggtagcgtccaaatattctacagtggacacacttagacaggagttttattttgttcctgcagattacaaggtcaattcttatcccttataattggtctattgacgtccatgtggttttgatcttattaaattggctgcatgctgactgatggttctacccttaatgtccttattaagagtcataacaaagcaccatcattggttgtacacacgcaacatcactttgaaacttatccggtacatttaataagcaatcctgaaaaatgttgctcatgatgaattgaaagccttgcataagtcattacatgatgttgcccacatcatggtagagtgccattttcattcgatgttctgatctttcttatttattattccaggattgttttctcgttcatgttctgaatgagttgccagggagcatgatcatgatctttgtccggacctgtgaatcaacaaggctccttgctctcaccctaaggaatcttcgttttaaagctatctctattagtggccaaatgagtcaggataagagactaggcgccttaaacaggttcaaaacgaaagactgcaatatccttatttgcaccgatgtggcaagtcgtggtcttgatattcaaggagttgatgtggttatcaattatgatattccaatgaattccaaggattatgttcatcgggtgggtagaacagcacgtgcagggaatacaggatatgctgtatctttggtgaatcaatacgaggccatgtggtttaagatgatagagaagctccttggatacgagattcctgatcgtaaggtggataacgcagaaatcatgatacttcgtgaacgtatctctgactcgaagaggattgcgctgacgacgatgaaggagggcggtggccacaagaaaaagcggaggaagaacgaagatgatgaggaagaggaggagcgcaatgctcctgtttccagaaaatcgaagtccttcaacaaatcaagaagacggtgaaagcattggagcaagtgatcgtgaggcgagcttgggatgagttagattagtattatactggcataccaccgccacaattttatgtaaccattcaagaatagatatttatgtaggtccatttcgacgaattagctattttattatttgtgaagctggatcttggaaaatttgctcatctgttgctacaaaagcatatatggaaaatttgctcatctgcttcc

SEQ ID NO: 24379 - DNA, 1120 bp, Oryza sativa
  ref <308>: DATABASE ACCESSION NUMBER: AK099821
  ref <309>: DATABASE ENTRY DATE: 2002-08-28
ggcggtttcttcccttcctcgcggaagaagcccaccgttccttccgccacgcttcaagcaaccgctcacctcccctcccctcccctcccctcccccaccactctcaccaaccacacccccccaaaccaggcgccttctggtgctctgacgcgcgtggatgccgcggcggacggcgagcagcgcggccgcggcgcccggccgcggcgggatggagtgggagctggagcgggagatggtgctgatggcggcggccggcggcgaacaccagaagaagcagaggcagcagcagccggcgcggcgggcgttcgccaccgacctgctccagaactgcgacctgcctcctcccgcgaagctcttcggcccgctccccactctgcaaaggttggagaacgcggcggcgtggacgagcacgagcccggatcggaagggcggggacggcgaaggcggtggtggtgacggcggcgaccgcctgatgcgtgcgctgcggctgtcgcagtcgcgggcgcgggaggcggaggagaagctggcggccgccggggcgagcaacggcgagctctcggcgctgctggtgcgggactcggtggtgctgtcggcgcaccgccggtgggtcatgatgctggaggccgagaactccgggctcagaggagcagcaggagccgccggctcggccaaggaaggcgtcggcgaggacgaggacgaggacgacgacggcggcgcccggcgcggggccgctgcgtggtggctcgcgctcgccgtctgcgtcggcattgccggcatcggcctcgccatgggcaagctcctctgaaaactaaccgtttcttcacctttttgttaaggggaaactgcacattggaggatcagatcagacatcatgaaaatccatcgttctacgaaaaaattctgcacaaaaaaaaatgttgctagcatctggaacatttcgatgattaggaatcacttgtaaatgatgaacatgatgaacagagaggggtgatgactgatgagaactgtagaaacttaggaatcactgttttcagaaggaagttgggttgtgactggtttggttgtgaagtttgtgtagataggattatcatcacgcaaaattggcatcatttctattccc

SEQ ID NO: 24380 - DNA, 3137 bp, Oryza sativa
  ref <308>: DATABASE ACCESSION NUMBER: AK099822
  ref <309>: DATABASE ENTRY DATE: 2002-08-28
gtccgttgtaaatccgctccaattgactctaccaacccacccgtgctctctcctgccgtgctcgtcgacagcaatcagaactcggaagccgaccgggaagtcgccgcgccgccatcgtgctcgccgccggtcgccgtctcggaggaggaaaaaagaaaggaaaaactgcagcgatggtacagattaaggaacttggcgagggcagcagccatgctgggcaagttgttataagagggctgcctagcgaattgtcatatgctgacctagcagactatttcattaaatatggaaagatagttgatttgattattatcagggccaagggcacagcccaggcaggggattctgctaaaattacttatgccgatgctgccatttctgataaaataatcaagtgcaggcatattatcaaaggaaaacatgttgtagttgatagaacattaatggaagacaccattcagtataaggacaagaagacaaaccggaggataactctggatggccttccctggacagtgtccaatgatgatattgtgcacttcttctctccatatggaacagtagttgaccatcagatcactcagaaggatgaaaataaactttctgaaggatcagggtttgtgctcttcagttctgagctagctgtaattaaaattctctcaaatggcaacactgttaatcttggtggtgaaaaggtgtctattaatagatcaggtgcttttgttatcgcagcaactggacaccatataaaacacccctttctccttcctagtgagatattttctagtctcttccctcatcaaaagggtgggcttgaatggctctggaggctccactgtgaaaaatccggtgggggaattcttgcggatgatatgggcctaggcaaaacccgccaggcttcagcctttctagctggccttttttattccgatttgacacaaagggtattgattgttgccccgggcacaatcttgcatcagtggattgctgaattaacaaaagttggttttaatgaagatcttatacatagcttctggtgtgccaagacaaggcatgattctctagcgcaggtgctaaaggaaggtggtgttctgcttattacgtatgatctggtgaggttgtataatgaagaactaaacggcatgagcagtaaaagctcaaagatgagaagagcttgtccttcatgggactatgtgattcttgatgagggtcacgtgctgaagaacccaaatacgaaaaatgctgctgcgctgaaaagcttatctcgtgggcaaacagttgtcctcacaggaacaccggttcaaaataacctttcggaatttcattcactaatgagtctttgctgtcctactgtcttgggctctcttgctgcttttgaaagagacttctgtaaaccaattgacatgggaaatgtgcttgaggcaacaactgaagtagtaatgatatcttctaaaaaggccatggagttccgcaaaatggtgcgaccttattttcttaggcgcaccaaggaaagtattgaaagccttttacctaataaagctgatcttgtcatctggctgaagctaacgccatatcagatataattatatgaaacatttatgaagagcaatttgattgataagacagtgaagggatcaacatttgttgcaacaatgctgctccaaaagatatgcaaccatcctcagaacttgacagctgtagattcctgtgaggaacaattagcgttgaaagaaaacaggacgttacagggcattgtcaaaaaacttgaagctttgattgcaaagaataccacaaagacatcaaattgtctcaagtcatgcaagcttacatttatactgcaattgttggaaaaacttaaggaagaagggcacaaggtgctaattttctcacagacgcgcctaatgcttgatgaaatagaggaggcactaaccaacaagggagtacattttgctcgtatggatgggactgttacagcttctaaaagagaagctattattaagggctttcaaagtaaagatgggcctcccatatttttaatgaccacaaaagtgggtggtataggtctaaatttaactaatgcttccagagttatcatcgctgatccatcttggaatccgagcctggataatcaatgcgttgatagagtgtacagaattggacaggagaagaatgtcatcatctataggcttataacctcgtgtactattgaggaaagaatatatgaaaaacaggtatccaaagaagggattttcaaagctgcaacagaagaacgtgatttcaggcgctacatcaacaaactgggttacaaagaatttttaaaacttcctgagatgggtttcggaacatccttattacagaaaaggcttgagatagagaccatgacagataacattagggcaacattgaagagtcatttgatatttttgagacagcaaggtatagtaggcgtatcagttcacaacacattgtttgagaaaacaattaatcttcctcctcaaaagattgatatgaagtatcttcctcctcaaaagattgatatgggtgatgaaaatagaagtacggttgggcattcaagatctcagcaccgccgatcgctttcagatagttgcatagattggtctgagttagcagtgaatccaaaagcaaaacctgttagaaatacatcattcagagttgaaaaagttgaagtagaccggactgtgaaaattgaagctaaaagggctgagctagaatgcaagactaagttgtatgaacatatcaaggaagcagctcatgactctggagccaatgttcttcgacaaatgaaggctattgaaaaagagatttctgaactaacatcacaagaagagatagaagaaaagaaaaggaaagggggttagcgatggtcaaactgctgaagaactcgcgccaagtgaaatctgccagtagacatttattgttgtcttccttttgcttttttttggggttcaggtttgtattgctgtagaagctggcgatgatgtagaatttgtgccagtagaaattggtgctccaggatgcaaacaacaaagttcattggtcgattgactttttactctctgtgtctgtgtctcagtttgctttttggttaagttcaatggagatcgaacatggtaccg

SEQ ID NO: 24381 - DNA, 1643 bp, Oryza sativa
  ref <308>: DATABASE ACCESSION NUMBER: AK099823
  ref <309>: DATABASE ENTRY DATE: 2002-08-28
ggcttcgcttgcgccaatccaaatcgccgcctcgcaccaatccatccccggcatggccgcgccccaaccggaggtggtggggctgacgacgacgacgagggcgacggcggcgtagcgcggtcggtcgctgtcgctgcggcggaattccggaggagggggggctctgccttatcggatcgtggggggtaagacccggttccggcgatcgccgggatggacaccgacgggcgcctccgccgcgcgctggcggcgttcgggggcggggccgacgtgtgggacctcgtcgatgccgccctcgcctcggcggcgcgcgaccgccccgcagagctccgcgcgcgccgcgacggcatcgtggagcgcctctacgccaccgccgccggcggccgctgcgggaactgcgacgcgccgagatcggccgagcccgaggcggcggcggcggcggcggcttccccggcttcgtccgatgaggatgccgacgtggacggcctcgacgacgacgagggcggcggcatggagagcaagatcctggcgatcagggacttcttggaggaccccgaccagtcggaggacgagctggtcagcttgctgcagagcctcgcagacatggacatcacctacaaggctctccaggagacggacatcggccgccatgtcaacggcctgcgcaagcacccgtccggcgaggtccggcagcttgtgaagctgctcgtcaggaaatggaaggagatagtggatgactgggtgcggctgcacaactccggtggcgacggcggtagctcggttctaactgatggtgactctcctgataaaatccaaggcaggagctaccaaaatgctcaggtttcagacttcaagtattctcccagcccacagagacataatggtttgagttcagagagatctagcaataataatggcgtcgaatcaatgattgagaagcgcagaacaagcccagcacctacatatcataacaacaaacagaacaacagcatcggctattctactacttcctcctctgctccagttaggactgtaagggagcagaaagataatcttatggatcttgagaagcttgattctgccagaaagagaccccaggaaaactaccaggaagcacaaaatgcaaaaaagcagaggacaattcaagtgatggatatccacgacataccaaagccgaaaaatagaaacgccttcatccgcaagggcggaggcggcctccctggaaagcaccggtgattatcctgcagacctacaattgtaatttcaaaaaggccgaaacgagaataaaagaagaagaatgaaggcttgatatttgttttctgggtattgtactatcgtttttacattgcctatttggtaccctaacgtagcctcacatcttccagttcactgtaatattgtccagttagtacatgaggctatgcgtctgggttcccttaccaagaagaggagagcaaagtttatagacttacagtgctcgtttctattgtaatttcttcttcattttgaatgtagcttgtttacaatgttgctgccgtttttcgattaataggtaggtattgtatgtactcatcaatttgactgtatatttgttcgttacaaattaaagtgatattaatatataacacaatggtatcacatgg

SEQ ID NO: 24382 - DNA, 3084 bp, Oryza sativa
  ref <308>: DATABASE ACCESSION NUMBER: AK099824
  ref <309>: DATABASE ENTRY DATE: 2002-08-28
ggcaggcagaggataccggcgcggcggcgcggcgggccggcggcggcgggggaaggatctcggccggcaaaccgcgcggccgttctactcctccgggaatatggagccgaagcgcccaggaaaaagactcaggcagtcagactgaacaatgagcttatgagaatgctagaaatcgacgaactcaagacagtttttgggatccatcacaaagtgttcatccctatcctggatacatttgattcgaagcatctaaacacggtgaactgttatgcaacgccacgagcagctgaactggggaactgaatttggctgctggctttagatctccccgtcccagaaatcctccagcgacttgtaaaagctcgtcggatgggtcaagaattcgtacttgaaaagcctaacctgcatgttgcaaacagaacgtacagctcaggaaaaatctttagagtatcaggctttcagcaagtaatttgtcaaaatatggagccatgcctgttgaatctcgtagaactttgccatcagttcttcagggatgcaccagtcaaatatgtcaatgttctcccttgtccacacctcattgtcgctctttgggagcacgctctgtcccatctgaataccccagcgaagagcaacctgagcaggacttttctgcagcttcttggcaatggaaatcacagtaggatggctcagaacgtttggtccatcgttccctggtgatccgggtgaacctaatggtgcatatgcctgcaagaatagcatgaaaacaaatcagagtgaagtaaatgattaatatgctgagttgctgaccaaagttggaaagaaatggaaagtaaacagtgagaggatcataggaacgtcttaatacagttcgaacttacagaaagatgaacgcccttggattggcagagcttccggagcttgccttgctgccaaaccggatggcactccacctggttgaccgctggaggcacgcgagcaacattgagcaagtcctccagcttcttgcatgaaaaattgctcacgccaatggcacgagctttgcctgaatcatacaacttctccattgcttgccatgtagctgggatatcaggcttgagtcaatatgacgatatccaacctgcaccagtacaagaagataacatttacatccaaacagagaaaaatccagtcgatcgacatgattgttatacgcaggtgggtgcagcatgagtaacaacgaaatagaagataataagactatcgcctatattgattgttaatcatcaagaagaaatgaaaagacctggacagcagcgcggatggaatcttgaacagcacctggtgaaatttgccaggtgccaagaccgactgatgggatcgccgcgttggtgtttaggacaaaggattcagccatattcactccaaagatcaaactgtccttggtttccaagcttcctcttcttgtgtcgatggaatccaacagagagcgaacttgagcttacctggtgtctgagcaagaagatctgagcactaatggtaggtagccaaggtatgcagcggttgaaatgagcccggtgatcaccagtagtatactctaaaataagagcttccagaatccatttaataatacataattgaccactctagatgagacttagagaaacctgcaactgacgaagctaatgcaatttgaaatagagaaatcgcatcttggcaattgatctgccaaagagaaggtaataggcaagcatcacagctcaagtaatttattttaagggtgagtcaagtcaatttatatttcagaaagactttcgaaacaagtttaactagaaatattagctgctgaagtcatacaacaaaatcaagatgctgactaactacttactggcagcatttaaaaatcattgtacacttgagagaaaacatcttatgtcactgaaattttacttgtcccaaatatgctactcatatcgcaaactcatgcccatttatgccatcagagatgcagcggccaagttatctattatctagtaaacacttatgccatcaggtgacaattctaacactgccaatgcttcttccccaatgaactcgccttcacttgttcaatggcagtggcgggcaggttgtgctgctggtgcggggtccgtgagctgctggacactgcccggtgatgtcctgtccccggcaggtgaggggcctggctagctggtaccgcagaagatggtgagaggctgagacctcagatcagagtggcgaactggagtgctgacctgatgccatcgcctggcggggactcgttgagcaatggcagtttccagtttttcacccacacgaagaaagcaaacttcagtccagccaagtcgatcattagatttcgccatcccaaagctcttcgattgatttgtagacgccttccggagagcttgatgaacaggtcctccgggatggaccagtcatagacgtcaatgttctccttgatcctctcctcgtgggtgctcttcgggagcacgctgtgccccatctgaatcccccaccgtagagccacctgcgccggcgtcttccccagcttctccgccgtggagacgaccaccgggtgcgcgagcacattgcccaccgctttcaccgacgctgtccccggcgagcccaacggcgagtacgcctgcagtgacgcatgacaaagaagaagatttgaagcacatcactaggataatgcactgaaggagaagttcagagttgggtgatatcctgttcagaatagcttcagctgttcagcatcagaacttgcggagcttggtctgctgccacaccgggtggcactccacctggtcgacggccggcggcacgcgtgcgacggcgagcaggtcctccagcttcttgctcgagaagttgctgacgccgatggcgcgagccttgccggagtcgtggagcttctccatcgccgcccacgtcgccgggatatcggtcgggaggacgttttgcccgccaaagccggcgcccttcttcatcctcactggccagtggatctgacgaacagcgtgagcatcctcaactcggatacttttaagataatgaaagctttatttaaactcagttaattacatc

SEQ ID NO: 24383 - DNA, 1163 bp, Oryza sativa
  ref <308>: DATABASE ACCESSION NUMBER: AK099825
  ref <309>: DATABASE ENTRY DATE: 2002-08-28
ggcgtgtgtagctactgctataaggagcgcgccgtgcaccacctctcacaatgtcgaccgccgccgccgccgccgctgcccagagctggtgcttcgccactgtcaccccgcgctcccgcgccacagtcgtcgccagcctcgcctccccatcaccgtcctcctcctcctcctcctccaacagcagcaacctcccggcccccttccgcccccgcctcatccgcaacacccccgtcttcgccgcccccgtcgcccccgccgcgatggacgccgccgtcgaccgcctcaaggatgggttcgccaagttcaagaccgagttctatgacaagaagccggagctcttcgagccgctcaaggccggccaggcacccaagtacatggtgttctcgtgcgccgactctcgcgtgtgcccgtcggtgaccatgggcctggagcccggcgaggccttcaccgtccgcaacatcgccaacatggtcccagcttactgcaagatcaagcacgctggcgtcgggtcggccatcgagtacgccgtctgcgccctcaaggtcgaactcatcgtggtgattggccacagccgctgcggtggaatcaaggccctcctctcactcaaggatggagcaccagactccttccacttcgtcgaggactgggtcaggaccggtttccccgccaagaagaaggttcagaccgagcacgcctcgctgcctttcgatgaccaatgcgccatcttggagaaggaggccgtgaaccaatccctggagaacctcaagacctacccgttcgtcaaggaggggatcgccaacggcaccctcaagctcgtcggcggccactacgacttcgtctccggcaacttggacttatgggagccctaaatccgaccgtccgtccgttcagttcgtcagtttacgccaacgcttttgcataagtactacctgaggacatcgtccccgatcatcgatgtgaacgcgtggagtactactacgtacgtaccggatggttcgatatatgtgaatgctgtattaagtaataacaagaaatatatctcctctactttttcctgacgcggagttgtactgcctatgatgcataatttgatcgcagtgtgatcaaaagacatcagctataatgtcttaataatattattatgaagagtttacctttttact

SEQ ID NO: 24384 - DNA, 1492 bp, Oryza sativa
  ref <308>: DATABASE ACCESSION NUMBER: AK099826
  ref <309>: DATABASE ENTRY DATE: 2002-08-28
cctccctcgtctccctctccaaaaccctagctttctccttcccctgctttgcggcgcgccagccaatcaccccaaacccctcccagtcccagcgatggatcagcgcaagggcagcggcagcgacgccaacggcggcctggcggaagcgacggcgtcgaggctgaggttcgaggaccccgacgaggtcatggaggagaaccccgccgccgccgccgccaccgtcggggcggaggaggaagggggagagggaggaggaggggaggaggtgatcggcagcgacaagaccagcgccgactactacttcgactcctactcccacttcggtattcatgaagaaatgctaaaagatgtggttcggacaaaatcatatcaaaatgttatcacccagaacagctttcttttcaaggacaaaatagtccttgatgttggtgctgggactgggatcctctcacttttctgtgcaaaagcaggggctaagcatgtctatgcgattgagtgttctcaaatggcagatatggcaaaggaaattgtgaaaacaaatggatattctaatgttataacggtaataaaagggaaagtggaagaaattgagcttcctgtcccaaaagtagatgtaataatctccgaatggatgggctatttcctcctgttcgagaatatgctgaacactgttctatatgcacgtgataaatggcttgctgatggtggtgttgtcctacctgacaaagcttctttgcatcttactgcaatcgaagatgcagaatacaaagaagacaaaattgaattttggaataatgtgtatggctttgatatgcgctgtatcaagaaacaggcaatgatggagccacttgtagatacggtggatgcaaatcagattgtcactaactgccagttactgaagacaatggatatttccaaaatgacacctggagatgcgtcctttacagtaccatttaagttagtagcagagcgtaatgactatatccatgctcttgttgcctatttcaatgtgtccttcaccaaatgccataagatgatgggcttctcaacaggcccaagatcaaaagccactcactggaagcaaactgttctgtacctggaggatgtactgaccatctgtgagggggaaaccatcacaggcagtatgactgttacaccgaataaaaagaatccccgagatattgacattaagctctgctacgccctaagtgggcatagatgccaagtgtcaagaacacaacactacaagatgcggtgatcaatgcgagctcagctgccctgcaatccattaaattttggttgaccaagtatcttgtttcgcaaactgtgcttgttcccgtgatcctgtattaacatacgttatttatgttctttgggatctaagcataagtagaaaatagattgaactggcctgccgatatgagatttgctattttgcaaaactatgttgtcttgctggctggtggtattggtaatgaatgcgttgacaatg

SEQ ID NO: 24385 - DNA, 1050 bp, Oryza sativa
  ref <308>: DATABASE ACCESSION NUMBER: AK099827
  ref <309>: DATABASE ENTRY DATE: 2002-08-28
ggaggcgcgcacacacaccagctctctctctctctctctctctctctctctctctctctctctctctctctctcttcgccgcagcgcagccaccctcacttgtcgcggccgcacggacatggcctccacctcttcctgcctcgcctcgccggccacggcggcggcggcgccccggctgcgggtgcgggtgacgccgagggcggggcgagtggtggcgtgctcggccgggggtggcggcgggccggaggcggcggggctgtttgccggtgagcgcaaggcggtgggcgggcttgcgtgcggcgtcctcgcggcctgggccgtcgcgtcctcgtccagccccgtgattgccgccagccagaggttgcctccactgtccacagagccaaacagatgcgagcgtgcttttgtcgggaacacaattggtcaggcaaatggggtgtatgacaagccactcgatctccggttttgcgattacacaaacgagaaaactaatctgaaaggaaaatctctagctgcagccttgatgtccgattcaaagtttgatggggccgacatgtctgaagttgtgatgtccaaagcttatgctgtgggggcaagcttcaaaggaacggatttcacaaatgcagtaatagaccgtgtcaattttgagaaggccgatctccaaggggcaatcttcaggaacaccgtcttgtcaggatcaaccttcgatgacgctaaaatgcaggacgtcgtgtttgaggacacgataatcggctacattgaccttcagaagctatgcaccaacacttccatcagcgcagactcaagattagagctgggctgcagatgatccacccaaattcccacctttctataaccgtttatgtcaatgttaacagtgtttcgatgattaagtcaagcctgtttatagagccgacatgaatccttttcttcgatatgtatctacaaacctctgcacaacttttcttccatatatgtagtatttacaaacctctgtacatcacacatattcggcatgcaatcaaatgcactacaagccacattttgacg

SEQ ID NO: 24386 - DNA, 1461 bp, Oryza sativa
  ref <308>: DATABASE ACCESSION NUMBER: AK099828
  ref <309>: DATABASE ENTRY DATE: 2002-08-28
gctttttttttcttcctcccatccgcgtgtgccgtgcaggtcgtgtgcgagcaccagtgtaaaagggaacgaggagtgggagtggatctccactccgccatagcttagctagcctccaacgttcaaaacccaggagccatagcccagcaagcagataccacttttttttttttttttttggtttcgtctcctctcaagtcccagctgaaagcctgaaagctgtgctggtttcttaccttccctcacgttctcacacccatatttaatcctccatttttattatttttgaaattttttttgagctctgcctgcagcttaactcctcccccagtatatacatatactagtagtactacatacacctcctcttatagctctagaattgaattccaccgacccacgcacgcatccttttttctccatccccctccttccgttcttccatttacctccacctatatagcactccggaattgcgccatctctctgccttaggagtacagtgaagtgctctccatataattgcagtggtgcaaggcaggcagcaactttcttcttcttcctcctatcataatctgctcatccttttcctcctctggagcaaccatgtccatgcagaaggtgtactagatatatagagttagttcgcagctgctccctacttacataaacaaacgcattcagatagccagcttcttgatcggcaacagcagctagttagagtgcaacaagaggtagcagagacaattttttttggcaaggcaagcaaaagctgatcgaggagagcgatcgagcaggtgttgatcgatcggtgcgaggaaacagagacaattttcccacacaggtgagctgaaagcctagctgctcctgctgcatgtgatgtgttctttcccatttctctctcccccccccccccccccccgcaaaatcagccgccgccgctttcttcaaattcaaaaaaatggcaagaaatgatcgggaattcaaaggggctttgcattttaagttggcttcccggtggcgcgcggccgtatttcgccgcgtcgccagcttaattcattgccatgcgtgtttttttgcacgttcattgcttcattcatcttccccggaaggaagacgaaaggggaggaatataggaggatgacgaaactcggaagcctccgatttggactctttctcaatttgaagatttcaaaattttcaaatcaattcaaaaaaatcgagagtaaaattactaaagggaagcttccggctactagatggatagaaagtcatggaaaaattggatgggattatcagggttcacacgtcggtactactgctattattccaagctttttcaaccgcgtccccctgattttgtagtacttttttttacagtctggattatctggaaacatttggggacagtgagaaaaaatgtgcaaattctgagaggcaatacgccggcaagcaagcagt

SEQ ID NO: 24387 - DNA, 2698 bp, Oryza sativa
  ref <308>: DATABASE ACCESSION NUMBER: AK099829
  ref <309>: DATABASE ENTRY DATE: 2002-08-28
gagggagatagtgttaggcagcgccttattggtggcagccgtatattattgctcaaggaaagagtgaggagttagaacaactctagtgtagcctacagagtgaaaccaaaagagagaaggaaaaaaaataacaaaaaggagtagatgcagttttagttcttattattctaatcttctctcttgttgcaatttctttttagaatccttgggatcatctctgtccccgttctgggtggtttctgtcatactccaggaactgtcttgttctagctctttgcttggtctgaaagtcgatttctgcacaggtactgcgaaagctttgggaatagtattgcagaaagcgcagcaatctgaagcttactgtccaagccagtttgcagctgaagccaaagactgaatctttcatcagggtttgataatatcaaatacccttgtgatgacagagttaatcagtttgtctcgtcatctacgtgatgattcttcttcagtctgtctcttcttctgcttctgaagacgatggccacattcttctcctcttccaccaatcagagagacctcaccggcggcggcggcgacggaggcgacatgtcgttccagcactacccaccgccgtctaacccttactcggactcgtcggccggcggcctgatcccgctcccggcgagcatcgtgtcgcatagccacattgcgcacggcggcggcgacgagccggcggcgttcagggaagcggcgacggcggacggcggcgagatgggcctgcagacgcagctgctcatggcgcacggcgcggcggcgcggggacaccagggcgggctatcgcttagcctcggcacgcaggtgccggtgtctctctaccagtacaggccggcgggcatggcggccgcctcgctgctcagcccgagccagtcgtcgccgatggcggggaggagcgcgcagaacagcatctacgtgcagaactcgaggtttctcagggcggcgcgcgagctgctcgacgaggttgtcaatgtccgcgacgcgatcaagcggaagggtgacaagaaccagggcaaggattccggcgagtgcaagggcggtgacgccgccggcgacgacaaggccggctcgaacccgcaggagcaggagagcaattcagcccccgagctctcgccgtcggagaggcaggatctccagaacaaggtcaccgcgctcatggccatgctcgatcaggttgatcggaggtacaggcactaccaccaccagatgcagatcgtgatgtcgtcgttcgacgcggtggccggcggcggcgcggcgaggccgtacacggcgctggcgctgcagacgatctcccgccacttccggtcgctgcgggacgcgatcggcgcgcaggcgcaggcggcgcggcggggcctcggcgagcaggacgcgtcggcgcagggcggcggcggcctctcccggctgcgctacatcgaccagcagctgcggcagcagcgcgccatgcagcagttcggcatgatgcagcagccgcagcacgcgtggcgcccccagcgcggcctcccggagtccgccgtctccgtcctccgcgcctggctcttcgagcacttcctccacccgtatccgaaagattccgagaagctgatgcttgcgaggcagacgggattgtccagggggcaggtatcgaactggttcatcaacgcgcgcgtgcggctgtggaagccaatgatcgaggagatgtacaaggaggagttcggcgcggagatggactccaactcgtcgtcggagaacggcggcggcggcggcggcaagggcaaggacgaggcgatctcgtcggaggaccgcgacgagttccagagcccgtcgagcgccgccgcggcgaggcacgccggcgtcgcgggccagctcaacaacccgttcaagtcgtaggcgatgggcggcgccgccctggacgtcggcgtcggcgtcgtcggcctgtccagctgcctcagcggcgccatgggcacgtacgccaccggcctcaacctgaaccaccacgtgcaccaccccggcgccggcggcaccagcctactgcacgacgcgctgcaccaccaccaccacggcggcggcggcgacgccaggttcgtctcctacggcgacatggccgacctcggcggcggcggcggctacgacggcggcagcgtgtcgctgacgctgggcctgcagcactgcaacaacgccggccccgtcccggccgagcagcagggcctgctctacggcagcgccggcgacttcgactacatcaacggctccgacgaccggcagcggttcggcccggcgtcgcagctgctgcacgatttcgtcgcgtgatcaaagcacggcgcgcgatggatgcatcgtctgcggcggcggcggcggcggcggggaataacgcaagacggcgtcagaagcctgggccggccggccggcgccgtcggcgagggtatacaggtatacaagcaatatacacgtacactcgtgtgttgtgttgggggggtaagtaaagtgatcgaagtaggggtgatcaggggtgtaattgtaaaactgtatatgagaagggggtgtagcttgctgtaaagatagattggtatttttgctagcttgcagatttctctactgattgatgcatggatcattcatatatatatatgtggtgatgtgttgggtcagattggaccagatgttcaatggattactgtgaattgcagct

SEQ ID NO: 24388 - DNA, 2461 bp, Oryza sativa
  ref <308>: DATABASE ACCESSION NUMBER: AK099830
  ref <309>: DATABASE ENTRY DATE: 2002-08-28
ggttttctcctcttccttttttcaacaaggagcctagcttgttttctttaacttgtttgttcggttctcgatctccatctcagatcaatgacatgtgatttattttttttggttttttctcctgcatgtgttgctgttcttcttctacctcggtctccatgccttatctcatgttattgaccagtctccttttttcaagctagctagtttctagctgccttgcttgtgagtatgtgcaacgtacgattgcatgttttttttttttggaactttggattaattagcttgtgaattaattcctctcttattaattccttgattaaattcccctctcgttttcgtttccttccccctttttgatttaatttgttgctttgttattagagaggatctgatcgatcagctgcaggtcagtcagtttgtctgtcctatggctgcacacagtcgtgcaaatcgaagaggattggaagtcagctggtagactagctagcgtccaagatacacatactactatcgaagagtgtgacttaattggattggattaattccatgcctatcttcttcttcagccacaatttaacagaacaagacaattagtctatcagtggtttgagctgattaactatcatcagagatagagatggcagccgcctcgtctgcacactacttcggtctcggcgagccgcagatgcagcagcagcagcagcagcctcccctgcagaacaacgcggctgctccggtcgcggccacgccgccgcccaagaagaagaggaatcagcccgggaatccaaatcctgatgcggaggtggtggcgctgtcgccgcacacgctgctggcgacgaacaggttcgtgtgcgaggtgtgcaacaaggggttccagagggagcagaacctgcagctgcaccggcgagggcacaacctgccatggaagctgaagcagaagaaccccaaggagacgcggcggcgggtgtacctgtgcccggagccgtcctgcgtccaccacgacccgtcgcgagccctcggcgacctcaccggcatcaagaagcactactcccgcaagcacggcgagaagaagtggaagtgcgacaagtgcaacaagcgctacgccgtccagtccgactggaaggctcactccaagacctgcggcacccgcgagtaccgctgcgactgcggcaccctcttctccaggagggacagcttcatcacccaccgcgccttctgcgacgcgctggcgcaggagagcggcaggattatgccacccatgggcgccgccctgtacgccgccgccggcgccggcatggccatcggcggcctcaccggcatggccgcctcccaccagctccaaccgttccaggaccactcctccgccatcaccaccgccgccaacgccgccgcgcagttcgaccacctcatggccacgtcgtccgccgcggccggctcccctgcgttccgcgccgcgcagccgacgtcgtcgtcctcctcgccgttctacctcggcggcggcggcgacgacggacaggcccacacctcgctgctccacggcaagccggcgttccacggcctaatgcagctgccggagcagcaggggagcaatggcggcggcctccttaacctgagctacttctccggcgggaacggcggccaccaccaccaccaccaggagggacgactcgtcttcccggatcagttcaacggcgtcgccgccgggaacggcgcccgcgccggcagcggcgagcacggcaacagcggtaacaacgccgactcggggagcatcttctccgggaacatgatgggcggcggcggcggcttctcgtccttgtacagctcgtccgaccagaccgtcccgccgccgcagatgtcggcgacggcgcttctccagaaggccgcacagatgggcgcgacgacgagcagcggcggcgccggcagcgtgaactcgctactcagaggtctcggaagcggcggcggcggcggcgctctgaacggtaagcccgccggagcagccgggttcatcatgtccggggagagctcgtcgaggagcactgcttctcagacggcggagaacgagagccagctccgggagctgatgatgaacacgctctcggcgaccgggggcggcaccggcgccggaacggtgttcgtcggcggcggcttccccggcgtggacgacggcaagctgagcacgagggacttcctcggcgtgagcggcggcgcgccggggcttcaactgcggcacggcggcgccgccgggatgggcatggccggctcactggaccaagagatgaagtaattaattaattattatattaattaaccaccagattattagggttcatcgatgcatcatgcaagcatggaactagctaatcaatcgatcgatcgatgagatgatcaagttaatggtggattaatgtggtgttttgattatttaatttaggtggatcaactggtgataatgcatgtt

SEQ ID NO: 24389 - DNA, 3062 bp, Oryza sativa
  ref <308>: DATABASE ACCESSION NUMBER: AK099831
  ref <309>: DATABASE ENTRY DATE: 2002-08-28
gcgtcacccagtcatcacccacctcatccatccatccaccacgcagcagccgttcacctcaccacctcgcgcggcgacgagacgagacgaaccaaatggaaacccgaagcgcacaatccgtgacctctgcccctgcccatagctaaccctaaacccccaaatcgaatcccccaccttccccgcaaatctcccaacccccccccccccttccctctcgccgccgtcgccgtcgccgcccggcgcctagatatatgtattaactgttctaagcaacacaactatttctcgtcaaggatcttgggagtttttgaaatagttgcataatggagttgtcaaatcaagggcagacacccatgtcaactaacatgggttctcaaccattgccttcttcaaatattcaacctaatcaggctgagtatccgtctatgttttatccatctttgcctgctgactggggtgcacagccaatgttttctatgggagcttctgttccaattagttcgtattttattgttcctatgagtcaacaatcggtccaaattggtgcttctaggccagagactccgcgttcttcaggggcacattctctaagcagagtatcattgaggccaccccagcaagtgctaagtattcgaacatctttgccaacaatggttggatcacaacactctcctgctggcaagaaactgcaaccgacaattgcttctccaaaggttcaaatactgaaatctacacagtcacagtcatcgaacaaacgttctgcacagaaggagacaccatcaaaggttcaaactcagcaattggaatctgtgagatcaaagttcagggagtcactttctgctgctctgagaacagattctgatcagagtaagaatcaatcttctgatgtgcagcctgatgggtctgcagaccaaaagaaagagatggatgtagatgcagatcaagtggccaccacatcccaaggcatgagtgcagccaagtcggaagtattgacaagtgttggtgctgagaggcgtgctgaagatgagaagttaaacagcgatttagtttcgaacatagccacaccattaaacgcggacatccagcaacaaccagagaatgcttctttacaagatgaaatgttgggacaatatacagttgttgctgatgaactcttgcaaggtcatggactttgttgggtttctgactttgatgctggggttcctgaacctgccacacaacctaatttaaaaaggtccagggcttctgacattgaccctgttgttgcagacactctctcagaatctgagtccaaaagaatgaagtctgccaatgatgaggaagcgatagataaggatagcattattcagaaggcagatgatttagcagttagggttgaagaggagctgttcaaactatttggtggagttaataagaagtataaggagaaaggtagatctcttctatttaatctaaaagataaaagtaatcctgagttaagagagagggtattgtctggagatattacacctgatcgcctctgttcaatgactgcggaggaacttgcttccaaggagctatcggagtggcggttagctaaagctgaagaactagcacaaatggttgtccttcctagtaccgaggttgatgttagacgtttggttaggaaaacacacaaaggagaatttcaagttgaagtagaagaaacagatggtatctcagtggaggttgagcttggaggtaatcttcttactcaagttccatcaaaagcccctgaagatcagaccaaatcagacgataaagaaagtacagatgataaaacaggcatacaagacaatgacaaggcacctgatgggacttcacaagatgaagataatggggcaggcaagaacgatccacaagatgatttagaatatgttgataatgagaaaagtgaccttatgcaagaacttatggtggatgacttgaaagacactgaaaaccttccaccgatcccttcactagatgaattcatgcaaggtttagattctgaaccaccttttgaaaatctctcagctgggacgccagaagaagattcagatgatcgagacgaagctgacactactgcagaatctgcggaacttcctgaggaagaagttaaagtttctgcagcagagaagattgtatctgaagctgacctgccatcttcgcaggataaatctgagtccaagttagagtcacccaaagatgaggtgggttcaaatttgggccctgttgagcagcgtgaaggaaagctgataaaatcctccccagatagtgttgaagtcaaacaaacaactactgaaaatgtgctgaatcgtgactctactgtgcataatatggcaactactcttcctatgatacgtgaaagtatatgggagggtgcaattcaacttaccatgtcttcgctcacaaatgtcgttgccatcttcaaaagtggtgaaaagccaccagtaaaagaatggcggagctttgttgaaatcaaggggagagtcaaacttagtgcctttcaagagtttgttgaacagcttcccaaatctaggagccgtgctataatggtaactgagttgtgttggaaggaaggttctcatgagagtggtcgccaacatctcttgcagacaattgactcgtatatttcagatgaaagagtagggttagctgaacctgcagatggaatagagctgtacctgtgcccttctcaagggaaaactgtggagattctctctcggcacctgccaaaggagcatttggagagtcttgctgtgtcagcatcctccatcatcggggtcatcgtctggcggaggcccaacgttcccaggatgccggcacaccctaggcatgatggttcccggaggccgtcgattttaaagaaaccgcaggttactggttctactccaggccctaggccctccctgcctatgagctcgcacggcgcgccgccgggttttccagttcagcgtcaccgccacgaggaagatgtaactgatgatgtccctccgggctttggccctggtgttgctagggatgaagacgatcttcctgaatttaattttgttaactcgtcc

SEQ ID NO: 24390 - DNA, 2422 bp, Oryza sativa
  ref <308>: DATABASE ACCESSION NUMBER: AK099832
  ref <309>: DATABASE ENTRY DATE: 2002-08-28
gatgctaatgaaaaccccaaaaaaccatcactaaaaccacgcgagggaggagagtaggagacgactccaaaatccaaatccagtggtcgccgtcgccgtggtcggtgggtgccgcgcggaaaccctagcttcccccgcgggtggaggaggaggaggaggagaggggggagatgtcgtcgtggctgaggagcgcggtgagccgggcggggcggagcggcgtggcccgcgccgtcagggggtacgccgacgccgtcgcgcaccacgccggccaggccgtcgccgacatcctccaggaccgcacggactacaaaagttttaagaaaacagtagcacgcttggaagaggcagcagtttcatgccgtggaggcgaaagagttgaactgttaagacgttggttgggagcgttacaagacatagaggctgaacttagcggatcagatttgaaggatccagaagatcgtgatccttctagtgaaacagatatttcaaaagcaccattggctttgttttatgatgctgacattgaaggagggcctatgaacttccgtgatgtattcctatacagtcaagcactggaggggattacactgtccatggttcttgaagctccttctgaggaagaagtttctcttcttttggaaatttttgggctgtgtcttactggagggaaagaagtcaacaagaaaatcatggacactgtacaagacttggccaaggcgctttcaaattacaaagatgaagtcctggtgaagcgtgaagagctacttgaatatactcagagtgtcatttcagggctaaagaggaatgctgacattatgagatgctgaaaccctcgagttgtggaaaaagctagatgagaaggagaaatcacgagcccagataactgaagatcaagataaatcgtcagggaatatttctgttgaaaacattgagggtttaaaagaagcacttattgaagtccgtttgtgctctagagtggaagaacttgtactgaagaagaagtcaatatcacctggagactctctggagatccattctcagaagattgataaattaaagatcttggcagattcccttgcgaattcatcctccaaggcagagcagcgtattttggagaacaggcgccagaaagaagatgctctgaacttccgtgttaagaaggagaatgaagtgagcacagttgagaaggaggtgcttgatgagattgctgaattggagaagcagagagatgaacttgaggctcagctgaaaaaggtcaatatatcactaaatgctgctgctggacgcctcaagaaaaccagggaagagagggaccaatttgatgaagcaaacaatcaaattatatttaaattaaaaacaaaggaggacgacctctcaaaatctatcgcgtcatgtaatgtggaagccaatgtagtcaagacctggatcaatttcctcgaggatacctggcagctccagtcaacatataatgaacagaaggaaaagaaaacatgtgatgagttggagagatgtgtgagtagttttctgaagttgaccaaacatcacctttcagtcttcaaggaggtcctaagcccgtcaattgagagtatccgaacatatgtggataacttggtggtcttgaactcaagggaagagacaaaacaagatgaagatgatgaagcatccgagaagacaaacccacgaataagccttgaagaggaatatttggaaactgaaaagaagatcataattgctttaagcattgctgatcacataaagaagttattttactctgagcaatgggctaattctaggagagatgatccagaggtcaagaacctaattgccgagatcgagaaattgaggggagaatttgaatctatagaaaggccaatgctaagcatagaagctaataaatcaaagccactacctgaggagagatctgaattgagcccttcaccaatccaggcacccgctacgcctaaggctgcacacgtcgactctccaaaatctcccatgaagcccgagcagcatctgaatcctgacaatgagctcgcaaacctgggagcagaacttggatcggaggacagagatttttcaggtgaggagattaacgggtgggagttcgatgagctcgaagaggacctgaaaaactgacatagctgggatcaaagcaacaaaaatagcaacatgttcatgtacgccccccagttctgtttgatgtacatatgacaacttcgttcatttgtattgtcgatatttcaggacatgcagattgaactttctaagtcttttaaccttggcaaggcatttgctatttgtttgtcttgccatgagatgttgcatcattacatgtacacttgaatacagattttactgaatactgttgtaacatttgcaaagacagacaataaatgttttcaccgacggtcgatcagtttgc

SEQ ID NO: 24391 - DNA, 869 bp, Oryza sativa
  ref <308>: DATABASE ACCESSION NUMBER: AK099833
  ref <309>: DATABASE ENTRY DATE: 2002-08-28
gagtgggctgagagtggctgctctgctccgtccctcgctcaccaaacggataatgccgccgctccgccttctcccgctcctcctcctcgccgccgccgccgcagcactcgaccccccgaccccgacgccgtggccggagcagttccacgcggtggtattcaccaacctcacggggagcggcggccggctgcagctgatcgacctctattacgactggccgcgggggcgcaacctcaacctcatccgcggccagctctccggcgacccgacctacgacgtcgagtggaccaatggcacctcctacttcttcaacgccacctcctgccgcaccaagctgttccccgtcggcctcctgccccccgactggctcgccgccggcgccgtctacctcggccgcgagaccgtcgccggcttcgactgccacctctggaccaaggtcgacatcgtctggtactacgaggacgtcgtcacccaccgcccctttcgctggaacttcttcaatggtatgcagcagcatgtgatgagcttcgaggtgggtggagttcttgaggactccaaatggcaggcgccggctcgctgcttcagcgatcaacacaccgtcatcgccgatcccggtgcagccaccgtcaccgacgacagggtagaaggtgaggatggcaagctcgatgtgatgaacgccttcttcaggtttgtaggagctccagcagcagcagcagcagcttcagtatgagcaaggcttacttttcactgatgagaatgtcaccattgatgacctgctcaatccactctgtttcttcctgaatcctgttgtcatgtgtaaacaaacgtttctgaacttcagcaatatgaaaatgttgtgtgctaatatg

SEQ ID NO: 24392 - DNA, 1501 bp, Oryza sativa
  ref <308>: DATABASE ACCESSION NUMBER: AK099834
  ref <309>: DATABASE ENTRY DATE: 2002-08-28
ggctggaattcagggtagcgctaatgctaccaacaataaagccttgggtgccgttctgaatcagcaatttgtcatacagcttggcctcttcactgccttgccaatgattatagagaactctcttgaacagggttttctgcctgctgtctgggatttttttcactatgcaaatgatgttttcgtccgtgttctacacattttccatggggacgaaaagccattactatggccggacaattcttcatggcggtgctaagtatcgtgctactggccgtggttttgttgtgcagcataagagttttgctgaaaattacaggctgtatgctaggagccacttcataaaggcaatagaacttggaatagtattgactgtgtatgcagctcacagtgtgattgcaagggatacacttgtttacataatcatgatgatatctagctggtttctagtggtatcatggatcatggctccatttgcttttaatccatctggctttgattggttgaaaacagtgtatgactttgatgatttcatgaactggatctggtaccctggtagtatcttttctaaggctgaacacagctgggaagtttggtggtttgaggagcaggatcatctacgaacaactggtctttggggaaagattttagaaatattgttagatctcagatacttcttttttcagtatggggttgtataccagttgaagatcgcaaatgaaagcagaagtattgctgtttatctgctttcctggatttgtgtggctgtgattttcggcatttttgtcctaatgtcatatgctcgagacaagtatgctgcaaaacaacacctttactaccgggtcatccaatctggtgtcattattcttgcagtgctagtgctgataatatttctgaaatttactaaatttcaaatcattgacatcttcacaagccttttggcattcattcctggttggggcttgatttccattgctcaagtgattagaccattcattgagtctactgtggtctgggccagtgttgtttctgtggcacgtttgtatgagatactgcttggggtgtttgttatggcgccagttgcattcttttcctggttgcctggatttcaggaaatgcagacgagggtacttttcaatgaagctttcagcagaggcctccagatatcccgcattcttgctggcaagaaaacaattgcagtttgaggctctaacaaggttatcgcagttaggccgtcctccgtcacctctgtacagcttcttatgcaatgtggaaggctttctgtttactgatatagcttagatccatattgaaccttttagatggctgattagcttcagtcatcttactctagatgttcagatttgtactgagtaatttaggcctctccagttttgcaccttcttagagctagttgtatgtagatgattctgttgcagcattacccgtgaactctaatggcttgtttgttaacctggctggatgttccattttttgcgcctgg

SEQ ID NO: 24393 - DNA, 1385 bp, Oryza sativa
  ref <308>: DATABASE ACCESSION NUMBER: AK099835
  ref <309>: DATABASE ENTRY DATE: 2002-08-28
gaatccaggcatccggctgaggaggcaagcggcggcggcgcggcgctacgggccgacggccgacggcgacactgcgacagggagctgcggtggtcggtgggggctctgcagccggcggggcaggcgggcgcgcggccgctctgggaggcaggcggcgtgggcgcgctgcggtgcggccgcactgggcattggcgcggcggccgcgggaggcaggcagccagcgcagcagggcagccggcaacaggcagtgaggcaggcagggcagcagcaggtctatacattttccatggcgcttgtggtaatatgtgggcagccttgcagtggtaagtcagcagctgcagcttgtctcgccgctgctctctgctcctccacatctgacctcactgtccgtatcattgacgagtcatcactccatcttggacgcaatgatagctacaaagatatggttgtagagaaaaacttgagaggagttcttagatcagaagttgataggtctgtatcacgagacagcataatcgtcgtggattctttgaacaatattaagggataccggtatgagttgtggtgtcttgcacgggcatctggaataagatactgtgtgcttttctgtgatacagaagtggaccattgtagggaatggaacaccaagcgtcaggagaaaggagaacccacgtatgataataatatattcgatgatctggtaagtagatttgagaagccagataggcgcaatcgttgggattctcctctttttgaattgtttccatctagagatggagtaatggaatcgtctcctgttattgctgaggctgtatcatatttgactaagaaagtggactctaagacaagagatgtgaaagttctccaacctacaatagccactcagactgctcggacaacagaagctaattccctttacgagatggacaaagcaacgcaggaggtgatcaatgcaattgttgaagcacaatcttgtggtcttgggcttcccgtgaataagatttctcttggtcctgacctaccaactatatgtcttcaaagatcagtcggtctgcctgagcttcgaagcctgcgacgcactttcattaagctggcagggcagtacagcttgagtggacctcccccaccagcagatgctgatagcgcaacgaggatgtttgtggactatttgaacagggaaatcagttcctgatatcaatttctgatggattgaccctatgtaagccctctttgtcttgtgcggcaaaggcattgaaacttgaaactttttattgagcctaacggattgttttcccctctgatcttctgcataattatccagaaacaccatgacactcctacacacttactgctgaattatgtcactattacaacacgtaaattac

SEQ ID NO: 24394 - DNA, 1584 bp, Oryza sativa
  ref <308>: DATABASE ACCESSION NUMBER: AK099836
  ref <309>: DATABASE ENTRY DATE: 2002-08-28
ggggtgtctcctcctctactccgcttctctccacctcgccgcgacgagagagagagagagggaggggggagagagagagaagtatcgatccatccgcgtttatctccgcgtatgtattatagttcatattgccgcagcattcattaatatgctaacattgatgatgaagaacaattgtaatgatgatgatattgggagtgagttttatgactcctttaatttagataataccatagagaatgtacattcacaaaacaataagttggagctggctaaaactggagagttcaatcaatatgagcaaacaaccggattttctttgccttgtggagatctgcagtatgatgtgtacctaaggactcagatagccgggcaggataataagagtggggaaggtgctgattttatggatgatggaacttttactttgcttaaggatttggtaactgaatcaagaacttcgtcaccatattatgagaaggatcatcagttaaattcactaaattatgtcaatcaagatggacatggcattcctacaacaacaaatcctacctgggacttgactcagagttgcaatccgttgaaccattccctgacagaggattctgttcctttcaatgttggtacttcagctggagtcctgactaatgccacctcaaatgattttattcccattgatgagctagcaatcacgagtgggagatatggagtactaccttccattgagaaaactgaagaaggcagtattgccatcgacgaagctaactcgtttggggcaactgcaaccatgtgctataatagcgttcatttctctcattggattgaccagaatttaactggtccattgcctgatttagctgatcttcctgacatatatccagacagtttcttaccaacacctagaaagaacatcactcttgttcttgatcttgatgaaactcttatccactcatcagcggttgaccgtgatggtgctgacttttcatttcctatgtaccatggcttaaaagagcacactgtgtacgtgaagaagaggccacatgtcgacaccttccttcagaaggtgtctgagatgtttaagatggtagctatcttaaggatctgactgttattgttgctgatctcgcaaaggttgtgataatcgacaattctccagaggttttccggctacaggaggaaaatggtatacctatagagagttggaccagcgacccggctgacaaatcattggttgagctgatacccttcctggaagccattgctgttgcagatgacgtccgaccaattatcgcccaaatgttaggccgtccaagatcaattgcttagatgttgcgacaaatatcagaaactgctcatttgcttattttacaaagaattttttccccatagttgaacaggatacctgtgtggtacatcatcgaactagtttcccattgcttcttttaccgagtttgattcccaagattttgtgaattcttttggtgggaatgttaatttttgtacttgcagttctgtacgtagcgtctaccttaaactagcctatgtacaaacaaattcaatcataggagactaaagattatactc

SEQ ID NO: 24395 - DNA, 4009 bp, Oryza sativa
  ref <308>: DATABASE ACCESSION NUMBER: AK099837
  ref <309>: DATABASE ENTRY DATE: 2002-08-28
gggggacactcgtagcgcgcggcacctgatccgaccagacgatcgtgagcttctcctcgtccttccttcgggctccccgtctctctcgtgcaaaccaccaagccgtcgatccctccaacaattgtgccgcgcgctcgtcttgtaaactccagtgcacgggcacgtttagtgatgatccctccttgctaaaaccccaatcgttttttctgccagttagtgcgaattcgccaagcatgcgaccggaacggcaatcgggtgaagaggccatggacgtcgtgcaggccaggctgccggacccggtgccatcgccgatcctgaggcactcgccgtcgacgtctcggtcactgcggtccgtgggcgacatgccgtcggtcacgttcgcgggcgacatgaggtcgggctcctgcagggccgagtccaccgcgtcatccttcgagagcttccggcgcgccgggtcgcggccgcaaccggttggcgccgtcgcgcggatgcccacgaggcggtccgcgtccgagcgcgccggctcgcagcgggacctccgcgacgaggacgcccggttcgtgtacgtgaacgacgcagcgcgcaccaacgcgccgccggccaagttcccggacaactcggtgacgacgaccaagtactccgtcctcaccttcatcccgcgcaacctctacgagcagttccaccgggtggcctacgtgtacttcctcatcctggcggcgctgaaccaggtgccgcagctcggcgtgttctcgccggtggcgtccgtcctgccgctggcgttcgtgctcggcgtcacggccgtcaaggacgcgtacgaggactggcggcggcaccggtctgacaagaccgagaacaaccgcacggcgtcggtgctggtcgacggcgtgttccagccgaagccgtggagggagatacaggtgggcgagctggtgcgcgtggtggccaacgagacgctgccgtgcgacatggtgctggtgtcgacgagcgaccccaccggcgttgcctacgtccagaccatcaacctcgacggcgagtccaacctcaagacgcggtacgccaagcaggagacgatgtccacgccgccggaggcgctcgcggggctcatcaagtgcgagaagcccaaccgcaacatctacggcttcctcgccaccgtcgacctcgacggccgccgcgccgtctccctcggcacctccaacatcatgctccgcggctgcgagctcaagaacacggcctgggccatcggcgtcgcggtctacaccgggcgggacaccaaggtcatgctcaacaactccggcgccccctccaagcgcagccgcctggagacccacacgaaccgcgagaccatcgtgctcgccgtcgtcctcaccctcctctgcaccctcgtctccctcctcgccggcatctggctgagcgaccacagcgacgagctgggcgtcatcccctacttccgcaagaaggacttctccaatcccaacgaggccgagaagtacaaatggtacggcacgggcgcgcaggtggtgttcacgttcatgatggcggtgatccagttccaggtgatgatccccatcgcgctcttcatctccatggagctcgtcagggtcgggcaggcctacttcatggtgcaggacgagcacatgttcgacgacaagaggcaggccaagttccaatgccgggcgctcaacatcaacgaggacctgggccagatcaagtacgtcttctccgacaagaccggcacgctcaccgagaaccgcatggagttccgctgcgccagcgtgcacggcggcgacttcagcgagaccgacggcggcgacgcggacggccatgccgtggccgcggacggcgtggtcctgcggccgaagacggcggtcaagacggaccccaagctgatggcgatgctcaaggacggcaccggcgccaaggccgacgctgcccgcgacttcttcctcacgctggtcacctgcaacactatcgtgcccatcatcgtcgacgacgacgaggacaacgacgacccggcggcagcggcggcaaagctggtggagtaccagggcgagtcccccgacgagcaggcgctggtctacgctgccgctgcgtacggctacacgctcgtcgagcgcacctccgggcacatcatcatcgacgtgtttggcaccaggcaaaggtatggacgacgaacccatcacctgcaaattctatgtttccggttgctttttttgtttttttggctgtgaaattgcattgcttgcttctgattggattgcattgctttgggtgaaatctctgcttgcttgttaggataataatgggctatctagggtttagcatgattgcggggactaatgagtgtgggacaagggcaaagcaacagatcaggataaaggttgtggcaaatgtcaccaaatcttgggccctgacggctgatgatccattgctaaatgctctgcatccgatcagcaaaaagtactcccaactgctccacctcgctacaagtcaaacgtgtgtggctgcaggctgctagtgacaacagatcaggataaataagatcgttatttttttaagtagtactactaccggttaggtttgttgtttgtatcgtactagtaccgtgttaggcctcttgaccaatcatatctggcagtccttaccctggctcattatactacagtatgtacgtacgggcaacccaaatttcaggctagaatattagtgttgaaatcaattttctaagcatgattatggacaaattggattcgtcatggtcaggtcgtcgatatcatggagtagaattccatggggccatgaacacttatcagggtatgattggccggcggcttggttatatgcccatccaaacccgtcggtttccatcagtaacctgtagttacatcttatcctagctttcttccaaggcaaacctggaagaataatcagatttatagacttttcagctccctgaccaacccaaccatgatagctgatcaacgacaacgagtagtattaattcgcaacggaaagatgaattacacttgtgtggcacatattggcaacattcgcgaggcttttgccatcgccggcatagctagctttgcattgcaccgcagtaccgcacgcagcccctcgcaggggctaagttcacggctactcgcacattttaagcgaggtgatgaacgtgatggatcttgccgtaggccaacatcaacaataaattttgatatggaaatgagggaagaagtcgtaatgatggatacggtacgaaattgttcgaccatctagaaggggcagagttaggcatatggaaaaactaattaattaattaattaatgcaagtaggagtacaagccatcaacgtgtaagtactcgtgttacgtcgtcgaagggtatggccattcatagcaacgaggaattcttggtccacacgtctggcttacatgtgggcccggacgtccaaattaaacacacagaattcatgtggcttatccacaattccacatgtgcaccatgtagactttgggccatcccatatctcacagccccttgcagaaagtcaaaataccgaggattttctacatcttttgtttaatctgagagaagatctcgccggtggtggcctagcgcgcaacgtcattgcacaaatcataccactgatagcgcagagattaactaaccaatattctaaatgatttacaagatctctgaaactggtagtactagctcgtactctacaatcgtacaccgcaggaatcataaccctggtactatactagtacacgatttaactataacaagttcttaaaataaaacgacatgccgaatgggtcaatccagcacggcgaaggacaggcccacgggccagccacgccacagttcttggaaaggactctttacacgtccaatttattgtttctctattttccatttttccttttcctttttatatacatacacacatgctctcattggcacaccaacaacacatgtcacacgacatctattaaaagaaaaaaaaacaggg

SEQ ID NO: 24396 - DNA, 1376 bp, Oryza sativa
  ref <308>: DATABASE ACCESSION NUMBER: AK099838
  ref <309>: DATABASE ENTRY DATE: 2002-08-28
atttcagtagagaggaggccaattggagaaaatcatgaactactttcaagggagattgggattgttactaggtaccatgcacctatcaaacgcattggttggaacaattttagtgaggctgacaaagaacctttgtatgagcttctgaagatgaaattcaacttagatctatctgaacctcatgttaaaggctgtctggagctactattttcgtcaagctataaaacatttcaccatagatgctatactcattatctcaagtctggtggtggggacagtgctcgtaacagtccatatgaaccccttcgtgacagacctggttattggacttggctttgtgatcatttcgaaacagaagaatttcagaaaaaatcagttatagggaaagctaatcggatgaaactggcatatgttcataaaaagggaaccaaaccatttgtggcacttcagcatgaattaagttgtgatcaaatctcattgtacaaggaatgctattgtagtgacaaaggatgggcgtcaagagatgctagacagaactatgaaacaatgttacagatgcagcatgaaaatgagcaagaaggtgcaatccagctgacagagcaacaaatttgtgagaaggtgcttgggaaggcatatggatatattagagggagaggtcatggtccgaaacctaatagaagagcttcatcaacttcagcaaacacctatcaacaaatggaagaagaattggcttctacagaacaaactgtggcagttcaacaaaaccagcttgcagtataacaaaatcagcttgaatctcaacaaaagcaacttgattggttgcgcagtgtcgtgtccaaacttgctggtattccacctcatgctatggatgataatgatgcctcaggaccatcccacacaaccacaacttcaattgatggatccggttcactggtttcggatggaatgtcaaggagatcatgattttgaagatctttgattaggaggaacaccgcaacgtaatctcctaggctattacatcatcttgacaatactcatcatggtgtttcaaaacaagcatcaggttgcgatgctccaagagacttgtataaactcaaccatagtactacagaaattttgtttactttgtggtatagtgattcgtagttctgttcagatagaagtgattcatatttttcttcaaatagattactcatttagaagttgacttttgggtataatgatttccttgtaagactgcacatcagttttaatgtgttaccgtgtcaagcatgtactctaaggtgaagcttgagatgagtttattgtagcactattctgcagttgatgctatggtaacctagttgattcatatatgaattgcacatcaaattgcc

SEQ ID NO: 24397 - DNA, 4689 bp, Oryza sativa
  ref <308>: DATABASE ACCESSION NUMBER: AK099839
  ref <309>: DATABASE ENTRY DATE: 2002-08-28
gacgccccccgaaaacaaaataattacggaaaagccccccatctctcctccccttctctctctcttccatcgcctccgtcttcttcttcttcctcctgcttccgcctcgacttccaattcccttcccacccaaaccctaaaacctaaatggccctcgcggcgggctcgccggagccgttcccgtgccgccagtgacccccgatccgcccgcccccgccgcggacggcggcgtccggggcccgatctcggggtgggtgtgtgtggggggcggggcgagatggcgtcgcggcagcacaatgcgcagttccacaagaacaagacgctcgacaacaaatatatgctcggagatgaaatagggaagggagcatatgggcgagtgtacaaggggcttgacctggaaaatggagacttcgtggccatcaagcaagtatcgttggagaacatcccgcaggaggatctcaacatcatcatgcaagaaattgatctcttgaaaaatctgaatcacaaaaatattgtgaagtatcttggatcattgaagacaaggagtcacctccatatcattctagagtatgtggagaatggatcacttgccaatattatcaagccaaacaaatttgggccattccctgaatcattggtggccgtctacattgctcaggtgctggaaggacttgtttatcttcacgagcaaggtgtcatacatagagatatcaagggcgcaaatatattgactaccaaagagggccttgtcaaacttgctgattttggagttgctactaaattaactgaagctgatatcaacacacattcagtggttggaactccatactggatggcccctgaggtcatcgaaatgtcaggtgtttgtgctgcatcagatatctggagtgttggttgtactgttattgagctactcacctgtgccccaccatattatgaccttcagcccatgcctgcgctgtttcgcattgttcaggatgtgcatccaccaataccagaaggcttatctcctgagattactgattttcttcgacaatgttttcaaaaggattcaatacaaagacctgatgcaaagacattattgatgcacccatggttgcaaaactcaaggcgagctttgccatctcttcgacaacctgttcaatcaccaagtactgtcagggatattgatgaggacgatgaaggatcaagtggtgacaatcactctggattttctggcccaccacgagatacacaaacacctactgcttctggccttgaacaggaggatggaagaaaagatttggtttctgaatctgccaggcaagatatacctgatgagtttcatgatggaatgttaaaaactactgggagtagtagttcgaatgatgtggaacttatgaaagataacgtggttcttaataaagatcctacattagttttccatgagaagctatcattggaatcttcactaggcgcaactgatttaaatggtaaactaactcatgaggtatcacaagatggtccaccaaacaagttaactagcagcggccaagaatcaagaaagagtgatggtaaatatgtagaagatgaaagtaaagatggttcaagtcttgaggatggtgatgctttcagcttccaggctggaggacaaaatatcaacttccaaaaggaagctaaaacttcagttgagatggctaacgagctaagtagattcagtgacacacctggagatgcctcctttgatgatttattcccacctaagaagcgaggagatcatggggctgaagcttcaacatccactactggtgaagagcttcaatacaatggtgcacaaaatgatctcgcgaaggaactcaagactaggatggctcagaagcagaaggaaaatgatactgagcacatgaatggtggaaaacttcttgaatatgtcatgcgtttgagggaagaagatattgatggaacggcatttgatgagactattcctggagagagtctttttcctttgcagtctgtggaatacagcaaaatagtagcacagctgaaacctggggaaagtgaggacgtgatattatcagcttgccaaaagcttgtgtcaatcttcaatcaacggcctgagcaaaaacagatttatgtgtcacaaaatggtttccttccgctgatggagcttcttgaacttcccaaaaaccgtattattacttctgttctgcaactcatcaaccaaatagtaaaagataatacgaccttcctagaaaatgcttgccttgttggccttattccggtggttatgaattttgccgtgccagatcgtgcaaaggaagttcgggtgcaagcatctaggttccttcagcagctttgtcaagccagcaccttgacattgcaaatgttcattgcatgccaagggatccctgtattggtgagttttctggagcctgattatgcaaaatacagggaaatggttcatcttgcaatcgatggcatatggcaggtcttcaaactccagcattcgactccaagaaatgacttctgtcgcatagcggcaaaaaacgggatacttcttaggctggtcaatactcttcatagcttgaatgaagcaacaaggtttgcttccatctccgggtctggtgcttcagtaacacagaatggctccacccccaggcgaaggtctggtcaattagatccgccaatgctagaaatttccaaaacgaggctggatcatcaccattcatctggttcactgcaatctttacaagcagatgcagataggcatcatatcataatggatccttcagcatcgcctagattcaccgatatggcggctgctggtcacatggagagaaatgataatgatcccattaggccacaacggcttagtgtttctgcaggaaggacatcaacagatagatcaccaaagcatatagagctagtatcaaatgggcatagtagtggtcaaaatgatcaaattcgtcccctactgagcctgttggagaaagaaccaccctctcggcatgtatctggacaacttgattatgttcgccacttatctggtctagaaaggcatgaaagtattttgccattactgcatgcttcaacagagaggaaaactaacggcgaacttgacttgttaatggcagaatttgctgaggtctctagacagggaagagaaaatggtaaccttgattccaacataaaaacttcaaatagggttccaagcatgaaatatgcaccatcatcaggtccaacaacttctaatgagggagcatcaacatctggagctgcatcacagacagcatctggtgtgttatctggatcaggggtgttaaatgcaagaccgggaagtacaacatcatctggcctattagctcagatggtatctatgagtgctgacgtggcacgtgagtaccttgagaaagttgctgatcttcttttggagtttgcacaagcagacactgtcgtaaaatctctcatgtctagccaaagccttcttgcacggcttttccagatgtttaacaagatagaaccgcctattcttcttaagattcttaggtgcattaatcatttgtcgggtgatcctaattgtctcgagacactccagcgcacagatgcaatcaagcatctgataccgattcttgaacttcatgatggccctctagtttatcaaatacatagtgaggtcctcaatgctctgttcaatctttgcaagatcaataaaagaagacaggaacaagcagctgaaaatgggatcatccctcacttaatgaattttgtcatgtcagactcacctctcaggcaatatgctttacctctgctgtgtgatatggctcacgcttctcgcaactctagagagcagttgagggctcatggaggattggatgtgtacttgaacttattggaggatgatgcatgggcgtgtactgcgttagattcaattgctgtttgcttgtcccatgacaatgatcacagaaaagtggaacaagccttgttgaagaaagatgccattcagaaattagtgaagttttttcaagactgccctgaacaatattttgttcatatattggatgcttttttgaagataatcacgaaatcttctcggataaatacagcaatggctaccaatggtttaacgacactgcttattgcaaggcttgaccaccgagaagctattgcccgtttgacactgctaaaattaataaaggttgtctatgagcatcatcctcgaccaaagcagctcatagttgagaatgatcttcctcaaaagctacaaaacctgatcgaagaacgaagggatgggcaacgtggcggtcaacaggtattggtgaaacaaatggccacctcgttgttgaaagcactgcacatcaatacagtactgtgatttgtctctcggccattgtgtatttttcctctcaagttgtatatgttcgccccggaggaaaagttttgtttcttctttcgctgcctcttttgtacctgtggtttccctggcgtgagagccagtctgttgcacgcctgatccctcttttatcgggagaaaggttcaacgttcgggtgctagatacaaaatgggttcctagagcccttcttggtcgtttatatttagtgtactattagtgataattggtgtaaattagttttccccagtttcctttttagaactcatgtagactttcttgcatctgatgttagtaaaattttgctctaggtgtgctggcc

SEQ ID NO: 24398 - DNA, 3038 bp, Oryza sativa
  ref <308>: DATABASE ACCESSION NUMBER: AK099840
  ref <309>: DATABASE ENTRY DATE: 2002-08-28
ggcatttcttttcataccctcgagaggaaaaggccaccatgcttccgatttctaacacaaaagtctcaagaaaaaacgagtcttgagagaaaacgagttgtagcacaagctgtttcggacaaggaaaaactgaagcttttccagagcttcctgcaaaggtactcatcatcaattgtgccatccaaattgaagttcaaatttccactgccaagatgatcaaactccggtcagctctaggcgttcttgagatcttgtcagttctttgcatcagccttgttgctgcatacactccagtagacaactacctcatcagctgcggctcatcggtcgacacgccggttggccagcggctgttcgtcgccgacgactcgggcacggtcgtcctgacatctccggcgagtgacgcggtgaaagcctcgcccagcgcggtgtccgggttgcgcgacgacgccgccatgtaccagagcgccagggtgttcatggcgccgtcgtcctactcgttccggatcagggaccccggccgccacttcgtccgcctccacttcttccccttcgtgtacctcggctacgacctcgccacggcgagcttcaaggtgtcgacgcaggacgccgtcctgctcgacggcttcgcgccggcggcggcggcgaggggcaacgcgtcgacgacgacgacgacggcgacggcggcggcggtgtgcgaggagttcctgctggacgtggcgcgcgacacgctcgtcgtcacgttcgtgccgctcgccggcaggctcgcgttcgtcaacgccatcgaggtcgtctcggtccccgacgacctcatcggcgctgctgactcgtcgctgtcgacgtccgactccactggccagcagctcaaccctgccgtgatgccgctgcaaacggtctatcgggtcaatgtgggcggccaagcggtggcgcccgacagcgacacgctctggcgagaatggactagtgaccagcaattattggttggacccgcaatgactaaaggagtttcttacaatcgaacaccgaactacctgcccgggcaagcgacggcgaacgacgcaccggccatcgtctacgccaccggcagggagcttatcatcatgacgaactcgacggacgacggcatgaaacaaatggcgtggcagttcgacgtcggcaggtcggcgagctacctgatcaggttccacttctgtgacatcgtgagcagcgtgcctggccgcctccacatgaacgcctatgtcgacagctccaacgcgattcaagatctcgacctctccgccattggcaatggcacgctggcgttcccgtattacagagacttcgtgctggctgctagcactccatccggcaagctcgccgtctacgttgggtcgacgtcgcagaagatcacgacacctgccgccattctcaatggcctagagatcatgaggatactcacgaccgccggcaacgtcgccgtcgtcgagccaacgatgccgccgggaacgaagaagaagaacaatttggccgtcgttcttggctcagtctgtggagctttcggtttcgtttccgtcgccgctgctcttgtcattgttcttaggaggaaagaggagaaggaggagctgcggacgccgacgacgagccagccgtcgacggcatggatgccgctcctcggccggatcagcttccgcagcgcgccgccgagcgccgtcgggtcacggtcgcccagcttcaccattgacaccaacgccaacactccaggaggaggcgccactcccggcatggccgcggcggcctcgtcttccccgagctaccgcttcccgttcgccgcgctgcaggacgcgacgggcaacttcgacgagggcctcgtcatcggcgagggcgggttcgggaaggtgtacgccgccgtgctccaggacggcaccaaggtcgccgtgaagcgcgcgaacccggagtcgcggcagggcgcgcgggagttccgcacggagatcgagatgctctccggcctgcgccaccgtcacctcgtctccctcatcggctactgcgacgagcaggatgagatgatcctgctctacgagtacatggagcacggctcgctgcggagccgcctgtacggcggcggcgcggcgacggcgacggcgacggcgctcagctgggcgcagcggctggaggcatgcgccggcgcggcgagggggctcctctacctgcacacggccaccgccaagccggtgattcaccgcgacgtcaagtcgtcgaacatcttgctcgacgacggcctcacggcgaaggtcgccgacttcggcctctccaaggccgggccggacatggacgagacgcacgtcagcacggcggtgaaggggagcttcggctacgtggacccggagtacgtgaggacgaggaagctcaccgccaagtccgacgtctactcgttcggcgtcgtgctcctcgaggcgctgtgcgcgcgccccgtcgtcgacccgaggttgcccaagccgatggtgaacctcgtcgagtgggggttgcactggcagcggagggacgagctggagaagatcgtcgaccggcggatcgccgggacggtgaggcccgccgcgctgaggaagtacggcgagacggtggccaggtgcctcgccgaccgcggcgccgaccggccggcgatggaggacgtcgtgtggagcctgcagttcgtggcgcggctgcaggaggtggacggcctcgacgcctccgacgtgagcagcctcaacatggttcatcagctgatgccgccgacgagcttgcacgctcgtcagagaagcgccggcgaaagcgagaccggcaggacggacgccgacgaggacagcagtgtggtagatgatgattacaccgatgcttccatgagaggaatcttctggcaaatggtcaatgtgcgcgggagatgatactgatcagtcatcttcaaacattccagatcatgaattagtcatcttcagactggtcagttcattgttgaacattccaggtcaaaattcacctctccagtatccagtcggaaaaagtgaacaaagacatacttagaattt

SEQ ID NO: 24399 - DNA, 1507 bp, Oryza sativa
  ref <308>: DATABASE ACCESSION NUMBER: AK099841
  ref <309>: DATABASE ENTRY DATE: 2002-08-28
gcaagaagaagctcatctggttcaacggcagaaagatctagagtatgaggctgagtttgagcagagcgcgtccaaaagcaaggatggtcttgacaaagatgctatcagcaagaggcttgaggagatatacaaacgccttgagtttattgatgctgatgctgcagaggctcgtgcagcatcaattctggcgggtcttagtttcactcctgaaatgcaacgtaaacgcacaaaacagttttctggtggatggcgcatgagaattgctctagcacgtgctctcttcattgagcctgatttgttgctacttgatgagccaacaaatcatcttgatctccatgctgtgttatggttagaaacatatctcctgaaatggccaaagacattcattgttgtatcacatgctagggagtttcttaatacggtcgtcaccgacattcttcatctgcatggacaaaagctacatgcttacaaaggtgattatgacacattcgagaggacaagggaggagcaccttaagaaccagcagaaagcttttgaaacaaatgagaaggccagatcccacatgcaggcattcattgacaagttccgttacaatgcaaagagagcatcacttgttcaatcaagaatcaaggcattggagcgaatggagcatgttgatgcggtcgtcagtgatccagactataaattcgaatttccaacaccagatgaccgccctggaccaccaatcatcagcttcagtgacgcatcttttggttatcctggaggccccaccttatttaaaaacttgaattttggtattgacctggacagccgcatagcaatggttggtccaaatggtattggcaaatccactatacttaaactaatatctggagatcttcagccaacttcagggacagtgttccgctctcccaaggttcgcatggctgtattcaatcaacaccatgttgatgggcttgatttaacagtgaacccccttttgtacatgatgagatgctaccctggtgtacctgaacagaaactgagggcacacttgggttctttcggtgttacaggaaatcttgccctccaaccaatgtacactttatcaggtggtcagaaaagtagggttgcctttgcaaagatcaccttcaagaagccacacattattcttctcgatgagccttctaaccatcttgatctggatgctgtggaggcgctgatccagggtttactcgttttccagggaggagtgctaatggtgagtcacgacgagcacctgataacggggagcgtggatgagctttgggtggtgtcggaaggcagggtgtcgcctttcgcaggcacgttcaaggactacaagaagatgctcaagtcttaatctagagccagtgatgatatatatacagagacagcgagtctacaaagaaagacaccaacatatatatctgtatcgtgcagcaccgatgtaacatttaccggcctgaggccaaatcatcatttatgtttatttcatgtggatttactg

SEQ ID NO: 24400 - DNA, 2527 bp, Oryza sativa
  ref <308>: DATABASE ACCESSION NUMBER: AK099842
  ref <309>: DATABASE ENTRY DATE: 2002-08-28
ggtgagccgcattaattttttcgaatccaagaaaaaaaaaaagaaagcaaaaatggccaccggtagccttggcctctccacctccttcctccccggccacgacaccctcctccgccgccgccggcggcggccgccggcgacgacggcggcgtcgttccgcccggtgacggcggagctcggcggggagctggggcggcagctggtggaggcggtcggggtggggctcccctgcacggtgatggcgtgcggcgacgtcatctaccgcagcacgctcccccgcaacgacgggctcaccatcaccgcccccggcgtggcgctcgccctcgccgccgcgtcctacctctggtccacccccggcgtcgcgccgggcttcttcgacatgttcgtgctcgccttcgccgagcgcgtcttccgccccaccttccgcaaggatgaattcgtgctcgggaagaagcttggggagggcgcgttcggagtcgtctacaaggcgtcgctggatgaccccaaagctgcggagaagcaaggtgctgtggttgtgaagaaggcaacagagtatggtgcggtagaaatatggatgaacgagcgtgtcaggagggcctgtgctagcagctgtgcagattttatttatggctttcgtgagagcaaagctaaaggtaagggagctgatgaatactggcttatttggcgttatgaaggtgaggatacactattcgatctcatgcaaagcaaggagttcccttacaatgtaagtgttgccatacaaactgaaaaatagtttcaggtcggtcaagtttgttacattcttgcttccattggctccagttgaacagttctttttttcagttaatgaaataatcagatgagtttgtattactagtgacattattctcattgcaatcttttcttgctgtcatttatctagattgattttggaagggggtaattaagcctctcatttaaatcatgttaaaaacttaaatcaacagatgcgataaacaaattgaattagtatgacctacaggattagttcatcttcaatcaacatttatcatttcaaatttgtttgcggtttatcaggttgagactaagattctaggagatgttcaagacctgccaaagggaatagcaagagagaataagattattcaaacagtaatgagacaactgttatttgctcttgatggccttcattcgacagggattgttcacagagacgtaaaaccccaaaatgtgatattttcggaaggatctcgtacgttcaaaattattgatcttggagcagcagctgatttgcgagtgggcatcaactatattcctagtgagttccttttagatccaaggtatgctgcaccggagcaatatataatgagcactcaaacaccatctgctccctctgctccagttgcaactgctttatctccagtcctttggcagttgaaccttcctgacagatttgacatatatagcctgggccttatattcttacaaatggcatttccatcattgagaacggacagcagcctcatacaatttaaccgccaactgaagaggtgcaactatgacttagaagcttggaggaatttggtagagccacgagctaccccggagctccggaggggctttgacatcttggatttagatggtggtattggatgggaacttctcacatcgatggtccggtacaaagcacggcaaaggactggtgctaaggctgcactggcgcatccatatttcaaccgcgaggggctccttggcctctctgtaatgcaaaacttgaggctgcaactgcttcgtgcaacccagaaggactacagtgaagcagcccgttgggtcgtcggcctcatggcaagatcaggaacagaagcagaaggaggttttacagaggcacaacttcaagagcttagggaaatcaaaccaaagaaaggtagtgcacggaggaacttgcttgcttccgtgctgcgtgtacagagaaaggtcgtgaggacaatcaacgaaagcatggatgagcttagcagccagagcaaaagcatttggtggagccggtggataccaaaggaggagtaggcagacgcagctctgtccctctgtgcatcgcccatttcttctgtagaaacctcgccatgtagcaatggtaatggtacagcctacttacttccctacctctggtgagtacaaatcgtcgttccatcggaaaaagaccacaatagcatataccgatgtccaaataggtgtacatatatttgacatggaaccaaaattttcagagacccttatgataagttcataacagatccactgtacttgattaacctgtgattgattgttgctcggggagtgtgttcatcatgtggtagtacaagaaacccatggcacaggtggtcgtaatgattaatgaatcctcataataagtggaactgaccctcgtgaaggctgatggagtgatgagtgaagtttgtggttgtggcccagttatgccatgttgcccttctcttctattgcatttatccgagtgtcctccatatgttcc

SEQ ID NO: 24401 - DNA, 1981 bp, Oryza sativa
  ref <308>: DATABASE ACCESSION NUMBER: AK099843
  ref <309>: DATABASE ENTRY DATE: 2002-08-28
gaggtggccggaatccatccatcgcgagagcagagggagggggatcgcggcggcggcggcagctgcggcgaagggggaagcgccggaacgggagccgtggagcgatccgtcgggcatcggcgcccgatgtgggcgtggggcctcgtcgagcgcgccgccgcgggcctcctcggccccctcggcggagcccatggcggcggccgatggaacaccgccgtcgccgtcggtgtcacggccgccgccggcctcgtgctcgtcgtgatcgttgtctcctcccgcagaggtgggctcaaatcgccgtggtggcggcggcggaggaaggccgcgcttaagccccatgaatgggtcagcttgttcacgccggaggggaagcttaaggacggcggagtgaagcttctgaagaaagttcgaagcggagggattgagccaagtatcagagcacaggtctggccattccttctgggagtttacagtcttggtagttcagaatctgaaagagacgcggttaaggcacagaacaggaaaggttatctgttattgaggaaccattgcctgcgaaaatctgtctacatcaatgaagagaacaaacaatcaaatgaagccgctggagccaaacatgtggagtgtgttagttctgaaaaaggcgaagacactgtcaatccagctggatctgaagaagtacctgataaatctagtgtagaagagcatcttgttggcgatgacactgttggtcccgttgtatctgaagaagtggctgaaaaatcttttgtcgaagatcatcttgttagtgaggaggaaaatccatctgccaatccaggagaagaagtgcaggatgacacatctaaaacaagccctgagaagctgacagatggaaatcattcttcatctagttcatctagtgaggaagaaagtgaatcaagtggcctgactcatgtagaaacatctcatatggttgtcgcctcagttcagcaatctttaactgaggatgaacaagaaagtatcccgagatattccaacacaggaggaaacatggaaaatgatagcgagttatctaaggctgctcgtcctgtgaaatctgtacgcacaattgaggattttgagacttggcaacgaattatccgcttggatgcagttcgtgctaatgatgaatgggtttcttactccccatctcaagctgtagtttccagggagaaggcaattgaatctgctaaagctgtttgtctgaaagattacgaacatttggaaccacataggatccgtcatgcagcacgccttgttccaattcttgaggcttatgccatctatgacccagaaattggatattgccagggcatgagcgaccttcttgcacctctacttgccgtactggaagatgacaatgaagccttctggtgctttgctggttttatgaggaaagcccgtcataatttcaggcttgatgaagtgggcattcgcaggcaactgaacatggtagccaggataatcaaatacaaggacttccatctttacagacatttggagatgctccaagctgaggactgcttctttgtttacagaatggtggtggtcatgttccgaagggagctgacctttgagcagaccctctgtctatgggaggttatgtgggccgatcaggcagcaaaccgtgctggaattgcaaaatcatcgttggggaaactgcggttaggagcccctccaactgatgacttgctactatatgcaattgcggccagcgtgctgcagaagaggaaactgataatagagagctatagcagcatggatgagatcataagggagtgtaacagcatggctgggcagctggacatttggaagctcctggacgatgcgcacgatctagtaacgacccttcacggtaggattgagtagtgatatactgatacactctactcattttgtacacggcttgttgtattactttacacattttcatccttacgtcatatttcatctctttttcacc

SEQ ID NO: 24402 - DNA, 2342 bp, Oryza sativa
  ref <308>: DATABASE ACCESSION NUMBER: AK099844
  ref <309>: DATABASE ENTRY DATE: 2002-08-28
gagcggtagcagcaacctcctcgacgtcgcgctcgggctcgatcccaaccggagaggaggatggcggcggcgccgccgggagggcaggagaaggtgatcgcggcggcgcagcacatcgtcaagtcgctcgccaactccaagaacgccgccgacgacatgatccggatactctccgggttcgacgaccgcctcaccttcatgtccgacctcttcccgcctccccctcccgccgccgccgccgtgagggagccctccgtcgtggaggaggaggaggccggccccgatgacgcgcgggaggacgaggtggaggaggcggcggagttggtggagcggtgggattctccggaggagggggataggctggtgttcgattcggcgaaggacgcgggggattacctgggcgctgcaggcggcgatggcgcggctggaggacgagttccgccacctgctggcccgcgggatgtcgccgctcgccggggaggacctgcacgcctccctcctccgccgcctctcgctcacggtgccgtccttcgcctcctccgcctctgacctcgattgcccctccttcgccagccacaccggcgacggggacgagtccggcggcgcgggcggcagggcctccgtctccgacgaagagatctccccgtacctcatctccccggacaccgtcggcgccctcaggggcatcgcggacgtcatgctgcgcgcaggctacgggccggagctgtgccaggtctacggcgagatgcgccgcgacacgctcatggagtgcctcgccgtgcttggcgtcgacaagatgagcctggaggaggtgcagcgcgtggaatggggcgtcctcgacggcaagatgaagaagtggatccaggcgctcaaggtcgtcgtcagggggcttgttgctgaggagcgccgcatctgcaaccagatctttgccgccgatgccgaagccgaggaggattgcttcactgaggcagccaaggggtgtgtcctgcagctgctcaactttggtgacgcaattgcaatcgggaagagatcgtccgagaagctgttccgcattcttggcatgtatgaggcgctggatgaggtgttgccggagctcgagggcttgttctcaggtgatgcaagggatttcatcaaggaagaggctgtggggatactcatgaggcttggggatgcggtgcgtggcaccgttgcagagtttgcaaatgcaatacagggggagacatctcggagagcgttgcccggtggggagattcacccactcacgcggtatgtcatgaactatgtccgactgcttgcagactatagccgctcactgaaccaacttctcaaggactgggatactgagctagaaaatggaggtgacaacgtgaatatgactccactggggcagtgtgtgctcatactgatcacacatctacaggccaagatcgaggagaaatcaaagctgtatgaggatgaggcacttcagaacatatttttgatgaacaatctgctgtacattgtacagaaggtgaaggattcagagctgaagaccttgcttggcgataattggatccgccagcgtcgtggtcagataagacggtactctacagggtaccttaggtcctcatggacgagggtattagcttgtcttagagatgatggattgccacagacaatgggttcatcaagtgcactcaaggcttcactcaaggaaaggttcaagaactttaacttggcattcgaggagttatacaagacacagacaacatggaaggttgtggaccctcaattaagagaggagttgaagatttcaatctcagagaaagtccttccagcatatcgttcttttgttggaaggttccgaggtcagctagagggtggaaggaattccgcaaggtatataaagtacaaccctgaagatttggagaatcaggtctcagatttttttgaaggcagaagaccaaatgcttgatcgattagtcatgtttgatggttaagggatgtttatatcaatgattttagttacaactccctcatgaatttcattggtggcgctatattggtagcttgatctgcaaagacctttgataatccgaagatggaaagaaaaatcagttttgcctgtagaagaagcagtgtgaactgcaagcaaacagaattttttggtattgcgaagcaatcggaattggatacctagcttttgatctatcaaggtgctgactatatcaaggttcgacatgaaatttaggacactggacactaccatgagctgtgtaattcttacatttttttttctcatcttttgttgattgtaacatctcgtgacttgtttgacatcgaaagaatggttggtgcttggc

SEQ ID NO: 24403 - DNA, 3725 bp, Oryza sativa
  ref <308>: DATABASE ACCESSION NUMBER: AK099845
  ref <309>: DATABASE ENTRY DATE: 2002-08-28
ggcgagaaccaccacaccctcccgccatgcactgcctcgccccccacttcctcctcttcctcccactctcctccgcctcccgccacgcgctcccccacaccccacccgctcctctcctcctcccctcccacccagcccaagcccaagcccaagcccgcgccggcccgctccgcctcccatccgcgcgctccccttcccgcgccgctgcccccgtctccgacgacgacgaggacgaggaggatgacgaagagatagacatccgcgacgacgcggacgtggacgaggagtacgacgacgacgacgacgaggagctggacgaggagagcggcggtgaggaggaggaggaggaggaaggggatgatggggtggaggagttggaggaggaggagggtgggcgggaggggaccgctgcgcggaggcggcggtcggaggagtacaagtcgcagcgggtggggaagctggtcgccgaggtgcgggagttcggggaggatatcatcgactacaacgagctcgcggggatctacgacttccccattgacaagtttcagcgcttggctatacaagcatttttgagaggctcatctgtcgtagtttctgcacctacaagtagtgggaagacactaattgcagaagctgcagctgttgcaacagtcgctagaggaagacgcctcttctacacaacaccgttaaaggccttatctaatcagaagttccgtgatttccggaatacgtttggtgatcataatgttggtcttcttacaggagattctgctattaacaaagatgctcagatcctgataatgacaacagagattctgcgtaacatgctgtatcaaagtgtcggtatggcagcatcagaaggtagattatttcaagttgatgttattgttttggacgaagtccattacttaagtgacatttcacgtggcactgtttgggaagaaactgtgatatattgtccaaaggaagtccagcttatatgcttatcagccactgttgcaaatcctgatgaattagctggctggattggtcagatccacggtaaaacagagttggtgacatcacacaaacgaccagttccacttacttggcacttctcaaagaagtttgcacttgtaccacttcttgatgggaaaggaaagaaaatgaataggaaattgcgaatgtctcacttccagaacctatcttctccaaaaagtgaattctattatgtgaaaggaaagaggaagcttagaacaactaaaaatgaacaaggtaacagaagccccttggacatctcaaaacaggttcagttgtcaaagcatgagctcaccaatatgcgccggtctcaagttccattaatacgtgatactttatcacaactttgggaaaatgacatgcttccagctatttggtttatttttagtagaagagggtgtgatgcagctgttgaatatcttgaagattgtagacttctgcatgattgcgaggctagtgaagttgagctggaacttaagaggttcaggatgcaataccctgatgctatccgggaaagtgctgtgaaaggactcttacgaggagttgctgcccatcatgctggttgcttgccactgtggaaatctttcattgaagaattatttcagcgtggccttgttaaagtagtctttgcaacagaaacccttgcagcagggattaacatgcctgctagaacatctgtgatttcttctctcagcaaaagaattgacgctgggcgccagctcttaaccccaaatgaattattccagatggcaggtcgtgctggacgaagagggattgatacagttgggcattctgttcttgttcagactacttatgaagggcctgaagaatgttgcgatgttatctttgctggacttgagccacttgtttcacaatttactgcatcatatgggatggttttgaatctccttgctggctcaaaagttactcataatcagaaagaatcggatgatattaaggttaagcgttctggaagaactttagaagaagctcgaaagttagttgagcaaagctttggtaactatgttgggagcaatgtaatggttgctgctaaagaagagcttgaaagaatacagagtgaaatacaatatctctcttcagaaattacagatgaatccattgaccgaaagtgtagggaagaattatctgaggaagactatgctgagatttcccttcttcaaaagaaattgaaggaagagaagcagatgagaaatgaactgaaaaaaaggatggaactagagagaatggtggcatggaaaactcggttggaagaatttgaaagtggtcaccttcctttcatgtgcttgcagtacaaagacaaagattcagttcagcatactattcctgctgttttcattggaagcctcagttcatttgcggatcaaaagattgtgagcttggtggaaaatgattctcctgttgctggcaagcagaaagttgacaatgaaggacagcaatattacccatcttattatgtagccttgagttcagacaactcatggtatctattcaccgaaaaatggattaaagctgtttacaagacaggtctacctgctgttccttcagcagagggaggccctctccctagagaaaccctgaagcagctccttttgcgtgaagatatgatgtgggataaaattgcaaaatcagaatatggttctttgttatgcatggatggatctctggacacatggtcgtggagtctcaatgttcccgtgcttaatagcctttcagaagatgatgaggtagaacgattctcccaggaacatcaagatgctgtagaatgtcataagcaacagagaaagaaagtttcacaattgaagaaaacaatcaggagtactaagggtttcaaagaatttcaaaagatcatcgacatgagaaactttacaaaagaaaagatcgagcgtttggaagctagatctcgtcgtttgactcggcggataagacaaattgaaccaactggttggaaggaatttttgcagattagcaaagtcatacaagaggctagagcattagatatcaatactcaggtaatctatccgttgggtgagacggcagcagccatacgaggggaaaacgagctctggcttgccatggttcttaggaacaaggtccttttggatctgaagccttctcaacttgcagcaatatgtggaagtttagtgtcagaagggatcaaacttcgtccctggaaaaacagcagttatgtatatgaaccatcttctgttgttactggtgttataaactacttagaagagcagagaaactcactcgtcgatctccaagagaagcacagtgtaaagataccctgcgaaatagatgcccagtttgctgggatggttgaagcctgggcatcagggttgacctggagggagataatgatggactcggcaatggatgatggagatttagcccgtctgctcagacgcacgattgatttactagcccagattccaaaattgccagatatagatccggttctccaaaagaacgcacaaattgcttgcaacatcatggaccgggtaccgataagtgagcttgctggctgaaagtatgtgaaatctgtaagtaccacattgaatgtgaaatctgtaagtaccacattgaatgtgaaatctgtaagtaccacattgaccatttgttttaggtaggcaattctttgttgtatcatgcacatgcagttatcaaattgacagagatcattttcc

SEQ ID NO: 24404 - DNA, 2864 bp, Oryza sativa
  ref <308>: DATABASE ACCESSION NUMBER: AK099846
  ref <309>: DATABASE ENTRY DATE: 2002-08-28
ggtcaactccagctcggcttctcctcctcctcctcctcctcccgcggcgtcgacgacgacggcgaatggcccagcgccgccaaggatcgcagcgccaagaacaagcttggtgggttgcggagggtgctcgggactggtgcggcgaggggtccgacgatggggaggagggcgaggaggaggaggaggacggggtgctgtcggcgttcctgtgcccgatcaccatggaggtgatgcgggacccggtggtggtggagacgggccacgcgttcgagcgggaggcgatcgcgcggtggttctcggagtgcgcctcgctcggcgcggcgccgcggtgccccgtcacgatggaggtggtcgacggcgcggacgtgaagcccgtcgtggcgctgcgggcggccatcgaggagtggacgagcaggcgggagacggcggcgctccggagggcgtgccggtggctcaccaaggccgcctcggagaaggaggcgctgcgcgggctcgacgccgtgatgcgcgggtggaagcttgcgagggtcggcaagcgcgtcgtgcgccgcgacgggatggtgcccatggtggccgccatgctgaggaacggcagcgcaagggtgcgtctcaaagcgttgcaagcccttcgggagtttgcaagagaggacgatgaatacagggattctgtatctgaaggggacacaattcgcaggattgttaagttcatcgatttcgaggattgccaggagagggagttggctgtatctcttctgtgtgagctgtcgaaatctgaaatggtatgcgaaaagataagcgaattgaatggagcgatacttatcttgggcaaggtggcatgtagcaaatcacagaatccagcgttagccgaggaggctgagatgacgcttgagaatctggagaaatgcgagaaaaatgtcctgcaaatggctgaaaatggaagactggaacctctactaaacctgcttattgaaggttctccagaaaagcagttgcggatagcatcatctctagaaaagattgttctgtctaacgacttgaaaaacttggtggcccaaagagtgggtttactgtttgctggtgttgttgaaaatggtaccttgccggcaaaagaagttgctttcaaggtgttagatcatatatccaccaatacagaaagtgccaaggttcttatagaggatggaatccttttaccgcttttccgagttctctctgttgatggtgtcaaattccttccaccaaggctgcaagaggccgctgcagcagttctatctaatctggtagcttgtggtattgactttgggacagtcccactggatggtaatcgtactatagtgtctgaagacattgttcacagcttacttcatttgattagtaacacctctccgccaatacagtgcaagcttcttgaaatatttgtaatgctaagtagttctaccacaacagttctgtcaattatctcagctataagatcatctggggctatcacaaacttggtacaatttgtagagagtgatcatcaggagagccgtgctgcttccataaagctgctgtgcaaaatctcatttgacatggaccatgagatagcacaagtcctccgaagtagtcctacattgcttggatgcttagttaggattgtcagtgaaaatgatgcaaatgcagatgagcaagatgctgcacttcagattctggcaaatcttcctaaaagggacagacgtcttaccatggagctcatggagcaaggggctttcaaatatattgcgcgcaaagttttaaacatatgtagaagaggaactgccaataacatagttgataacacgatgcttgaagggcttgtaaaagttctggcaaggataacgtacattctacgggaggagccacgctgtgttgcccttgctcgtgaatacaatcttgcttcactgtttaccagcttgcttcggctgaatgggctggatggtgtgcagctgctctctgcaaaggcattagtgaatctctctgttgaatcaagatatatgactggcacaccaaatttcgatgaacatgaacagaagtctgggcttacctggtttggtaagaaaccaccaggtattcaactttgtcgtgttcactctggaatctgctcgattagagacaatttttgtattcttgaagggaaggcagtggagcgattggttgtttgtcttagccatcaaaacaagaaggtcgttgaagcctctttggctgcactttgcaccctacttggggatggcgtggagatcactgaaggtgtttcggtgctctatatggccaatgcggttgaaccaatatttgaaatcttgaagggaaacccaacaggcacacttcagcagagggtgacatgggctgtcgagaggattttgcgggcagagaacattgcaaaagcagcttcaagcgaccgtggcttgagttctgcccttgttcatgctttccagaatggggattccagaacacgacgtatcgcagaggcatcactgaagcacattaacaagttgccaactttctcccaaatcattgataagcatccctcgagacgaggttcgtcaattggaagcatggagcgttactttaggtctgatcgctaggctatgaaattgtgaagtaaccgaatgccatgacctgcctatgccttatggacaaggaatttttttgccatttcaagttaattttgttgatttgctaacgtttggaattagggattttagtttttgtgtcagaaaaaaatagtagttaggcattgatagtcttggtaatgtgcatattgttctgtacttgtaataaattttgtagatcatgtgtatatattgttttctgtacttctaattttgataatctgcaagtctaatgaaggc

SEQ ID NO: 24405 - DNA, 2227 bp, Oryza sativa
  ref <308>: DATABASE ACCESSION NUMBER: AK099847
  ref <309>: DATABASE ENTRY DATE: 2002-08-28
ggtggccacaccagcgccccaatggcttcccccctcgccgtcttccaccccgcctccgccaccgccgccgccgccgctcgccgtcaccaccccccgcgcccgccgcacctgcacctccacctcccgctccaccaccagccttcgtcgccccgccgcaggttcgctgccgagttcgcggtcggcggtgctgacggtggcaccggcggcggcggcgggaggagggcgaggggaggcggtgacgtcgatgtcgccgcggtcggcgcggcgctgcgggacgccaggacggccgacgaagtggagaccctggtgaagggcttcctggacgacggtggcggcggcgaggagcacctgccgctccaggtgtatacctcggtgatccgggggctgggcaaggagaggcgcctcgacgccgcgttcgccgtcgtggagcacctcaagaggggaagcgggagtggcggcggcggcggcggcgtcaaccagttcgtctacaactgcctgctgggcgcggtcaagaacagtggggaatttgggaggatccacgatgtgcttgcagacatggaggcacagggggttcccccaaacattgtgacattcaacactctgatgtcaatctatgtcgaacaaggcaagattgatgaggtcttcagggtgtttgacaccatcgagggcagtggcctggtgcccaccgcggcgacatactcgacagtgatgtcggcctacaagaaggctggcgatgcattcgcggcactcaagttcatcaccaagctaagggagatgtacaacaagggtgaattggcggtgaatcatgaagattgggaccgagaatttgtcaagtttgagaagctgactgtccgtgtctgctatatggcgatgcggcggtctcttgtgggtggtgagaatccagtaggtgaggtgctgaaagttcttcttggcatggatgaagctggggtgaagccagacaggagagattacgagcggcttgtgtgggcatgtacaggtgaggagcattacaccattgccaaggagctgtaccaaaggatccgtgagcgtggtgatggcgtgatcagcttatctgtgtgcaatcatctgatttggctgatgggcaaggctaagaagtggtgggcagctcttgagatttatgaggatttgttggacaaaggccccaaaccgaataacttgtcgtatgagctcatcatgtcacatttcaatattctactcaatgctgcaaagagaaggggcatttggaggtggggtgtaaggctgcttgataagatgcaacagaagggcttgaagcctggaagcagagagtggaatgccgtccttcttgcgtgttctagagcagctgaaacatctgctgcagtggatatatttaagagaatgatagatcaagggttgacaccggatgtagtttcttacggagcgctgctgagtgcgcttgagaagggaaagctgtatgatgaggcactccgagtttgggaacacatgtgcaaggtaggcgttaagccgaacctacatgcatatacaatcttagtatcaatttacattggcaaggggaaccatgctatggtagattctgttcttcgtggtatgctgtcagcaaagatagaaccaactgttgttacgttcaatgcgataatcagcgcatgcgtgagaaacaataagggtggctctgcttttgaatggttccataggatgaaagtgcagaacattgagccaaatgaaattacatatcagatgttgattgaagctcttgtacaagatggtaaacccaggcttgcctatgagatgtacatgagggcttgcaaccaagggcttgagcttcctgcaaaatcatacgacactgtaatggaggcatgccaagattatggttccctcatagatctaaattctttggatcctcggcctgttaagaaagtggaacccatcaggatagagaacaagttttcgagtagttattatgttggggatcttcccagcagcacaaaacattttggtagcactggaacatctagtttatatagatacagaacggaaaggtggatcatgtagcattcggccccctcttttttctgaacacttcaaactcactccaagtctccaacattgagaacacactgatatttgtttgtaagttgcctaacttgtaatttgtaaacattcaatcattatacagtagtgaatttgttatttgctttatacggagtagaaagtagaaggagattgcccc

SEQ ID NO: 24406 - DNA, 1936 bp, Oryza sativa
  ref <308>: DATABASE ACCESSION NUMBER: AK099848
  ref <309>: DATABASE ENTRY DATE: 2002-08-28
gcattcaattctcttctcaactcgacggccatcttcttctttctctctccactccgtcgccgccccttggcctccctcaacggccaccgcgcccctcctccgccgccaaatcgcacccaaccccttcccctttaaactattccacctataaggccgcgccgccgccgccgacgagagagacggccatgacctcaggtggccgtagctctccggcggaaggcggcggagatggcttccacggccgcggcggcgtcgtcgcaggggtgcatctcgtgggcgctgcggcagcgtgggcttggtggtggtggtgcgcgggctgtcccggtgcttccccgccggagattctgcgtctccgcggcggcgggtgcggggttcgacaacgagaatcgcgagtatgtgatcgtgggtggaggcaacgcggccggttacgcggcgaggacgttcgtcgagcacggcatggctgatggccgcctttgcatcgtctccaaggaggcgtatccgccatatgagcgaccagcactgacaaagggctatcttttccctccagacaagaagcctgctcgtctacctggctttcatacctgtgttggatcaggtgggcagaggcagactgctgaatggtacaaggagaacggcatagaggtattgtatgaggatccagttgtagcgtttgatggcaaaacacataccttaaaaacttcatcagggaaaattctgaagtatgggtcacttattatttctactggctgtgaagcttcaaggttacctgctaagattggaggaaatttgcctggagttcactatatacgtgatgttgctgatgcggattctctagtatcttcattgggaaaagcaaagaaaattgttgttattggtgggggctatattggcatggaggtagcagcagcagcttgtggctggaatctcgacacaactattatattcccagaggaccacattatgccaagactctttacaccttcccttgctaagaagtatgaggaactgtatcagcaaaatggtgtcaaattcattaagggagctcttattgataaacttgaagctggctctgatggtagggtgtcatctgcagtacttgaagatggatctgtagttgaagctgatacagttattgttggtataggagcaagaccagttattggcccatttgaagctgttggggtcaacactaaagttggtggaatagaggttgattccttgtttagaactagtatacctggtatctttgctattggagatgtagcagcttttcccctcaagatgtatgatagaatgactcgagttgagcatgtggatcatgctcggaagtctgcacaccactgtgttgaagcactcctaacatcacacacatagccgtatgactaccttccatatttctattcaagagtttttgagtacgaaggaagttcaaggaaaatttggtggcaattttacggtgataatgttggcgaaacaattgaagtgggaagctttgaaccaaagattgctaccttctggattgactctgatagtcgactgaagggtgttttccttgagagtggtagctcagaggaattttcgcttcttcctcaactcgctaagtctcagcccgttgtagacaaagctaagctcaaaagtgcaacctctgtcgaggatgccttagagatcgcaagaagctctctccactctggttcttctgtttagctctcaagcatctagaaaaattcagtttgtgtcctgttacatcttttaaaacaccgagacttcaacaataattctccacaatcccacggcattcgtttatgcgggattgtaaaattcttagatgtacctacgttcgcatttccaatttgaaataaacttggttgccctttgaggggtttgataaagatatgataatgaaacccatggaatgttactttctctcattctctcc

SEQ ID NO: 24407 - DNA, 974 bp, Oryza sativa
  ref <308>: DATABASE ACCESSION NUMBER: AK099849
  ref <309>: DATABASE ENTRY DATE: 2002-08-28
gtatcgaattcaacacgaaaaacaaccaaagcagcaagcgaagccgggacactgctggagtgagcaaatccccgctcgaatccggggcaccaagaatggccatggcggccgtgggcaggtggcgcggcggcggccgctggtggcggtggtgcgcgcgtcgtacgaggccggggtcggggtgatggcgaccaaggtcgggatgatgacctacttcgacccggccaccggcaagccggtgccggtgaccgtcgtggggttccgggagggcggcaacgtggtgacgcaggtgaagacggcggccaccgacgggtacgacgccgtgcaggtggggtaccacggcgtccgcgaggagaagctcacccgcccggagctcggccacctcggcaaggccggcgcgccgccgctccgccacctgcaggagttccgcctccagtccgtcgacgggtacgaccccggccagccgctcgacttcgccgacatgttcaaggagggcgacctcgtcgacatctccggcaagtccatcggcaaggggttccaaggtggcatcaagaggcacaacttcaagcgagggctgatgacccacggctccaagagccacagagctctgggatcgatcggtgccgggacgacgccgggtcgggtgtacaaggggaagaagatgcccgggaggatgggaggaaccaagaccaagatcaggaagctcaagatcgtcaagatcgacaacgacctgaaagttgtcatgatcaagggcgccgttccagggaagcccgggaacctcctccgcatcgctcctgccaagatcgtcggcaagaacatccccaagaactagactatttttctcatgtgtttcgtcctgttctgtgagatttgtgatctgttgtttactgaattactgtaaattggagatgttctttgcccatgtccaggttttgtatacgcgtaactttgaatttcgtaaagctaattttttttct

SEQ ID NO: 24408 - DNA, 1607 bp, Oryza sativa
  ref <308>: DATABASE ACCESSION NUMBER: AK099850
  ref <309>: DATABASE ENTRY DATE: 2002-08-28
gatctcgcgtcctcgcctcgcttcggctctcaccaaccaaaccaacaacctcgctccgatggccgcgccaacgtcgtcgcagccggtggcgcgcgtcctcccccgcggcggcggcggcgggttccgcgccttcccggagtccgccccggcttccctccgcttctccgtcggccgccgccgcgccgctcgcctagaggtgaaggcgtctgcaaatgtatttgggaactacttccaggttgcaacttatggagagtctcatggaggcggtgttggttgcgtaatcagtggatgcccacccagaatcccacttactgaagcagatatgcaagtagaactcgaccggagacggccaggccagagcagaataaccaccccaagaaaggagactgacacttgcaaaattctttcagggacacatgaaggaatgaccactgggacaccaattcatgtttttgtcccgaacacagatcagagagggggtgattacagtgaaatggctaaggcctacagaccttcacatgcagatgcaacttatgacttcaaatacggtgttagagcagtgcagggaggtggaagatcatcagcaagagagaccattggaagggtggctgcaggagctcttgcaaagaaaattcttaagctcaaatctggagtagagatcttggcgtttgtgtccaaggtgcatcaagttgtactaccagaagatgccgttgattatgacactgtaacaatggaacagatagaaagcaacattgttagatgtcctgatccagaatatgcacagaagatgattgatgcaatcgataaagtacgagttagaggtgattcgattggtggtgtggtcacatgcattgcaagaaatgttcctcgtgggattggctctcctgtatttgacaaacttgaggctgaattggcgaaagctatgctttctcttcctgcaagcaaggggtttgagatcggcagtggatttgcaggtactgactacactggaagtgagcataatgatgagttctatatggatgaggctggaaatgtgagaacaagaactaatcgttcaggcggtgtgcagggagggatatcaaatggtgaaattatatacttcaaagtagctttcaagccaaccgcgactattgggaagaaacaacatactgtttcaagggagcatgaggatgttgaacttttagcaaggggccgccacgacccatgtgttgtccctcgcgctgtgccgatggtggagtccatggccgcattagtcctcatggaccagctgatggcgcacattgctcaatgtgagatgtttccactgaaccttgctctacaagaaccagttggctctgccagcagcgtacctgcatttgcaccagatctatcataatgccccctcccccccccccagcttgtttatcatctatcatatttctgggttttctaaggggttcgcagttttgccacaaagcctgtatcctagtttatatctcgagttattgtacccaaggaatccgttatacagtgagcatgaagatagaaatgcgttcatgcgtgttttgtgatatggacaatctgtgcttacatcaggttattttgagcaataaaaatctccatttatg

SEQ ID NO: 24409 - DNA, 1824 bp, Oryza sativa
  ref <308>: DATABASE ACCESSION NUMBER: AK099851
  ref <309>: DATABASE ENTRY DATE: 2002-08-28
ggctcaccactggcgaagatgccgccgtcgatggcggtggcggcggcggcggcggcgccacgcagtctcctcttccccgtctcgccttcaccctcgcagccgcggcgtgtgccagccttggcaagggctggacggagccagaggcggcatgcggcgctggcgaggcccgctcgccgccacctcgacgacgcgatgtccgccgggttcgtccgcagcctcaacgccccgcctgacgaggacggcgcgagatccggcgggaggtacgaccccaggccgggggacttcgccgtcggggtggtggtctccggcaccgaggcccgcctcgacgtcgccgtgggcgccgaccgcctcgccacgctcctcgccaaggagctcctcccgctctaccgcgccgacctcccggccttcgctgaggcggctccgcctcggccggggagcgtgggtgccgtggcgagccccgccgcgggcgagggggaccggaagccgggggagcgcggcgggggcaggacgctggtgccgcccggcacggtggtgttcgcggaggtgctcggccgcacgctgagcggccggccgctgctgtcggcgaggcgactcttccgccgcctcgcatggcaccgcgccaggcaggttatgcagcttgacgagccaattgaggtcaaaatttacgagtggaacaccgggggcctcctcacaagaattgaggggctgagagcattccttcctaagtttgagctcatggacaggataaatacgttcacagacttgaaaaacaaagttggttgcagcatacgtgtgtgcattacaaggcttgatgaagaaactaatgacctgataattagtgaaaagaaagcatgggaaatgacatatcttaaagaaggaactcttcttcaagggatcgttcacaagatttttccgtatggtgctcaggttagaatagctgggacaaacagaagtggattgttgcatatttcaaatattagtcgagggcgtgtcttgtcagtaagtgacatcctaaagatagatgaggaggtaaaagttctggtggtcaagtcaaatgttccagataaaatcgcgcttagcatatctgacctcgaaagtacacctggtctattcctttcagaaaaagcgagagtgttctcagaagctgaggaaatggcagagaggtaccgggagcagcttccagctgactctaagaacgctaaattagatgctgaccttccaggaggaacaattccatttgatgatgaagctacattatacgcaaactggaaatggtttaaatttttggaagatggcaaactaggtgctgtaacaacagaacacaatggcagctgatgcagctttcagggattacatgttgtgagaacaatctggttgctggcttgctgctgaagaaaaatagcatatataagcagcttagcatgaagcatatgaagttgaaccttcattggatgacctggagaaataatggttcttggtgagagcacagcactttccaaagcaaagaaccagcattaacggttctacgagtagcaacatgcagctccatctggcaactgcatcaacaaaagaagcagcaacaaaatttctttgtcggcgtatgccgtactcctatcagcaaagaggaacttctttgtgagcctgtcgttccttggaaaattttgatgcgctgtggaccgaaaatgacacattttgtgaatgtttaatccattagtccaagtagctccgtggagaaaacatcacatttgatagcatccactatttgtacaacttgagttcacttgtatttactatttcaatggaaacaagcaactcaactacctg

SEQ ID NO: 24410 - DNA, 5066 bp, Oryza sativa
  misc_feature (1690)..(1690): "n"=any one base of a, t, c, or g
  misc_feature (1768)..(1769): "n"=any one base of a, t, c, or g
  ref <308>: DATABASE ACCESSION NUMBER: AK099852
  ref <309>: DATABASE ENTRY DATE: 2002-08-28
gcgaggagagagaaactaaacccaacccaaatagggggaggaggaggaggaggcgcaaccaaacccaaccccgccgcctccgccgccgccgccgaggaggatctccgtcgaaggcccaccggagctcagcttgcggggaactcttctagcggctggagtctgatgcgtcccagcccatggcaccccacctccacctccggttgctgctggtcgtcggcgtggcactcgggagcgcggggctgggctgggggggaggaggaggggagggggaggcgacagatcgggaggcgccggacccgtactcgatcctgacgtggcacgactactcgccgccgtcgccgccgccgccgccgccgccgccggtggcgcccgcggccacctgcgagggggacctgcacgggaaggggaacttcagcacccgctgcgaggtctccgaggaggtggagctcggcggggacgtctacatcaccggggagggcagcctcgtgctcctcgccggcgccgccctcacctgccagaggcccggctgcgtcatctccgccaacctctccggcgaggtccgcctcggccgcggcgtccgcgtcatcgccgggagggtctccctcgccgcggccaacgtcacaatcgccgacacggtcgttgtcaacaccaccgcgctcgccggcgatccgcccgagcggaccagcggggtgcccacggggacgcacggcgacggcggcggccacggtggccgtggcgccagctgctacgtcaaggatgggcagacgcaggaggactcgtggggcggtgacgcctacgcgtggtccgacctcgagcacccgtttagctaaggaagcaaagggggctctaccagcgttgagaaggactacggcggaagcggcggcggtatcgtgtggctgtatgccgatgacctgataatgaatggcacagtgctcgccgatggaggggatagcagcgagaagggcggtggtggttctgggggaagcatctatatcaagtctaagactatgcatggtgctggcaagataagtgcttcaggagggaatggtctggctgggggtggtggaggacgcgtttctattaatgttttcagtagacatgatgacacccaagtttttgctcatggggggaagagttcgggctgtccagataatgcaggagctgccggaactctttatgaggctgtacctaagagtcttgttgttagcaacaacaacttgagtacacaaactgacactcttcttttagagttcccaaatcaaccactatggaccaatgtttttgtcaagaatcatgctaaagttgctgttcccttgctatggagtcgtgttcaggtccaagggcaacttagtcttctatccggtgctattctaacttttggtttgacccgttatccatactcggagtttgaattgatggctgaggagcttcttatgagtgactcaacaatcaaggtgtttggtgccttgagaatgtctgtaaagatgcttcttatgtggaactccaaaatgttaattgatggtggtggagaattccaaattagtttccaaccatcgttttactttgattgctttagccaattttatttagttttttaaaaaggaaattcaattcttgttaattaccacttctttaattgccttaattcctttgggaagttttccgttgggttccaaagggttccttgttntggaattttattcctttggaagaaaaggaaagaaccattaaatttgaaaggccaccaaaccgaacctttatttttatnntcttcttatttcttaccagttattaaaaagtttggaaccctgggctcccatttttacggggtccacttgtaaatggaagtagcggtgacgtggcaccaaagctgaactgtgatgatgacatctgtcctgtggaaataatacacccaccagaagtttgcaatctgaactcatcactgtcatttactcttcaggtatgtcgtgttgaagatattgacatctggggtctcgtacaaggaactgtaattcatttcaatagagctagaagtgtcagtgtgcacacatctggtaccatcagtgcaacaggcttgggctgccgaagtggagtaggacaaggaaagatattaaacagtggtgtaagtggtggtggtggtcatggtggtagagggggggatggcttttataatgaaagccatgctgagggtggatctatgtacggtagtgctgatttaccatgtgaacttggcagtggcagtggtaatgacaccacaaagctttccaccgctggtggtggtataatagtgatgggctcatgggagtattctctaccaagtctttccctctatggttcagtagaatcaaatggtcaaagttccactgatgtggtaacaaatgcttctattggaggacccggtggtggttctgggggcacaattcttctttttgtacgtgctttgtccctagcggagagctccatcctttcaagtgttggtggtcttggaaactttggcagtggtggaggtggagggggaaggattcacttccactggtcaaacattccaactggagatgagtatgttcctgttgcagctgttaaaggatcaatacgtacaagtggaggaatcagcaaagggaaaggatttcctggcgagaacggaacagttacaggaaaagcttgcccaaagggtctctatggtacattttgcaaggaatgccccttgggaacgtataagaacgttactggatcttctaaatctctgtgcgttcaatgccctccagatgaactccctcatcgtgcgatttacacaagtgtccgaggaggtgcttatgaaaccccatgcccatacaaatgtgtatcagatagatatcgtatgcctcactgttatactgctctggaagagttgatatacacttttgggggaccttggttatttggcctattactttcaggtcttcttgttttgttagctcttgttttaagtgttgccaggatgaaatttgttggtactgatgagttacctgggcccgcaccaactcaacaaggatcccaaattgatcattcttttcctttcctagaatctctaaatgaggtcttggaaactaatagggctgaggaatcgcatgggcatgtacacaggatgtatttcatgggccccaacaccttcagtgaaccttggcatctcccacacaccccaccagaacagatttctgagattgtgtatgaggatgcatttaaccgatttgtcgatgagataaacactcttgcagcttaccagtggtgggaaggatcgattcacagtatcctctgtgtacttgcataccccttggcctggtcatggcaacagttccgtaggagaaagaaattgcaaagacttcgtgaatttgttcgctctgagtatgaccattcgtgcttacgttcttgccgttcacgtgcgctttatgaagggctcaaggtgactgcaactcctgatcttatgctgggctatttagatttcttccttgggggagatgaaaaaaggcctgatcttccacctcgtcttcgccaaaggtttccaatgtgcttgatctttggaggtgatggaagttacatggctccattttcactccatagtgatagtgtactcactagccttatgagtcaggctgttccctcatcgatatggcaccgtcttgcagctggattgaatgcccagttgcgtttggttcgacgtggaagtctcagaggaacatttcttcctgtcctcgactggcttgaaacccatgctaatccctctctgggtgtgaatggtgttcgtgttgatcttgcctggttccaagctacagcattagggtattgccaacttggtcttgtcgtttatgctgttgaagaaccaatgagtgcagagcttgatggtagccctagaattaaaatagagcaacattcactaacacagaacatgcatgctgatactcaactaggccattctagaattaaggaagctcttatgcgcaaaaggatcacaggcggaattcttgatagtaatagcttaaggacgcttaaagacaggagagatttgttttacccgttttctctcatcttgcacaacactaaaccagttggccatcaggatcttgttggcttagtaatctcaatattgcttctcgcagattttagcttggtgttactgacttttctccagctatattcatactctatggccgatgttctcttagttttatttgttcttccacttgggatactatcaccttttcctgctggaataaatgctctttttagtcatggaccacggcgatcagcaggccttgctcgtgtgtatgcattatggaacattacttcactggtcaatgttgttgtggcttttgcttgcggccttgtacactacaagtcatcaaccaaaagacatcctagtacgcagccatggaaccttggaacggatgaaagtggctggtggctcttccctactggactcatgttgctgaaatgcatccaagctaggcttgtcgattggcatgtggctaatttagagattcaagaccgcgcagtatatagcaatgacccaagcatattttggcagtcatgacacttggcattactactactaaaggttcttttgggagctttttacaactcaattttttgggagttgataaaaggaagggtgggggtactcaaagcacggcctttctttattgacctttggccgaagaagaagcaactactacagtgggttatagatgcaatttccgcgtccctctgctaatcatatgtgcagtcacaaccaacctgtattttggtgttgtatatataaaaaaggtgtacttgatccattatttgtaggatttagacaccatagagtttataaacagttcccaagctaactgaagagatgtgattttgttgttgttgctactgctcttgttgtcggtgctatgtactttgcctctagatgttgagctgggcaaggcaggcattgactgtgaaacttgtactacctgattggataacacaagtgctaacttggctgatggttttcatccctcatcattaacccaatgcaatgctgataccaccgagttgtg

SEQ ID NO: 24411 - DNA, 1496 bp, Oryza sativa
  ref <308>: DATABASE ACCESSION NUMBER: AK099853
  ref <309>: DATABASE ENTRY DATE: 2002-08-28
gatccaaaaaaaccaaaacgaaacggaaacgcgctcccctcctcctccttcccgtcgtcgccttcttcccctctccgcctctccgcctccgcctcctccgcctcggcgcaaaccctaaccctaaccctaaccctaccaatcctcctcctccgatgggagccgtcacctcgacggtcgcggcccgcttcgccttcttcccgccgagcccgccgtcgtacggcgccgaggccccgcctccccccgccgcggcgggcgcgggggtgggggtggagaaggatggagggggaggaggggtggtggtggagctgacggatgtgccgaggagggggaacgtggaggcgaggcggctgcggacgaagcgggggacggaggtggtggcgatgtacgtgcggcaggccggggcgcggctcacgctgctctactcgcacggcaacgcggccgacctgggccagatgttcgagctcttcgtcgagctcagcgcccacctcaacgtcaacctcatgggctatgactattctggttatgggcaatcttctgggaagcccagtgagcacaacacttacgctgatatagaagccgtttacagatgtcttgtagaaacctatggagcctccgaggagaatatcattctttatggacaatcagtgggtagtggtcctactttggatttagcctcccgtttgcctcatttgagggcagttgttctgcatagcccaattttatctggcttaagagtgatgtatcctgtaaaacatacatactggtttgacatatacaagaatattgacaaaattccattagtcagatgccctgtgttagtgattcatggtacagctgatgaagttgtcgactgttcccatgggagggcattgtgggagctttccaaagtaaagtatgagcctctatgggtcaaaggaggaaaccactgtaatttggaactgtacccagagtacattaagcatctaaagaagtttgttggggccattgaaaaatcgccacccctatatgatgaatctccagagagctcaggtccatcagataatactcaaacaaaccctgaaggcacagaggaatctaggaaaagcacagactgcagggagaaaacaaggccaagcatagatcacagacaaagcacagatcgccgggacaaatcaaggggcagcacagataggagggataaaaacagaaagagtgtggaccaaccacgggctagtgtcgatcagcctgatcggccaaggaaaagcgttgaccgctttggtggggtgatgaagtccgtcagatatatcgactgtttcagagtaacaactgcatctgggagctgaagaaaaatatatataccaaaaaggttagcgttggggttctctgtatgtagtccatttgtataacttaattcattcgggtgattggtttggtcgttggaggcgtgtctcactacaatgggggggacttgtattgtttttcttgatttttttccaatatgaaataattatttgtcc

SEQ ID NO: 24412 - DNA, 1966 bp, Oryza sativa
  ref <308>: DATABASE ACCESSION NUMBER: AK099854
  ref <309>: DATABASE ENTRY DATE: 2002-08-28
ggcctacagcctacccctcgcgtcgtcgccgtcacgtccacctccgctgctgtcggcgaggcgagcagccatctccgcctcggcggccggcgtcgccgaccgccgctgcttccgcctttgcctcacgcctccggctgccggcgtccggatccgacgtccatgtggtcgggggacgcggatctgagctcccccccgtgcgccggacagcgtctccgcctcggccgtcgccgagcatcgccacttctgcctccgcttcgttctgccactgtcgaacgccaccgccgtagcacccaccctccgctgccgtcgccatcgccgagcacccctgctgcgtccttcaccaccatcgtcgacggccgctgctccgcgctccgttgctgctgccatcaagaagcgacggtggtgacagagccggcatcaatgaaggtggtggctgcggcgagaagaggagaaccatccgtcgccaggctgatctgccgatgaactcgggcagcaacatggtcggtggccgcctttacctccttccccagcgtcgcctccatcgtcctccctgcctcgacggccatggcgggcggcagtgtggttgactgtggcatatgttcgattcaggcaaaagcagagaggtgccctccctcccctttctctcccatctctccatagatctctctctctctctctctctctctctctctctctctctctctctctctctcaagggcagagagggaacctctgcgcggcaaaggcgacgttgggtgcaggatggacctacggtggaggaggaggatggctgagcggcggcggcgggggagagggagagggtgagacgagaggaatgaggtgctgttgtgacgttgtgtactcttttcactgcatgtgttgtcgtagtctcgctgggaatggagcgggggagatggggtgttgccagcgacagctgcaggacttgtcatcggcatggaccaaagaggcacataataataagattcttccagaaaatgtggcaactctttcgtctcaccatgagacaaaagaaaaggttctttcatactctgatgcttctgatgttcttagatatgcttttactatgacagaagctgcaatcgatcatgagtatgagagataattgttgatggatgaggagctgagcttggcggtggagcacggcatgctgctccgggaggagtgttccatcgtcttcacgttcatcaatcggaggcctacactcccgccgccgaggccgctgtgatgctgggatttctttggttgctttctgccctggcaataacatatagaagacagagcaaaaactctaatacatgtgaacggccggaaaaagtttttggagtgcaccggttcacagatcagaggccatggttttcaattttatttttcactcatcgcattgctcctacatcgaaaaacaagccagcacaaagtttacaaggtctgcacatcaaactaacaaatgtaccacaatcgaagaattatctcctaagaaaaagcatgtcgttctaacatcagatggcacggaagaagatgtgcattctctagaggtgaacaacagatgcaatatcactcgtacatcaagtccaaaaaatcagtttttgaacgtcatttctgaagaaataaacattaatctcctcaacctgacatctcaaacaactagcttcagtttcagtggttattactttagtcacccggtggcttcgcacctgggctatcctccccaaaccgggtcttcgggatactattatgatggtatcgcgacttttggactaggtggcacgggagtattttactcaggagcatggttggcgaactagtttatatgttgatagccactaatatttctgtttcgtgagggggtctacatagttctttctttgtgtgtggctgtaggggtgaaaacggtatgaaaactttccggaatagattctttttttaattacaaaatacattggattcc

SEQ ID NO: 24413 - DNA, 983 bp, Oryza sativa
  ref <308>: DATABASE ACCESSION NUMBER: AK099855
  ref <309>: DATABASE ENTRY DATE: 2002-08-28
ggcattggtggcagaagcagacccatccacacaatcaaagaagaagagtcagaagaagagaggtgagctggccagcaatggaggcgacggcggtgagcgtgggcaagtcggtgctcggtggagcacttagctatgcccaaaccgcgatcgcggaagagggagctttgaagctgggcgtccagcgcgaccaaagtttcatcagggatgagcttgagatgatgcagtctttcctgctggctgcggacaaagagcatgatggacatcatcacgaggtcatcaggacctgggtgaagcaagtacgtgacgtggcctacgacgtggaagactgcctccaagactacgctgcccggttgaagaaaccaccctggtggagcctcccttgcacagtacaccgggagaggcgtcgcatcgggaacgagatgaaggagctgagagccaaggttgaggatgtcagccagagaaacatgcgttaccatggtgtgtctgcagctgccccacagtcttcttctgttactgctgctgagctgctgcaatccactgccgccatcgacgacattgatgaggctagacgtgccgccaagcaacaagaaaaggtggacctcgtgaagctcatcaccaacgacggacaaggtggacttagagtgattgctgtgctggaaacaagaagtggacctgctgggacagtgcccgttgttcgagctgcctaccaaaagctcaaaggagagtttgaatgccacgcctgggtaaggctgatgcactcctttgatgcaaaccaattcattgggagcttggtgaggcagttcaaagcgaactctcgcgagggtactggcaagacaccacaaggaacaccttctggggtgtctgttctgaatgagatggaagcacaagattataatctgcttcatgactttactggatatgtgaccaacaagaaatacttggttgtgcttaatggcctgtctacaatagaagagtgggactgg

SEQ ID NO: 24414 - DNA, 1681 bp, Oryza sativa
  ref <308>: DATABASE ACCESSION NUMBER: AK099856
  ref <309>: DATABASE ENTRY DATE: 2002-08-28
gagcaaaaagcaagcaacagagccgagccgagacctcctctttagataaggaagcaacaagctaagaagcagcatcattcactccacgagctagcaaaaaggatagcaatggtggaaccggggagagcgcgggagacgaaggtcaccgcctcagcctcaagctctgcaggctcagacgccgctgtcatgaagaagaagaagaagaagaagaagaagctggtggtagcaagcaggaaggtggatgagaaagacaagaagcaggtggattacaagtgcagtagaagcagcggcagagacgagtgctgcaaggtggagagccgtcatcagcagtgcacagagccggagagcccttcctacaggttagctctcaggagcctcttctcgtgcagaaacagcagcagcagcagccacgccggccaccaccaccaccgcgccgccgacggcaagaagctcggctgcaattccgcctccatctgcaaggtcaagcaagacaacccgatgcagcagcacatgcgcagggcggaggatgagctcaaggtgaaggacaagccgccggtcgccgagccgtactgcaagcgcagagcttcggtgagcgcgtgcaacatcagcagcgagcggtcggtgaagaagtcagtgaagcagcagcagcaggaggcgagcagcagcttgcagtcgtcggcgtcgatatcggcgtcgtcgtgttcgtcgacggcgggtggtggggggtcgttccgggggatgcagcagttgagcctgaggcggctgtcggggtgctacgagtgccacatggtggtggatcccatcagcggcgtcttccgggacagctcctccatgagggccaccatctgctcctgccccgactgcggcgagatcttcgtcaggcccgactccctccacctccaccagtccatcaggcatgcagtgtcggagctgggggcggaggacacgagcaggaacataatatcgataatattccagtcgagctggctgaagaagcagagccccgtgtgcgccatcgaccgcatcctcaaggtccacaacgccgcccgcaccctcgcccgcttcgacgactaccgcgccgccgtcaaggccaaagcaatggcccaccgccaccctcgctgcaccgccgacggcaacgagctcctccgcttccactgcgccaccctctcctgcgacctcggcctccacggcgccacccacctctgcgaccacctctcctgcgccgcctgcgccatcatccgccacggcttcaggccgcccgcgccgggggccggcatccgcaccatggccaccagcggccgcgcccacgacgccgtcgtctcgtccgggtcggagggcgaccgccgggcgatgctggtgtgccgggtgatcgccggccgggtgaggagggaggaggcggcggcggcggcggcggaggaagaggaggaggagtacgactcggtggccgggacgacgccggggctgtactccaacctggaagagctggacgtcttcaaccccacagccattctcccttgctttgtcgtcgtctacagggcctgatcgattagtgatcattaaccaataataataatcttagctagcatcatttccttcactcttcgttaattgcatgtaatcaatcgatcgatcgatgatgatgatgatcccatttataattaattaattcatcgttaatgtc

SEQ ID NO: 24415 - DNA, 3077 bp, Oryza sativa
  ref <308>: DATABASE ACCESSION NUMBER: AK099857
  ref <309>: DATABASE ENTRY DATE: 2002-08-28
gtcggagaccgaacccgcggcctcagatctgagacaagccaccgggctccctctccctcctcgcgcgcgcggggccttcgcgaacctcctggaagcttccggaggcggaggcggcggctgctccggggagatgggggtgttcgaccggctgccgccgatggaccgcctgcggtccgagaagatgtgcttcgtgcagctcatcatccccgccgagagcgcgcgcctcgccgtcacctacctcggcgagctcgggctcctccagttcaaggacttgaatgaggataagagtccttttcagcgtatatttgtcaatcaggtaaagcgatgctctgaaatgtcacgcaaactaagatttttcaatgatcagatcaacaaggcaggtgtaaagtcctctgttcgacctgcaatgcaaccagatatagatttggaggagctagaggcaaaattgcgcgagcatgagaatgatctgcttgagatgaatacaaatagtgagaaactactacaaacatacaatgagcttcttgaattcaagatggtcttgtcaaaggcaggtggtattcttgcttcttctcacaatcatgctgctccagctgagcgggagctagatgaacacatatatgacaaggaaatggatgatggaaatgcctatttacttgaacagggtgtgcatctaggggcttcggagaattctggagtgaagtttgttagtgggattattttaaagtccaaggcaatggcttttgagaggatgctattccgagctacaagggggaatatgtttttcaatcaggcgcctgcaggggaacctgttactgatcccatttctggtgaagaggtctgattgtcatggtagagaaaactgttttcgtagttttcttttctggggatcaggctaaagcaaaaatattaaagatttgcggttcatttggagcaagttgctaccctgttcccgaggagatggttaagcagagacagatttttcgcgaggtatctggacgccttgctgatctggaagccactttggatgctggaatccagcacagaaacaaagcactagagtcagtaggttcacaattatggaggtggacaatcatggtgaaaaaaagagaaagctgtatatgatacattgaacatgctgaattttgatgtcacgaagaaatgccttgttggggaaggatggtgtcctatatttgctaaatcacagatcaaggatgttttgcagcgtgcaacgcttcacagtaattcacaagttggaataatatttcatgagatggacactattgattcaccgcctacatatttccaaaccgataagttcactaacgctttccaggagatagttgacgcatatggtattgctcgatatgaggaagctaatccagctgtctattctgtcatcacattcccatttctttttgctgtgatgtttggagattggggtcatggtatatgtctattgttaggagcatgtgttcttatacttcgtgagaagaaactttcctctcagaagcttggtagctttatggagatggcatttggtgggcgttatgttatccttctgatggcattgttctcaatatactgtgggcttatatacaatgagtttttctcagttccatttcatatattcgggaaatcagcgtatgaatgtcgagagaaaacctgcagtgatgcacatactgctgggctcattaaagtccgtgatccctatccttttggagtggacccaagttggcgtggaagtcgatctgagctaccctttctaaactccttgaagatgaagatgtctatactaatgggtgtaacccagatgaacttggggattgtattgagttattttgatgcaaagtttcatggaaatgctcttgacataaggtatcaattcataccacagatgatctttctgaacagcctctttggctacttagcactcctaattctcatcaagtggtgcacgggctctcaagctgacctatatcatgtgatgatatatatgttccttgatccttctggcaatcttggagaaaatcaactattttggggccagaaggaacttcagatacttttgttgcttatggctattgtagctgttccgtggatgctcttcccaaagccttttatcttgaagaaacttcacaaggagaggtttcaaggtcacacctatcgctttcttgggacctcagaaatggatccagattctgaaccagactcagcccggtcacgtcatgatgacttcaactttagtgaagtttttgtgcatcaaatgatacattccattgaatttgtacttggcgctgtctccaatactgcatcgtatcttcggctttgggcattaagtttggcgcattctgagctatcaacagtcttctatgagaaactgctggtacttgcttgggggtatgacaatcttgttgtgaagttagtggggcttgtaattttttcttttgctactgcctttatattgctggggatggaatcattgagcgccttccttcatgcacttcgtctacactgggttgagtttatgaacaagttctaccatggggatggctataaattcagacccttttcattcgctctgctagctgatgacgaagactgatgcatacaaaattcagcagataaagagattaagcttgtttcttgccatttttggagcacgtgagtggaattctttcgaccaagatgggtttccccaatacacagcattttgtcagaccgccgggcttcttccgaacgcatgtgtgcagtcctggttgagattgccagcgtggtgggaggagattttgtaagttcacggcaatactgtagagggcaggtttctcgtacagttcctccagtggagaagcagattatagatgctaacaacaaagatagaaatgtagatttgctatgtctacttttagctcttatactttgtccaagtgactgtcccagtatcccttaccacttgaaaatggaagttgcagtcgttttttttaatcattacgtgattaggttgtaacgaagggtgacaattattgaactacaatgtttgtcaattcaaataagaaaagctaaagcatatatggtttccc

SEQ ID NO: 24416 - DNA, 1700 bp, Oryza sativa
  ref <308>: DATABASE ACCESSION NUMBER: AK099858
  ref <309>: DATABASE ENTRY DATE: 2002-08-28
ggctcgttagctaaaactgtgaaaactctccattttccttgcctctctctctccccacccaatcccaacccaccacctctcctctcgccgccgccgccgccgccgccgcgcgccgttctatggcctacacctcctcctccctccacctccacaagcacctcctcctccccaagaccaacccctcctcctcctactcgcggcctccgcctccgtcgttcgtcgccgcggcggccaagatcaacggcgtcaacggacactcctccaagaagtcccccaacggcaaggcgcagatcaacggcgacggcaagaagggggtcaacgggagcgggaggaagaaggcggcggcgcagcacatcaacgggaatgaccggatccatctgtcggtgagcacgggcggcgccgggggccaggatgggttcgggctcagggtggcgttccagggcgcgccgggcgcgtacagcgagttcgcggcgaagacggcgctccccgggtgcgacaccgtgccctgccgcgcgttcgccgacgcgctggcggcggtcgacggcggcgccgtcgaccgcgcgatactgcccgtcgagtccaccatggagggcaccgcgctgcggaactacgacctcctgctgaggcatgacctcgtcgtggtccaggagatcaacctgttcgtgcactactgcctcctcgccatgcccggtgtccgcgccgccgaggtgcgccgggtgattagccaccccatggcgctcgcgcactgcggccgtgcgctggcgcggctcggcgtggacagggagcccgtggaggacaccgccggcgccgtggagatgctgcggtccaaccggatgctcgacaccgccgccatcgccagcccgcgcgccgccgacctctacggcctcgacgtgctcgcgcacggcctccaggacgagtcatggaacgtcacccgcttcctgctcctctccaagccgccctcgccggtgacgctgcccatggacgccgacgccaagaccagcatggtggtcgcccaccggggcggctccatgatggtggtcctcaaggtcctctccgccttctcctcccgcaacatcaacctgaccaagctggaggtcatcaacaacaacgacggcggcggcggcggcggtggcgccgcggcgggccaccccgtgatgatcctcgacacgagcgcccgcggcgcgccgacgctccgcgcgttcccgcacgtcctctacgtcgactgcgagggcgcctctcacgacccgcgcgtcctcgacgccatcaaggagatcgagagattcgcggtgttcgtccgcgttcttggctgctacgccgccgattccaacgtctacgacctgcaatgaggcggccatcgatcgaacacacagctgcggatccacatcaaatcagctagtcttgcaagatttggatcactgatcagttggattagagctctccattccagcactcacttcagtgagctacagatgctatactttgcttgcttgctgctgatgctgctgctgctgcctgctatgcgatttttgtacagatgcaataagaaatctttaccatttctgctgctggcttaggtatgtgcataggtttttaatcctggtattgatgccttctagctgaaggaaagtgtaagatggcacaggattgatgtaattttggtgtgctagatcttgattgatagtgagtattccttaatcccc

SEQ ID NO: 24417 - DNA, 1976 bp, Oryza sativa
  ref <308>: DATABASE ACCESSION NUMBER: AK099859
  ref <309>: DATABASE ENTRY DATE: 2002-08-28
ggatctcctcccctcacgcacccagacgacgacgagatggatttctccggcggcggcggccgcggcgacccggcacggtggctggagatcgccgggaagctgctcgcggcgcgggacctggtcggctgcaagcgcctcgcggagcgcgcggtggacgcggagcccctcctcccgggcgccgacgagctcctcgccgtggccgacgtcctcctcgcgtcccagcgcctgctcccctccggccgccccgatcccatcgccgtgctccacctccaacccaaccccgaccccgccgaggtcaagcgctcctaccgccgcctctccaacctcctctcctccaaccctcgccccggcgctgacgccgccctccgctgcgtgcaagaagccttcgctcacctctccgattcctcggctaatcccgctcccgctctcgctcctcctcctgctcctgcttccggcggcgacgcctcggccgccgcggccgatgcgttctggacggcgtgtccgtactgctgccatgtgtaccagtaccagcgtgctctgatggggcgcgcgctaaggtgcccaggcgccggctgcaggcgcgcgttcgtggccaccgagatcccggccgcgccgccgattgtgccgggcactgacatgtactactgcgcttgggggttctacccgatgggcttcccgaaggccgctgatctgagcaccaactggaagccattttgccccatgtatccatggaatttgtcgtctccgcagcaagcgcctgccgatgctggtaatgttagcaagcaaaatgttgagagtaatggtggaaatgttaatattaatgtcaatacaccgccgtcgaatgcacagccagcgaataagagcggcgccagcagcggtgttggggtcgggccatctagaggtaggattaagaagacaacagcccgcaagaaggttggtggtggcttcaagaagaatgcctctggaggcgtagaaagtggcattgagccatcgttgcttgggccggattcgtggaatggggttgcagagagtggatcgatggtaggtgcaagaggaattaacataaatgaggtggcaaagggaactgatggcagcagcatgatgcatttcggtggggacgaggaaattggttttgatttggatgtcgatgcaacggatgctatattggggaatttgcagcatctgccattctcgagggatgatgacaatgccagacggttattttagtagttgctgcggttggtgtaggtattccaaagaagtggtgtatgctagcctggttgaaggaattcctgcatggaccgatcctctgctgtcgctttgcgtttgttgtcatcatgtctcatgttgctcttgtgttccttggaaatgtaccctgtgtctgtagttagctggtgatctcttgtaccacctggctgagtaatctttagtctttactagtttgtagactgtagattatcccccaaattagttgggggacgtgtagtatttatcagctgcaaattaattgaaggagtttactggcgaaggaaataatgcactctgcatgcccacatggatgatcagcaaggcttaacgaagagtttatcatgcaactgagtctcatggagctccgatgtctgggtcatctcaaaatcgctctgtattttgtggcatcagttgattccttgagtacttatatcaaagcagctgaataagaggattcacatggcctggtttacaggatatcggtagcttgtaatttatacttgtcttcttcgttgttacttgttagctaggttgtggatgtcctaagtcctaactgaaaataagtatgggccatatgcatgtgtgtgcatcctgtttccgtcaatgagcaatgaagcagaaaatacttctagtgactattatgttacttcgccatgttaaatatcagactccagtaactcttctgaatttctggttctttgtgcattagttagctacttttactgtcc

SEQ ID NO: 24418 - DNA, 822 bp, Oryza sativa
  ref <308>: DATABASE ACCESSION NUMBER: AK099860
  ref <309>: DATABASE ENTRY DATE: 2002-08-28
gattccccatcctcctctctctctctctctctcgctccctccctcccgcgcgtgccgccgccgccgccgccgcaaccgcccgcccccctcgtccgccgcgcgcgcgtgccgacgaggagttctcctcactccctctcagcccctcccaatccgagaagcaggatcggtgggctgctgtccagcaatgatgtcgatggcctccaccaccgccagccccttttgcccttcacccatgcccagaggacgcaaatgcacagttcgagttcaagctggagctgccggagcggatgcatctgataagtcgctcgagattatgcgcaaattctctgagcagtacgcccgccgctccaacaccttcttctgttccgagaagtccgtcaccgccgttgttatcaagggacttgctgatcacaaggatcaacttggagctcctctatgcccttgtaggcattatgatgacaaagctgctgaggtagcacaaggattttggaactgcccttgtgttcccatgcgtgagaggaaggaatgccattgcatgctttttcttacccccgacaatgactttgctggacaagaccaggctataaccttggaggagatcaaagacgcaacatcaaagatataacctcagtgcaccttttcttccattattctgcttgacaccagagtttgtatatgtagtctctgtaagatgacattctaccgatgaaatcggtcatgataagatgtgtagtaaacaacaatttgtcgttccttagctttcatgttcttgcttttgaacatgggaaaacacgctcccactaatacaacagcctattaact

SEQ ID NO: 24419 - DNA, 2041 bp, Oryza sativa
  ref <308>: DATABASE ACCESSION NUMBER: AK099861
  ref <309>: DATABASE ENTRY DATE: 2002-08-28
cggcaggagttttgctctatccaagatgtcacaaacacagcctgagttcttacggcgctggatgacagtgacgttctgaagatggtttgcagatcggatttatagcaagaagattatcggatggatttggtgacgagggcctgcgcgagattccaactaacccaggattttctctgttttttttttctttcgtttttgtttaataataatccgtttaattgatgtgttagtcctccccgcatacgtcgcacgcgctgctgattggataagagaatcgaacgaacgtgacaactggtttagtggttttttttttctctgcttcttctcttctctccgctcttctgcgtctctgaggatccgaggaagtggcggtcggaggaggaggagccatggcgatgccctgccgcctccacggcgacatcctgctgctcctgctcggcgccgtcgccgtcgcggtggctcacccggcggcgaacgagttctgcgcggccgtcggtggaggaagcggtggctgcggcgtcggcggcggcggcggaggggacgggaggaggatcctgatcaggggcgggacggtggtgaacgcgcaccgggtggaggaggccgacgtgtacgtggaggacggcgtgatcgtcgccgtgcggcccaacatcccggttggtgatgatcatgtaaaagtgattgatgcaactggaaaatatgtcatgccagcattggctggtgggacaacaatgcacattgacttcgtcattccagtgaatggcaatttaactgcaggtttggaatcctacaaacagaaggcagaaaaatctgccatggattatggatttcatatggccattacaaagtggaatgatgatgtttcgagggaaatggaaacgatggttaaggaacatgggatcaattctttcaagttcttcatggcgtataaaggttcattgatggtcacggatgacctactcctgcaaggcttacagaaatgcaaatctcttggtgccttggctatggttcatgcagagaatggggatgctgttgctgagggacagcaacgaatgatcgatcttgggataactggcccagaaggacatgctctctcaagacctccagttttggaaggggaagcaactgctcgggcaattcgattagccaagtttgtcaatacaccattgtatgttgttcatgtgatgagcattgatgcaatggatgagattgccaaggctaaaagagaagggcagagagtcattggtgaacctgtggtttctgggctagtacttgatgattcttggctttgggatccggacttcatgatagcttcaaagtatgtaatgagtcctcctatccgagaagcaggacataataaagcacttcaagttgctctttcatcaggaattttacagcttgtaggaactgatcattgcaccttcaactccacacagaaagctttcggctctgatgatttcagaaagattcctaatggtgttaatggtatcgaggaaaggatgcatattatttgggacagtatggtggagactggccgaatttctgtcagtgattatgtgagagtgacaagcacagaatgtgccaagattttcaacatataccctcggaaaggagcaattctggaaggatctgatgcagatattatcatcctgaatcccgagaggagctttgtcatgggtgcccacacacaccattcaaggtccaacacaaatgtgtacgagggcaggaaaggaaagggaatggtagaagtcacgatctcaagagggcgagttgtgtgggaggatggcattctgaacgttgttcccggttcaggaagatacgtcagaacaccgccttacagctacctgtttgatggcattgaaaagtcagacgctgcctacagagcctcccttcgtgcccctgtgaaacgtggcaaggctgctgcttaacgatgcccgctgctgatgaactacagaactagtttctccaaggtgaacgacgtctgctccatgcgtaacttccttgtgtttgtgtatacagatctcattattcatatcattttctg

SEQ ID NO: 24420 - DNA, 1971 bp, Oryza sativa
  ref <308>: DATABASE ACCESSION NUMBER: AK099862
  ref <309>: DATABASE ENTRY DATE: 2002-08-28
gagccctggtcaagagtcttcccggcggcaagactcgtacgaattcaattcccctgccaagccaagaccggcacccacggcccctaggctagaaaaagaggaaagggcgcgcgcacgcgcgcttgcgcttagctgaaaagaaggctgaagcgatatggatcatctcggcggcatcaggctgcggaggccggtgctgtcgattgacaacgcggagcccgcgggggagacggggatgagcgagacgaagaagaaggcggcggcggtggcggaggaggaggaggagttgctggaggagccggtgagcccggcggggcggctgttccgggagccgcacttcagctgctacatcgtgtgcacgttgggcgtcgccgagccggtcgacctgcccgccgtccgcgccggcatcgaggccaccctcgcgcgccacccgcgcttctgcagcatccaggtgttggacgagctggataagagcgcgaagcctatgtgggtccggaccaaggtgaacctggacgaccacatcatcgtcccggacctgggccccaccgacacgtcggccgacccggagaaggccgtggaggactacgtgtcgtcgctctccacgccgtccatgcccatggaccgctcccgcccgctctgggagctccacgtcctcggcttccccaccgccgaggccgccgccaccgtcgcgctccgcatgcaccactccctcggcgacggcgtctcgttgctctccctcctcatcgcctgcacccgccgcgccgacgacccggacgcgatcccggcgctcccgtcctccgccgccggccgacgccgccgcgagggcccgctgcacgcgctgccgccccgcccgcccgctcgccgcgggcgcgctcgcgctcgccgcgtgggcgctgtcctacctcgtgctcgcgtggcacacggtggtggacgtggtctgcttcaccctcacggcggcgtcgctcatgggcgacgcccgcacggtgctcaagggcgacgagggcgccgagttccggcccaggcgcttcgtgaatcgcacgatcagcctcgacgacgtcaagaacatcaagaacgccgtgggatgcactgtaaatgatgtgctggttggactgagttctgcagcattgtcccggtattatttccggagaacaggtgaaagtgaaggaaagaagaacatcaaggtgcgaactgctctcatggtcaacttaaggccgactcctgggctacatgaactggcaaaaatgatggagtctggcaagaacaacggcgtgaaatgggggaatcggtttggctacatgatactgccattccacctagccaagcacgatgaccctctggagtacgtccggaaagcgaccaaggttacccgcaggaagaagagctccatggaggcgatcttcacctactggagcgccgacatggtagtcaaactttttggcatcaaggcggcagcttctctctgctacggaatgttctcgaacaccacactgtctttctccaacctggcagggccaagcgagcagatcttgttctgcggcaacccgatcgtgtacatctccccaaccagctatggccacccgcatgccttgacaatgcattggcagagctacatgaacactataaagctagcccttgctgtagatgagacacagtttccagatgctcatgagctactggatgacttcaccgagtccatgaggctcatccgggaggcagcttcaagagggacagacaaagcacaggatggtccttaagtgtacaaatgtcgaatatatgcaaaagaaaattgctgaagatgattgatgtattgtaattctgagttcaattctttgtaaaggatagaaggatctataccaaatcaaagtatggaaggaagaagaagaattagatcttaaggggaaaaggaagaagagtatacagaaacaggtattctcatactattagttatacagaaattacacatccactgtctgc

SEQ ID NO: 24421 - DNA, 1198 bp, Oryza sativa
  ref <308>: DATABASE ACCESSION NUMBER: AK099863
  ref <309>: DATABASE ENTRY DATE: 2002-08-28
gtgaagctttacatctatcagcttttcagagggttagcttatattcatactgttccaggagtctgccacagggatgtgaaaccacaaaatgttttggttgatcctctcactcatcaagtcaagctatgtgactttggaagtgcaaaggttctggttcctggtgaaccgaacatatcatacatttgctctcgctattatcgtgctcctgagctcatatttggtgcaaccgagtatacaacttcaattgacatatggtcagctggatgcgttcttgcagagttacttcttggtcagccactgtttcctggagagagtgctgttgaccagctagtagagataatcaaggttcttggtactccaacccgtgaggaaatacgatgcatgaaccccaactatactgagttcaaatttcctcagattaaggctcatccttggcacaagattttccacaagagaatgcctccagaagccatagaccttgcttcccgtcttctccaatattcaccaagtctacgctgcactgctcttgacgcatgtgcacattccttctttgatgagctacgagagcccaatgcacgcctgccaaatggtcgtccattccctcctctgttcaacttcaagcatgaactagccagcgcctctccagaactcatccacaggctcataccggatcatatcagacggcaacatggcctcaactttgcgcatgctgggagctaaagggcaccgcgacgccaccgttttgttcgtttatttttccatgagctggacattgcaatcctagatgactccattgtcctggacttggactccatctcagattgcaccatccatgttccatgatccatccatccgtcaagccatttccgcaaggactcagtaccagagaagaagtacaattatgtaaattatctaaccatggagaaatgcgtgctgctgctgctggtgttaagtacgtgacggggcatgctggttgagtagtaggtaaggttaaggataaatgtagttggtggagactgagagacatgttaagctagggaaccctgctttccttcttttttttttctcctttcattttggtttcttcccattttgtgatccttagcattgccctacagtagtgtagctgctccctgtttttgtttgctctttcatcatgtaaatgccaatcccaatcgcaatgaaccctctttccttc

SEQ ID NO: 24422 - DNA, 1571 bp, Oryza sativa
  ref <308>: DATABASE ACCESSION NUMBER: AK099864
  ref <309>: DATABASE ENTRY DATE: 2002-08-28
gatctctctcgtcatcttctactctccctcctctagtcctcttcttcttctactttgtacgcgccactcactctccgagcttgacggcggcggcggcggcggaggtcgtcgagtggtggtcggggagatgggtcaagatgaggtggaggtaggtgcggagaagaaggatcaagaactaccggaggtggaggtggtcgaggaggaggaggaggagggatccaagaaggcggcggcgggctgcgactactgcggcgacgcggcggcggtggtgtattgcagggccgacgcggcgaggctctgcctgccatgcgaccgccacgtgcacggcgccaacggggtgtgctcccgccacgcgcgcgcgccgctctgcgccgcgtgcgccgccgcgggggccgtcttccgccggggcgcgggcggcttcctctgctccaactgcgacttctccaggcaccgccacggcggggagcgcgacccggcggcgccgctccacgaccgctccacggtgcacccgtacaccgggtgcccctccgcgctcgacctcgccgcgctcctcgggatctcctactccgacaaggcggcggcggcgaccgcggcggcggggggcgacgacggtgggtggtgggccatctgggaggagccccaggtgctcagcctcgaggatctcatcgtcccgaccacctcctgccatggattcgagcctctcctcacgccatcttcccccaagattcagaactcgccggatgggaaggtgaatgaggaggtcatacgacagctaaccgagctcgccaattcagacggcggcggcgcgcagatttgggctcatcgcgaggcggcgcaggccggcgatcatcagttaccttcatggggaacaacaacacaacacaacactggacatggcaatttcggtactgcaaacagcaatgaggttgcaaccatgccgacgcctggttatgagaatggtggatgggataacagcgattaccctgcgctaaatgatccgtgcaaggtcgagttcacatatgagcaacctccagccagctcagctgaagcatgtatttcatcatttgttcagatgtctgaactttgccccagcatgagcaatggtagcagcatggaggaaacccaccagacaaaccctggaaatggcacgccaatgcaagttctacccaaaatgccagaatttgttccttgccccgacaggaacttggtcatttctcgctataaagagaagaggaagacaagaagattcgacaggcaggtccggtatgagtcccgcaaagctcgtgctgatagcaggctgaggattaagggccgttttgctaaagtcaatcagatttgagccttcatttctgtaatatattttgcatcttggacatgagtaatactaattaggaccaagcagatatagtacaagaaaaaatatcagcattttgtatgtaactatgtacccacccagtggctacgccacgctgaggagaatttagtttcatcgaatctctgtatatagtgttgcatcgaactcagtgatactatttacatgcaaaggatattgtcattatggctgtttcccc

SEQ ID NO: 24423 - DNA, 1619 bp, Oryza sativa
  ref <308>: DATABASE ACCESSION NUMBER: AK099865
  ref <309>: DATABASE ENTRY DATE: 2002-08-28
gacctgacacgcctgccatgcctcccgccctcacctccaaccccccctccttccgccccctctccacccctctaacccgccgccgtgccgccacaaccttcctctgccgtgtcggccctggcaagccttccaaggacaccggcgcggatgacgagccgaagaagaggtcgttcttcgccgatttcggtaagctctcggatggaaggtcgctgataccggccttcccgccggccgcggctgggtctctgttcgccggcgggagggggaggaaggacccgcagacagtgttcgtcgcgggcgccacggggcaggcgggagttcgcatcgcgcagacgctgctgcggcaggggttcgccgtgcgcgccggggtgccggacctcgcgtccgcccaggagctggcgcggctcgcctccgcgtaccggctcatttcccccaccgaggcgcgccgactcaacgcggtggagtccgatttcgaggaccccgaggcgatcgccaagtccatcggccctgcaactaaggtggtggttacagtcggcgcagctgagaaggggcccgacggcggtgtggtcaccaccgacgaggcgctccgagttgtgcaggctgctgaccttgccggcgtgacacacgttgtggtggtgtacgacctgggggccggtgaccccagtggtgagtcgacgtacaatgtgctcgacgggttcacgtccttcttctcgaacctcttctcccgtgtgcagtccttgccactaaacgagttcttggctaaggtggtggagaccgacgtcaggtacactctcatcaagacgtcactcacagatgactacagccctgagagcacctatggcttggtcctggccaaagagggcgcgtccagcactacttcctcaacagaaaccggcaaggtgtccaagttgcagattgctggtcttgtggcagatgtcttctccaacgtggcagtcgcggagaacaaggttgtccaagtttccactagctcatcagtaacatccaagaccatagaggaggctttctcagctatccctgaggacagtagaaggaaggagtaccaagatgctgttgcaaaagcacaggcagaagaggagactcgggcttcgcagcgaactcgtcaggcagaagaggacactactacggtcaaagccggggggaagaagacgccctctgatgaggcagctgcaagtgaggcgcaagcttctctggagaaccttctgagcagagccaaagggttcggcacggacttctcatgggagaagctcagcacacaacttgcaggagtggccactcaggactcagacgaggtggaaccaaaagcaaagaagctggcaccacagagagctgttgtgaagcccgcggcgcagaagacaagaccaacaccaaagcagccggaatccaagccggatgtgaggcccgtgtttgggggactcttcaagcaagaaacaatctttgtggatgaggactgagctaatgcagactctgccatttttcttaatcttttgtatgctatatctatgaagctcttggtgtattcttggaaagtgaatgagtgacagttgtataaaattggctgcaaaaccgtataacattctctgcaggtgagaattgttcgc

SEQ ID NO: 24424 - DNA, 2390 bp, Oryza sativa
  ref <308>: DATABASE ACCESSION NUMBER: AK099866
  ref <309>: DATABASE ENTRY DATE: 2002-08-28
gtccagtctcccctggcccggaagcaaacggggagcagcaatggagaagagacgccggctcgtcgtcgccggcgacggcgagggggacggcggcgaggcctccggcagcgccgcgcgcggcctggtggagagcctcccggaggcgctcctcgtggaggtggtcgtcaggctggagctggaggccgcgtgctcggccgcgtcgtcctgccgcgccctccgcgccgccgccgccgccgccttctccgccgtcacctccctcgacctatcgatgttcccgccgacgaatgccatcctgaataggattctcgcgggcaatggcgcgctccgctgcctcgccgtcaactgcagcctcctcgatgactccgcggtgggcgccatcgcgaagggaagcctccgcgagctctcgctgctcaagtgctcgtccttctcctcgtacctctttgtggcagttggtgagagatgcaaaaatttgagatcatttgtgctggagatggcagcttcagatgatgatgaacactttcgggatctgccgaaagtccatagcacacatcgtcaaaggatgcggttacctggaggtgaggaatctttgttgcagatgaaccccaatactgttcttcgcgtacatatatggtcagttcatagcaatataatattttgtaaataatattttaggctgagaatgtgtgaatactaaagtatagataacataatattagccatattattttaacaatgacatggaactctttgaaaagttaatctggtcggataatctaatctgacgttcttttctctccatgcagaatctttcactcaagttctttcctctgctaggtccaggctccgttgattttgagtcattggtacccattcctagtaccatcaaggtactattgctacagcctgtgtcgaattggcaggcaaagaggctatttcctataagcacaagtctgaagacatctattagcaacactctagaatcactctctttagttcttgacataataactgatgaacttgttgcgttcatcactgggagtctccataacttagttgagttgtgcctagaagataacccaatgaaagaaccagatttgcacaatgacctgacaaacgttgggctccaagcacttgggttatgccacaacctggcacatttatctctgacacgtggtaagcagaattgttcgtccaccttcagaagggtaactgactttgggataatgatgcttgctgacggatgcaagcaactgaaaaccattagacttgctgggttttctaaagtgagggatgctgggtatgcagcccttcttcagtcttgcaaggacctgaagaaatttgaggtcagtactggatacttgtcagatttgacatgtcttgatcttgatgaggcagctccaaagattacggaagtgaggttgctgtgctgtagtctattaaccagtgaaacagccatctcactctcatcctgcaccaagttggaagttctagacctatcaggttgcaggagcatcgcagactctgggttggcttctatttcgcagctttcgaagctaacactattggatcttgctggagctgacattaccgatgcaggattatctgcactcggtaatgggcggtgcccaatgtcttcattatgtttgagaggttgcaaaaggatcagcaacaatggcatagcttctttgttgtgcgggagtggcaccatcaacaaaactctaatctcactggatatcgggaatgtacctagaatatcaggcagagctgtcacgttgattgccaagaactgcgagcagatcagcagcctctgcctccggaactgcctcctcatcaatgattcttctcttgaaactctaggttctatgcgtcacaatttgggtaaaagttccctaagaatgctggatctctcctattgttctaggctgtcacgtaatttcctgggactatttgagccgccattttttaggggcctgaggtggcttggtgttgggaagaacatgttggaacgccgtggctgcagtccaactgtcgcggagctcctggagcgaaagcctggattaacagtctgtggcaacgcctgcgagatgggctgcaggaatcagtgccatcctgactttcgaaggcaataaaccgaagattgtcgttcgggtttgattctgtaattccttcatccgttctgtaacataactgtggaacatctcttgcgtttgtaggttagaaggggctgttctttaggatttgttggtttgctctgcacttgtagattgtaaacaaggaacagctcttaggattggttggttttctttgcacttgtagattgtaaacaaggagctgttcttaggattggtcggctgcttgtgtcctgtaataaagtaatgaattcttattgg

SEQ ID NO: 24425 - DNA, 1424 bp, Oryza sativa
  ref <308>: DATABASE ACCESSION NUMBER: AK099867
  ref <309>: DATABASE ENTRY DATE: 2002-08-28
ggcccctaccacaaattcgattcaccccccaatcgctggcgcctttgactcccgccgcgggcggcgcagcgcagccgatggggatccccgccgcctcagtcgcggcccggacagccgtcggcgcggcgctggccgccgtcatcgccgcgcgcgccgtccgccgccgctcgctggacggctccggcggggcagccgggttcgtcgtcatggcgatccacctcgcctgcgggtacaggtacggcgcgctcgtgctggccttcttcttcacctcgtccaaggcgaccaagatcggcgcggacaggaagcgccgcatcgaggacgacttcaaggagggcggccagcgcaactggatccaagtcctagcaaatagcttaatagctactatattggtcatcatattggcaacaatgaccggaggacaagatcaatgcctggactcccatgagtcaaaggttataactggtattattggtggcatcattggtcactattgctgctgcaatggagatacttggtcatccgaacttggtgtgcttagtgatgaacagccacgtcttattactactctgaagcctgtcaggaaaggtacaaacggtggagtgaccttacaaggccttcttgctgccacagcaggtggcctaatcataggtctgacttttgtttttgttggactgttgactgtggagtgctcatttgacgtggctcttcgacagcttctagtaatacccatctctgctactgctggtttgcttggcagtctgattgattcagtgttgggtgccacactccagttcagtggatactgcagtgttcggaagaaggtggtcagtaaacggggccctacagtcaccaagatttctggaatgactatcctggataatgatgcggttaatgctgtatctgtgctactaacaactgcggttacagcttatgcgtgcattcgcatcttttgaagatctttttactcaagtttcttccaaacacccaattccattcaaaggtgtcaaggcatggccccaagacaatgaaatgatggattaggcattttggctgcttgatgagaaagattcaattcactcaacgttgttcactactccaagaaaaacattgtttggttggttggtgctaccgcaagctgaaaagtgtcagttgtctaagcatatacagttaccctacttaatgtgaaagtgataagctggatagtcctgactcctgaaccctattttctgctgagctaaggattgtggactttcgtcgtgtggatgatggctgttgttatttctgtactgacctaaggatttgttgacttagctgtgtgagtttttccatacaaagctgtttgggacaaaggaaagctgctgctgatttcctttggaaatggtgcaaatcctccattttaatgagaaataaagcatccagtgtct

SEQ ID NO: 24426 - DNA, 2591 bp, Oryza sativa
  ref <308>: DATABASE ACCESSION NUMBER: AK099868
  ref <309>: DATABASE ENTRY DATE: 2002-08-28
gtctctctctcgtcgtctcgcgtctcttctctcaaccgcgaccgcatctcgccgcccgccgccgccctgacgcgccgcctccttccctccgcaacgcccgaccccccggatttcccactcttcgggttagagcctctctctctctctctctctctctctctctctctccccttcctgaggtccgcaaaacgacgcgtggtcgccgccgcggcggtctccgacgacccgaggcgtcgcttcgtccccgactccggcggcagctggaggccccgaatacaattcctcaccggatcgtaaggtagacaaggaggtttctgtgttgtattgcaaggacatccttgagagctaattggtatggataagaagaaagctgttgatgacactgagcctgggccagcgccttctcggcctgtggacagatttggtttcattaagccagaacagggtacctctcctgatgggatttcgaagagtaaattcatacatgaacgtgagcgtgaaagggacggaaggaggataaaaaaatggaggaagatgataggtgttggtggtagtgactggaaacattatgttagaagaaaccctcatgtggttaaaagaagaataaggaaaggaattcctgattgccttagaggacttgtttggcagttaatttcaggcagcagggaccttttgctaatgaaccctggggtttatgagacactggtcatatacgagacatctgcatcagaattggaaataattcgtgacatatcacgtacttttccatcacatattttcttccaacagagacatggtccaggccaaagatccttgtataatgttctaaaagcatactctgtttatgatagggatgttggatacgtgcagggaatgggatttttagctggcttgctacttctttatatgagtgaagaagatgcattttggttattagttgctttgctgaagggagctgttcatgcgccaatggaaggtttgtatcaggctggtttgccgcttgtgcagcaatatctgtatcagtttgagaaattagttctggagcaaatgccacagttgggacagcattttattgaagaaatgataaatccaagcatgtatgcaagtcaatggtttatcactgttttctcgtattccttcccttttcatctaactcttagagtttgggatgtcttcctgtatgaggtcagaatcttgcccgccatataattgttctgtttactttttatctgaggttatgagctaagattgactgattttcaaggcacaatttattctaatacattatgattatagttttagatcccatgcaataacattcttaactaacgaataataagcatctattactgatttactgttttaaagttgtacctaatgaaattatgtagcctaatggagggtgctatatccagttgattattatcaatagcggggtttgtttgagcttacatctgattgaccgacttgaatgcaccttaaaagtaaattctctgatgggttgtacgctgtgcaattgcaatatacgaaccacagaaaaaacagtttttagtagctagttaacacctttaattgcccagttccttgtagcactgttgtccaatctggattctcaaattactgatcactagttggactgaacattttattaaatatttttactatatatgaaataaactcgtgtatgcatagagcatagtgagtcaatagctggctcttgaggtgtctttgatttctccaatgtgcataaccaaacgccaggagcagcttgctatcaggctgtctttctttttctccttttgttcaatttctggcgagatgcaaaggtggaggaaggagtttgggttgaaatttaacttgggtttcactggtttattgaagccaatctcataactatctgattgctggtctggctggcccacatagcactgccattgtactatgcactctggagaaaatctcatactggtgcttgtgttttcatttttattatatcttcaagtcaattattatatcttcaggctaagataatttttttatatgaatggtcattgttctttcctataagcatatacttgtaaagtgcaattgaactcatttaatttccatctactggtcttcttgatgcaagattaaaaaaaaaaatactgattactgtgtcattgttatctacagggcattaaggttgtattccaagttggattggctctattgagattttgccatgatgaattggtcaaattgcctttcgagaaacttctacatgctttcagaaacttcccagaagaggcaactgatcctgatgtactattgccaattgccttcacattcaaggtgtctggtcgtcttgaagagctggagaaagagtatcagaaaaaattagaaggatccaatgcaagcgcaagtactaagcggtctcatcctctcaaattgaaaacgatgagcaggattggtagccgtgccttaagcaactttactaatagtgaaaaatgagacaaatcttgtgttgtataacgagtcacaccttgttttattacactgtaaagaatgacaattattcgttcatctctctgttatattatttttttttt

SEQ ID NO: 24427 - DNA, 2302 bp, Oryza sativa
  ref <308>: DATABASE ACCESSION NUMBER: AK099869
  ref <309>: DATABASE ENTRY DATE: 2002-08-28
ggcttacatgcaaaaaaactcccataaacccctcctcttcgagaaaatccctttttgttcaaccacgacgcgaattcccaagcaacccccccacacccagctgagtagctgacgcagcaccagcagtcgcggggaaagggacacgtctcgccgccccagcttcccgcctccctcccatcccgccgccgcggacgcgtccaagccacagcaacagcaaccactccgacgaacacctcgcctgcgcgatggtggcggcggcgctggacgcgatggcggggacgaggtgggggaggtggctggggctcgtgacggcggtgtgggtgcagtgcatctccggcaacaactacaccttctccaactactcccactccatcaagacgctcatgggcctcacccagctgcagctcaacggcctctccgtcgccaaggacgtcggcaaggcgttcggcctcctcgccggcctcgcctccgaccgcgtccccacctggcttctcctcgccgtcggctccctcgagggcctcctcggctacggcgcgcagtggctcgtcgtgtcccgggccgtcgcgccgctgccctactggcagatgtgcgtcttcctctgcctcggcgggaacagcacgacgtggatgaacaccgccgtgctcgtcacctgcatccgcaacttccgccggagcagggggccggtgtccgggttgctcaagggctatgtggggctcagcacggcgatcttcaccgacgtctgctccgcgctcttcgccgacgacccggcctcgttcctcgtcatgctcgccgtcgtgccggccgcggtgtgcgcggtcgccatggtgttcctccgcgagggggaggttggcggcggcggcgcggacgggcgggaggaggaggaggaggatgggtggtgcttcgccgcaatcaacacgctcgccgtcgccatcgcgctgtacctcctcgccgccgacctcaccggcgtcgggggaggcggcggggtcgtgtcggccgtcttcgtggccgtcctccttgtgctcctcgcgtcccccgccgcggtgccggcgcacgtggcgtggaagtcctggatgaagacgcggaagctcgcgaacgccgacgtcgaggaggcggaggagtgcgcgtccgccccgctcctcgtggcgaaggcgacggcggcggcggcggcggaggcgcgcggccccggcgagaagccggtgctcggggaggagcacacgatcgcgcaggcgctcatgtcgctgaacttctggctcatgttcgcgtcgttcctgatgggcgtcggcacggggctcgccgtgatgaacaacctggggcagatgggcgtcgccatgggctactccgacgtctccctcttcgtctccatgaccagcatctggggattcttcggccgcatcgcctccgggaccatctccgagcacttcatcaagacaagagcaattccacgccccttgtggaatgcagcttcgcaaatcctgatggccgtgggctatgttgtgatggcagttggtatgccaggctccctcttcgtcggctccgttgtggttggcatctgctacggtgtccgcctggcggtcaccgtgccaacagcatctgaactgttcggtctcaagtactacggcctcatctacaacatcctcattctcaacttaccactcggctccttcctcttctctggccttcttgctggcctcctctacgacgcgcaggccaccaaggtacccggtggtggcaacacctgtgttggtgcgcactgctaccgcctcgtgttcgtggtcatggcgattgcctgcgtcgtcgggttcggtttggatgtcttgctgtgcttcaggaccaagagggtgtatgccaagatccatgagagcaagaggcagagcaggtcggcagttgtgcagagggtaagctagccaaaacctacagctatgagaaaaatggtacagattcgcgcaattgcatcaagattcaatgattcaacgagtgcaggttctgtaaattttgtgcaaataagaggatcccatgtcttgattctttggaattagatggatggatccattcaatcggtatagtttaactgccacggaggtttctaggggctgattcgagcaatgtttgccctgtgtgtgtaattcagtactagtactgactactactgactgagaggctgcagattgtggagttgtctgatccctcggtgtaatcagtttagtcagtgtatccttgaggaaatgtattctcggttttagcctgtacgatgaattgttgtgcaattagcctgttggcatataaattcagatcaattcaagcc

SEQ ID NO: 24428 - DNA, 1123 bp, Oryza sativa
  ref <308>: DATABASE ACCESSION NUMBER: AK099870
  ref <309>: DATABASE ENTRY DATE: 2002-08-28
gggtctctctcttctccgaagcgacccacactccccgtgcccgagccagagagtatggccgtctctgtccgttgctgcttcggctcctcctccctttcgcaccacgcgcgactactcctcgtcatcgttgcgttgctcgcgcctcggctcgcttccggctgcgaccgctgcgtgcgccgctccagagcggcttactacacctcctcgctcacgctgactgccggttcttgcgggtatggcacggcggccgcgaccttcaacggcggcggattcctcgccgccgcgggccccgcgctgtaccggggcggcgtcggctgcggcgcgtgctaccaggtgagatgcaaggacaagaagctgtgcagcaacgcgggcgcccgtgtcgtcgtcacggaccgcgccaggacgaaccgcaccggcctcgttctgagcagcccggcgttcgccgccatggcccgccccggcatggccgcgtcgctcaccgagctcgccgccgtggacgtcgagtacaagagggtaccgtgcgagtacaggcacaggagcctctctgtcagagtcgacgagagaagtcgcggacccaacgagctcaccatcagcttcctctaccaaggcggccaaaccgacatcgtcgccgtcgacgtcgcccaggttgggtcgtcgagctggaagttcatgacgagggagcacggaccgtcgtggagcatggcgaacgcgccgccggggccgctgcagatgaggctggtggtgaccggcggctacgacgggaagtgggtgtgggccgaccgggaggtcctgccgaggcggtggcgcgccggcgaggtctacgacacgggggtccagatcactgacatcgcccaggaaggctgcttcccctgcgacacgcacgagtggaagtagaagcccagccacacgtacttctcctgtcgtcacggccattttggttgggctttgatgagaaagaagacgtctctcggctcgcctccagtagagatttcactgacccgatttagagtcctcctaatccctcggcaacttcagaatttcctcctccgtttcttcttcttcttttccaactttgtacatgagctactaactaatgtgtaaagataaaattaaagcaagttac

SEQ ID NO: 24429 - DNA, 4339 bp, Oryza sativa
  ref <308>: DATABASE ACCESSION NUMBER: AK099871
  ref <309>: DATABASE ENTRY DATE: 2002-08-28
gaggcgaagcgagggttcttcttcttcttcttcttcttgcttgatcgggctcctcggcggcgggcgggcggccggcggcggcggcggccgagattaggcgatggggaagcacaagggccgagctgccagcagcggcttggcggcgtcgctgctgccgcatgcgcagggtgccgtccccatcgttggtttcgggggttaccatggcgcctcccgtgttgagcccgctgcgccttcgtcctcgaccgaccccgatgcctcgattctcctccctcccgatgtggacagtgaggtgctgcagcacctaaggagattaggaaggaaggatccaacaacaaagctcaaggcattatctacgctctctatgctctttgcacaaaaacctggtcaggaagttgtgtaaattgttccacaatgggcattcgagtacaagaggctgctgcttgactataacagagaagttcgtcgtgctactcacgataccatgtctagcctcgtcaaaactgtcaagaagggtcttgctccgcatcttaaggctttgatgggtccttggtggttttctcagtttgaccctgctcttgaggttgcacaggctgctcggcattcgtttgaggctgccttcccacaatcagataaaaggttggatgctttaatgttatgtgtgaaggaaacatttcttcacttgaacgagaatttgaagttaacaacacaagcattgtctgacaaggctacaccaatggatgaactagaagatatgcaccagagggtaatatcatcatcattgttagcaatggcaactctgattgacattttgctaggtgtaaaattacaaaattgtgtccgtgacaattccagttctgaaaatacgagtctttcaaaagttctatctggcacattgtcttctgctgaatctgcattttctatgaataaatattttcttgatttcctcaagtcaaaaagtgcgattatacggtctgccacatactcactgcttgcaagttatatcaaacatgtttctcatgttttcaatgaagaagccatgaagccggttttggcactttctacaaaatggatgctatggatccaagcaagcctcataccctctcctggttcagtttttggagtctataccatctaaagctgtaactacagagcaatttgtttttgacttcttacataatctctgggctggaagaaaccagaggcaattatcagctgctgacagtttggcattctttactacctttaaacagagtttcttgtggcttctaaaagttctaccgagacattctggaggaggttcttcggatgatattcctatcaagctcataacttactttcttgcaaaagttgtttggcatgattaccttcgaataccatcttccaaaaaccaggatattagtttgagtggattgtctgatgaagcaatcagtggtgattgtcagttatctcataaggagtcactgttggcatcaagcacacgctacccaacttattatcttcaggatttggggaaatgcatcattgaaatattggatgagatttcagctatggaaaatcatttgttaaatattgcttgtgagactctattgaaggactgtttggatataatccatcaaagggagagtttgccaaattttcagtatcatgtggaacaagttgtgtccttttttatttcgttggatcagctcattgtacagaaaggtaaaacatggccattggaaagcttagcaagaccactgattgaacaatctgtgccagctatcaagtctatggtaagctcaagtgttgaattcattccttctgtttacttcttgttgaggtgtgtttctgttgcaataacacttgcatatatacttcttgaaagagtcaactttattttcgttacttcactaacacatctgatcccagccttctattgctttattttcagtcaattcatctacttgtgtaagaagagtagagtttgagtatctagcagggttgagtatacatttgccaaataattttgctgttattgaacttatctatatttatactatgccaatgaattcgaatttttgaccttttctctccagcatgactctcttgactcgaaatgggagcagagcaggtttgaaaaaagatccattgaagtctaacattagggattgctgagtgtactctgaatatatttatatattatttttaatgcttgcaagtgttacatttctttacaaaagctggtctttttccatttgtctacaaatgatttctgttatagatccagaaggtaagtagggatacagccctatgaactagagatcattgtgggtcaaaattctgttggaacaggatcagctctacctagctgcaggcagagcaagtgacttaagatcttctggaactgccatccatgctatatatatttggggttcatcattcacataaaattttctccttttatagaagtccaattgcttcaattttcttctatgaattgtcaacatatataatgcaaacaacaacatgagcttcaagataaagatatgctgtgaatttatgctattatatgcaaacaagcgctttttaccagccagattgatattctaaaatgttttgctttcatgcaggacactccaattgttgttaaacttctatcagttttggttgaaatattcaggcctgtccctttgttcttgaagaattcacagaaagagagtgaggaatctgtccaaggttatctggatgtgttcaatggtgactttgtcccctggtgtttggataggaaatatagtacttgtagctcaaagatcgatctgttgctctctttaattatagatgagtgcttctttgaccagtggtgtacgattattaaatatactagtgctaagcaaaagcaccctgttgataataagaactcacacgttgatgaccaatttgaattgctgacacttatacttcaaaaggtaagagaaagaattgctgggggcaagttgagaaatttgcagaaaaatggctctctaccagaacattggcggcatgacctattagattctgctgcagaatctgtcttctgtgatttgcctgctacagattcccatgtccattatgtatgtgctgcacttggtggctcagatcaagatgaccaaatttgttttctttctgctgatactgtccacaaaatgctcgggtccattttgaagtgtttgacatcagtactcatgacatcaacttttgagtgggcaaggtttgcatatgtggtgttattgcctactgaaccaaaggactcgaaggttataggagcacaatccttttcatcaaacattaagatggctcattttgctttcaaagttcttgagggtagcttatttgccctgagaagactagaggaagattctttatttccttctgttctggcagctctgtttatcattgaatgggaatatagcatggccttaacactcgatgaagaacatgacttgaaaggttataaagaagatattgatgttgggtcttctgcatgcaacagttcagatgatcatttggatgagggaatacatttgaaagctaaccttgcagagagtatacataccttttgccaaagcttaagtccatccttttggagtgatcttcatccattcaccttgaataatttgttaaatattttagctcaatctgtcaggtgtgctttatttcagacactagagttgccaactgagagcacatcagtcttatgctcagagtggatggtgaacatgttgaagctcatctctcttgatcacacaaaattgcagagttttttttatcttcttttatctgagggagaatattggccactctgggtgaaaccatctttacaaaatgagaatgcaccagtgaagatcaaatttgagccagttattacaaatgaaacgggactgaaacaccatcaatttgttgcttttgttgacaagcttgttcttaaccttggctttggtgaagtgatcttaggtgttccaggaaatacatgttacaacacatcacaatcaattgatactacttcaactgttccttcattgtctagagcatgggttgctgctgagattctttgcacttggaaatggaaaggggggagtgtattcagcacattcttgccttctatgattcagcacttgaaaatggaatcatgtgcagaggtcagcatattgtccatattgcttgacacattgttggaaggagcttttcatgagtgtaaccagtgggtactgttcaatgcttggcacatttctgacaatgagattgagaaaattcaagatcattttctacgtgctcttgcggctttgctatttagtatcaatagcatcaatgagtgtatttggag

SEQ ID NO: 24430 - DNA, 1156 bp, Oryza sativa
  ref <308>: DATABASE ACCESSION NUMBER: AK099872
  ref <309>: DATABASE ENTRY DATE: 2002-08-28
gggtactctttgccctcgatcgaagctaccacccatcccaccttgcccttccttcgccgccgattccgatctgggccgccggcgacggcgaaacacaggcaaagcaaagataaaggtacaactgttgtttggtgcttgtccagctaggacagccgagtgaagtgccagcatgggtggcatccttggacgccatgacaccatgaagaggagctctcacggctcgaagctcgagacgaagatggtggagtccatgcagcagagagcgtcgcacgggacttcactcaagtcgttcgatagcatcatcatgaagtttccgaaaatcgatgagagcttgaggaaatgcaagatcatcttcgagcaattcgatgaagattccaatggcgaaatagataaacaagaattgaagcattgtttccaaaagttggaaatttcattcacagaggaggagataaatgacctctttgaagcttgtgatataaatgaagacatgggcatgaagttcaatgagttcatcgtctttctgtgcctcatttatctgctcaacgaaccaactgtgtcagaagcaaagattaagatgggattaggaaatcttgaggcaacttttgagaccttggttgatgcatttgtttttttggataagaacaaagatggatatgtcagtaaggaagagatggttcaatcaatgaatgagactgcaacaggggaacgctcttctgggcgtatagccatgaaaagatttgaggaaatggactgggacaagaatggaatggtgaccttcaaagaatttctgtttgcattcactcgctgggttgggattgacgaaaatgaggacgacaatgaatgaatttcgtgaagataagttgttcaattattaggacctggccagcctaaggaggttataaagtttggtggtaatgacaactggagcatatgatgttgattagttgatcgttgatattgtgtattatcttataggatgattcaacatgatcctagtagaatatcttaacatgcctgaagactccatgtatgcttacaaatttaaagagttccatgacagatagatctgaacttgtacagtaattctaatggttgtacttaccaatatcctggacttgatgtggagaaatgctataattcagttgcatgctcaacg

SEQ ID NO: 24431 - DNA, 1039 bp, Oryza sativa
  ref <308>: DATABASE ACCESSION NUMBER: AK099873
  ref <309>: DATABASE ENTRY DATE: 2002-08-28
ggtcagttcatcagttgcagttcagagttgcccactgctactttactttgcagctattttgcttctgcttcttcttgttcttgttgctgttggtaatactgcgagagaaattaatcagtagagtgttcatctactatcaatttttgatcgaggagagatggcgggaacggcgaactgcatcgacatcctcatcgccatcatcctcccgcccctcggcgtcttcctcaagttcggatgcggggtaattatggagtacctaattaaattactctctgttaccttagtttcttccatgccttttgcttaatttggtcgatcgatttgctcttgctaattaacttgcacatatatatgcagcatgagttctggatctgcttgttgctcaccttcctcggctacatccccggcatcatctacgccatctacgccatcaccaagtaattcatcattagttactacatcatcaaccaaatcctcaaggtgaagtagtgaaatcgaattccctaatctacctcctcctagctaattcatcaaaacttcacttaatatttttccacacatatcaatctaaagtttcctttgttttctggatgtatgtatgcagggatgggctccaaaccgcttcatctatcttctcgattgccgtgtgcttgttggaatttggaaatgatatatgcatccaaaattcagtcctgagtgctccaattcttgtcatctagtcattttcaatgtccccccagtctcttcctctaatgtttgatgatatgtagaatctcttgctgttaatctgttgctttcgtgtgaataagctcccctcttatgtatatctatctatgacttgttttactagtaaacttgattattgagagcttgagacttgcttccctgtctgtctgtatatcttgttccaacactggaactgaatcaataattgtgcctgcactgctcaagagtgctctgaatgtagtcataattgcagataattagtacaattatctcactcaaatccctttaataaaaaggagcatcaacttggatc

SEQ ID NO: 24432 - DNA, 1523 bp, Oryza sativa
  ref <308>: DATABASE ACCESSION NUMBER: AK099874
  ref <309>: DATABASE ENTRY DATE: 2002-08-28
gattttcccacctccacctccacctcccccttcccttctcgccaatctcacttcatcctcctcctcccatcaatggcggcggcgctcgcgttccccacctgctgctgctgccgccgcccctcgctgcgtccttccgcgggtcgccgcggccgtcgccccgtcgcccgctgcgcgctcccctcctccgagaattcatttagctggaaagaatatgcaatttctgtagcattatcggctggattaatcactggcgcaccaacgttaggatggccagcacatgcttctcctcttgaaccagtgatcccagatgtttcagttttgatctctggacctcccattaaagatcctggtgctttattgagatatgctttgccaatagataataaagctgttcgtgaagttcaaaaaccactagaggatatcactgacagtcttaagattgctggtgttagagccttggattcagttgaaagaaatgtaagacaagcatcgagggcactgagtaatgggaggaacctaattcttggcggtcttgctgaatccaaaagagcaaatggggaggaattattggataaattggctgttggacttgatgagcttcaacggattgttgaggacagaaacagggatgcagtagctccaaagcagaaagaacttctccagtatgttggaactgtagaagaagatatggtcgatggattcccctatgaagtgccagaagaatacagcagcatgcctcttctcaaaggaagggctaccgtggacatgaaggttaagattaaggacaatcctaatttagaggattgcgtatttcggattgttctggatggatacaatgctcctgtgactgctgggaacttcttagatctggtggaacggaagttctatgatggcatggaaattcaaagagctgatggttttgttgttcaaactggcgatcctgagggaccagctgagggatttattgatcccagtactggtaaagttcgtacaatacctcttgagttaatggtcgatggtgacaaagcgcctgtatatggtgaaacacttgaagaacttggccgctacaaggctcaaacaaagcttccttttaatgcatttggaacaatggcaatggctagagatgaatttgatgacaattctgcttctagccaaatcttttggttgttaaaagagagtgagctaacaccaagcaatgccaatatactggatgggcggtatgccgtatttggatatgtcaccgagaacgaggactacttggcagacctcaaggttggggatgtcattgaatcgattcaagttgtctcaggcttagacaacctcgccaacccaagctataagattgtaggataaaatgtttctttttttcaggagttccttgataggcaattattttaccatattgaaatcagtgtaaagtgctataatctctaaccctcatctcatgaccttctatgttttgtgagttttgcaatatgcgggattcaatattacttgaaagtaaagacgttcatcatttgtct

SEQ ID NO: 24433 - DNA, 1533 bp, Oryza sativa
  ref <308>: DATABASE ACCESSION NUMBER: AK099875
  ref <309>: DATABASE ENTRY DATE: 2002-08-28
gatccgctacaccgaaaaaaaaatacccacaaaacccggtgaggccgtgacaacgcgccatggccgccgcggcgcccgcgctgccggcgttcgcctcgcttctcctcccctcatccagctcgcctccccgccgcatcccgtggccccgccctctgccttctcgccggggcgctctccgccccgtcaagctgctccccgccatctcagctgtggagaagggcaagggcgccgccgccgaagccaaggaggtggagctggaagggatgccgccggagtactacgacgaggaatggcaagctcgtcagcgggaaaagactaaggaatggaatgcatatcggaagaaagaggaagctgaggaagaaaggctaacaaatgaataccgtgaaataggcatgcgtttgaaagcttacccacaggaagaagttcgcaaagctcggattttggtttcaagttttataagagctggtgaagatattgaagaggaaattgagaaggctgctgaaagaggagagcttactgaacttgttcttatggtcatatggaatcgacttgatgttgctcgccgcgatgatgagagggatgccatcagaagccttgatctcttatacagaagggtagagacggaaattttaaggagtgaagcaactcctgctatgagattgctcaatgaccttctgaatcttcatgatggatctgatgatgacaagtggttaaagaaatgtaaaaaacatatgcttgaagtttttcccagagaagacccgttcaccatggtctttcctgctggtttcaacatggaggaacatcaaggacagatcaagctgccacctcaggatgatgatgttcttctaagagttgatttcatcagggaagttgatgagctcttgaaggaagttcaagctgcacatgaaaacaataaggtcccaactggtaatgacccggaagctgttgcgaccaagttgaagtatcaagagaagctgcggaccatacgtcaagtggaatctctcctggaactggcatcctccctgaaatggtgaggattgagtttgcagaggaccatgaaattctgcgcacataggactagaagttaccggctgagtacttgatagctgcaattagggtgcagccttttgagctgattctcaggtttctgctagttagaaactcctagcatttgaatacaaaggttagctgatatctgcttgggcgtcaatgcattttcgtagaatattttctgcacctgggtgtccaactcctattagatttgtactgctctagtcattcagagttcaactgtaactcaagcagtgaggctttgctctggattaatgtatcatcatgagaatggtgtgagggtatctcacacgctcaagctctagcatgaggcagatgagtttcaagccaacaagctgtgtctctagtgtgcataatcgagatgcagagatggttgagtacttgagttctgaagttcccaagtcaaatactgtgtaaagattttcgtttgaaggaaaagaaaacattgaatgtaacattagt

SEQ ID NO: 24434 - DNA, 1567 bp, Oryza sativa
  ref <308>: DATABASE ACCESSION NUMBER: AK099876
  ref <309>: DATABASE ENTRY DATE: 2002-08-28
ggcgggttccggccagagctgccgccggagggcggtggcggcggcagcggcggctactgacggtggcagaggcggctcaaggcggtggctgcgcggagggtggagccagcggcggcttccctccctcctcccagatccggtgtaggcggaggtggatggtggaggcggcgcgtgccgtgtagggtggacgcggcggcggctccgccgggaggggggagggcggtggcggtggcggccctcccctctggatctggcgaggcggctacgccctcggctgtatccgccgccgccgctgtcggatctggcgaccggagaagacggcgcggcggaggaagatgaccgcgataggcgctggcgacggagcggcggaggccgacagtgctaatgtttcagtggatgggaacatcatcaacttgggattatggggcactgctggacaagaggattacagcaggctgaggattctgagctacagaggagcggatatatttgtgctagcattctcactggtcagcagagcgagccatgagaatgttctcaaggagatactgtaccaaaaactttacctttcccttctctggtggcgacgttgggtcaggtggcggcgtcggagccggcgccggtgtcccccccccttctccctccgctcgcggcggtgtcgggcgggtggcgcgtggaactgatgccaccgggggaatccttagctcccacttgatgtttctcatgaggatggagtaagaccgcgggttaaccattttctcactggacgggcgtctgttccaggtcgagtatgccattgaggtcatcaaggctatctcaaaaggaaggcaaagcatagaagcacagaacattgttcgagtgagtgcatatctattccttcgttagtatgtacagcaggaaaattatgaaatcttggttcttcaaactgagttcttggattacctcttgcaactttacttggccaatatacgcctcaagaatgcagcaactgatgtagttattactgtatatgagccactgttgataaatggtcttatggaagcaacactatctcatgctcgttcacctaaacagcttaaggaaccctggtggcctaccaaattggcttggcaatgtagtagtctctgttgccattgctattgtcatatgttttacctgtgtgtatcttctttcttacgttcatatatcagattgttacacctgtcctgtccacgagattgcatccatccagaagggaatgaaaagagcatcaaggcatttttggcaaattattgattttgttcttgagcgtggcatttaccaatccattatatatatattggttttattacagtacaaagaaatcaagttcatgttactcggtgcattgttcatacagatgtataaaaatgttggtgtgatgtggcaatttgagcaatattggaccttgcttcttatggcattccagttggctgatgattgcagttacatgttgatggcatccttatatgtgtagttatgtggcaaagcttgtttaactgactattgtctttgtaacaaacaaccaattatccttactattgttact

SEQ ID NO: 24435 - DNA, 2057 bp, Oryza sativa
  ref <308>: DATABASE ACCESSION NUMBER: AK099877
  ref <309>: DATABASE ENTRY DATE: 2002-08-28
ggggagccggccgccgtgggtggggctggcggcggcggtgtgggtgcaggtggcggcggggagcgcgtacgtgttcccgctctactcgcacgccatcaaggaggcgctggggtacaaccagaaggcgctcaccatgctcggcgtcgccaacgacgtcggcgagaacgtggggctcgtccccggggtgctcgccaaccgcctcccgccgtggctcatcctccttatcggctccgcctgcgccctgctcgggttcggcacgctctggctcgccgtcaccaagaccctcgtcatgccgtactgggtgttgtgcatagccttatgtattggcacaaacagcagcgcatggttgggcaccgctgcacttgtgaccaatatgaggaactttcctctcagccggggaactgttgctggtctgatcaagggctatgttgctgtgagtgctgctgtctacacagaaacatttaatggaatgcttcagaactctcccacaaaccttttgctgttgcttgctttggggatccccaccgcatgtgttctggtgatgtgttttgttaggccttgcactccatcactggatgaggacaacgcagcagagcacagtcatttcatgttcacacagatctctagtgtggttctcggtgtatatcttatggtagctacaattctcggtgatactttaaaactaagtgacgctattacctaccttttgtttggtataatgatacttttgctcctttctccactggcaataccaataaaaatgactatttatccaaacaaaccaaaaagggaaaagactagcacccttgcactgtcttattcgactgatagtttgtctggtccggatcaagagaattcagaaccacttcttggtggcacttcaacatttgtcactggagccaacgattctgatgaggctactgatgtggatcttcttttggccgagggtgagggagccgtgaatttgaaaaagaaaagagggcctagaaggggggacgatttcacattccgagaagcattggttaaggcagacttttggctactatttattgtgtacttttgtggagttggaactggtgtcactgttctgaacaacctagctcaggttgggatggctgttggtgctgatgatactactatcttgttgtgcctcttcggcttctgcaactttgttggccgtatccttggtgggtctgtctctgaatatttcgtaaggtcaagaatgcttcctcgccctttctggatgatgtgcacacaaataatcatggtgataaccttcctccttttcgcaactggccttcatagcttgatttatgtgtcaacaacatttctgggcatatgttacggtgtccaatttgctgtcatgatcccgacagtctcagaactttttgggttgaaggactttgggttgatgtacaacttcatgttgttagtgaatcccctaggtgcattcttcttctcagctcttctcgctggttatatctatgacaaggaagcggcgaagcagcagccaggcgtgttggaaccttcaacctgccttgggcctgactgtttcaggcttaccttctacgtttgtgccatcgtttgttgctgtggaaccctagtgagtgtggttttcatagcgaggataaagccagtttatcagatgctctatgcaagcggatcgttcagacatcctcggagtcaacaactccattgatggcacgcgcatgaacacagactattttggagagaattatcagctcggtgtgtatagttggctttcttatcacttcatatcccagtgctgtattgtcctactgttgcttggtccgtccccgttggatcggagagttattttgatttcatctgtacctgttctgtaaagcttgtgatcagtagcagactagcagttaccagcatacagccggctgtcgaagggatgaaacttgggggcgcgtatacatggtggggccgttcttgtgcttgtacatcaagtttgggaatgttgtacaatatcttcttcatcccactgacgctgttaataccatgagtgcaatgagcctggttatgtgtct

SEQ ID NO: 24436 - DNA, 2283 bp, Oryza sativa
  ref <308>: DATABASE ACCESSION NUMBER: AK099878
  ref <309>: DATABASE ENTRY DATE: 2002-08-28
ggcgcctaatccacaccaggtgcccgacatgtgttcgacggtttgcccgtgagacgacgcgcgtcggccatggcgctcgccctcctctccccctcatcagcgagtgcccaccgtctgccgcgccccatcagctccccgccgctcgggcgcgccgcctcggccaccagcatcggttcctccttcttccccctctgctcctcccctccgtcctccggctcttgctccttgcggagggccagctccgcgggcggcgcaagcgagccagaagcgtcgggggccacctccctcgacgccgacttgctcaggcgtgtcgccggcgccgcggacgccggcgaggcgctggacatcgtcgcggagtcggcgggaggcacgggcggtctggacgcgtccgactgtaacgcgatcgtcgcggcggcgcttgaccggggcaacgtggagctagcgctctcggtgttcgaggcgatgcgatccggctttgcacgagctggggcctggaggtgggcgaggccagacgtgcggacgtacgcattgcttgtccagcgattggcagctgctctgcgtgtttctgatgctcttaggataatcgattatgtatctcgcgcaggcatttcttcggcagaggaggtcccatttgggatgattattcgctgtccaagctgcatggtagcagtcgcagttgcacagccccagcatggaactcagactgtttcttgttcaaaatgccgatatcagtacgaactattttctggagatatcatgagcatcgagtctgaagaagttaggatctcctcctgccgaacgcagcatggacatttcagctttggacaaggcattgcgatttataaatgtgataaaagacggtcttccagctgctgtgcactctattgtgattcgcacaccttcaggaacagcccgtacccatagatttgctacgcagactgtagaactgcctgctcaagaaggagaaagagtgaccatttccttggctgccccatcaaatgtttatcgtgaaatgggtccccttaagatttctgcacgctcacaagggtttagaccaggagaacccatgtctctcaccaatcacatcaacagacaagtctcaagattgctaagagctccatcaaagaacgagggaccattcgtctttaatccatatttgttggtcggtgctcttgctcttcttgcctctggagatgctgcttctgcattcatcgacccaagcctccctagatttattacagcaactgcttttgcatcagctgctgttggaacagcactaaatcaagtgatcctgccagagattcgaaagcttccacaaaagacagtagatataattgctgttcggcagcaacttttatctcagtacgacatgcttcagactcgtctaaaggatctgaaacaactttccgaaaaggaggtgtggatgctggcaagaatgtctcaactagagaacaagatattagcatgctcgtcgaggtagagtgaagagggtacttgaaagcttggaaagtacactcctggcaaagattgagctgatggaaagttatgcaaaagtaatagagcaaattttatatatggtatgtataactcacgtttattatagctaaatagtgaaatgttggatatgccactgcagttgtgttctatgattgaaattgaagttgagatggactcagatgttattgttgctgaagcagcaagtagtgcagaaaggatatcagaacaaatacagcaactaatggagattgatagtcttgaagagcaatggcgtatacaagctgaggctaatgacgaagcagaaaggctgcttaattcagattcttcagaaacattttccgctgagcatgtataatgagttattttggatattttgtggcactaaaatgatcgatgtctccatcaacttgctcttgtcaacagtgtactagaaggaaagctggatggatagtcaggcaattgcacagagataccatcagagtgcaggtcaccaatgtaaactcgtttcgggaacaccatcgtagcaaatccaaacgctcaggttattgggcgaacctcccttagccaaattgcctaccttattaagaataaggtacccgattgcttccgattgctcgaatactatggtatccttgcgcccaatactggtttgtttgcttatgcattcattgccaagtatatattgtctagatactgtagaaagttttgcccattttggttctgaatgtcttacatttcaaagtcctgatcaaatttttatggaccaagaaaaccttcctttgcagc

SEQ ID NO: 24437 - DNA, 3203 bp, Oryza sativa
  ref <308>: DATABASE ACCESSION NUMBER: AK099879
  ref <309>: DATABASE ENTRY DATE: 2002-08-28
ggacaagcaccattcctctcaactgaacctgtcaaacagagagagaagtagatgatagcgtgagagaatagaacagaagaaagaagataaaaaaaaagaaaaggaaaggaaagctctgtgtaaagcctgcatctacgtgctctctttggttggggtgttcttgctgctagaactagcttagcctggttctgccatggagtgaagaggcctctcgttcatctccgattcttgggggttgtcttcagctgttcagcaagagccgagagcttagcttggggcaaaggaaatgccgtcccggatgatgcaggcgttcgcgcaggaggcttccgacttcgaccggcagatgggctgcatggccggcatgttccagatcttcgaccgccgccgcctcctcaccgcgcgtcaacgcggcggagcccgaggcacggcgccaccaggtagccatgttttgccaaacagcaacagcaatgtctcgattcaaaacccagttgcttcaaacaacactctggacaaaaccttcagcaaaagtatgaccgagaacagtagcctctccatggaatcatcgcgggcatcttcttcttcctcatcgtgctcttcgttctcgtccacagacatcaacagaccaatacaacaagagctctcctacatcaacaaagagcgttttgctgggaagccaccaagaagctcacagacaaagagtgtgaaatgttccaagacagaggccaagaccaaagacccacacactggctttagagacattgtcaaggagtccatcaaccgggaaacccatggtatgaccatcaagacgtcgacaaaggagtccagaaaaggattgcacaaagactcaccaaggccgttgctgatctccaaatcaaccgatggaacttacgtgattgggatcgacaggagcaccggcgttcctggatatgttcatgaatccagcaggccaccacgcttctcatgcgacgatcggcaactcctgaggtcggtcgaagcgcaagacagcaagaagccttcagcaaagctcaaggagcttcccaggctgtccttggacagcagaaaagaatccatgaatccatgttcacgtctgaagaactctggctacataagaactgatgacaacctcctggatgttctgaagcaccaagaatcgccgagccatcagcgggccagcagcgtcgttgccaagctcatggggttggaaggaactactcctgacatccatgagacggcaaggtcacctacacctgtccatggcacgcaaattgatcagccgtcacactgtcaaaggatcaagaaccaagatcatagtgtcccggtgcagaagaatcactctccagtactgaaaaccaatccttctccaagaattatccctgaagcagccccatggagacagaatgagagagctgtaacaggacgtgcagctgaagtgaagccaagaactgcatccatctatgctgacatacagagaagactcaggggtctagagttgtcggaatgcaacaaggaactgagggctctcaggatattgagcacactgcacaaaaaggatggcccaagccagagcgacaacaatcctgaattaacagccattcaaaagaaggcctctgaacaaatagttgattctgaaaatttccagtctccaattgtgatcatgaaaccagcaagatgcatcacaaaacctgatgcttcagatactttggttgctcccctttcaaggccaaaaggcataagaagactacggcatgaagagacatctttcaccaggaagaatgaaaacagtgatagcaagagaaatcattctccgaatgaaagtgctcattccagtggtgaggaacctgtaaattctgcaagatcaccaaggctttccagctcattgagccccaggctggcacagaagaaggcggactctgaaaggaggtctcgtccaccggttttgccaacgtcaccaggcaagaaatctaaagaaacagtgtccccaagaggcaggctaagatcaaggcactcgcaaacaaagagcaactctgacaacgataatgtgttacacatccctgaaactaaaatcaatttggcaaagcagatcgatgtgggtgtcgttgatcatccgaatcctctgaatgccaactcaccatatatccatcaaagcaaaatagcttcaacacccaatcgtgaggaaatgcctacaattctacctgcagacaagaagaagatccatccacaggagaacatcccaagtcctgtgtcagttcttgatgcaacattttatcatgaggggtcatcgccttctctgaagagaatctcagattccttcaaagacggcgagacgcatacttcagatgagagttggaacccaacaagcctccctgatacaccaccttcaaaggcaagcaacgatggcaaccagataaaggcagaaaacatgaaagccctcatccaaaagcttgagctcttgcaaatgttgagtgaggaagctctgaaaaccgatgacactttttcatcagttgctgccaataaagatcaccagtacctctacgagatactttcagcatcagggatcctacacaacaaactaaattttcaaatgatgcctcatcagctgcgaccatcaagctacccgattaatccagagcttttcctcatccttgaacaagcaaaaccagacgaagaaaagctgcaccgtaggctcatatttgatcttgcaaatgaactcctcgcccagcaaatggatgccaaccacactgtgaattcatcagtgcagttctttcagtcaaagaagttaagtgggtggcaacttttcaaggacttatgtgcagagattgacatgatccagtctcggtcctcaatgataaggtgctctgaagaggaagatagcaggctagcagaggatgcaatgcaaggcatgaaagagtggaagagctccgacagtgaacggcaaggaattgttttggccattgaaaaatccatctttaaggatcttattgatgagataattagtggagtagacaaagggaaggtgcacctgacgcaatggaagctaaggaggcagctgtctttcatcagcatataggccaaatttctgcttcttaggaagcttagctaatggtatatgtaaccgttttaaactggctatacaatccatgagttaactgacatatatatatctacatgagcaagcaaacagtaacactgagatcttgccaacc

SEQ ID NO: 24438 - DNA, 1389 bp, Oryza sativa
  ref <308>: DATABASE ACCESSION NUMBER: AK099880
  ref <309>: DATABASE ENTRY DATE: 2002-08-28
gagttggtaaccttgttttcaatattgctcggaactcttaaattttttgacatgatccttctctttaactttcctctgataatgccttttcctgctcaggtcttctgactgctgtaaacaagaactacttccatgtcttgaactaccgggagcttctcttcaatgattttggagatagagttgcacagctgttgcatgtcgaatcagccatgcctttctggcagaaccgaagcagcagttgcatccagcagcagagcctcattgtgaacacccatttgctgttccctcatgaccacagcctttcaatagttcggctgaagcaggtctataagatccttcagtacatagaagcttatcaggaagaacataaacttggtccaatgccaatcatcctatgtggtgactggaatggaagtaaacgtgggcaagtttacaagttcctccgatcacagggctttgtttcgtcatatgacactgctcatcagtacagtgatagcgaagaagatgcccacaagtgggtgagtcatcggaaccatagaggaaacatctgtggtgttgatttcatttggcttctaaatccaaataagtcgaggaagcccctgaaaactagctggaatgaagctgtctttggtatcatcaagtatcttctcctccaagtagcgtccctttcagaggagaatgcatttgcactcctcaaggctgacagtcctgatgatcagatcacatattcaagcttctgccaggcactttgtcagttagggatggtccatcctgatcgcctaaactctgaagaaattaaagatctgtggagtgaagctgaccatgacggggatgatattgttgactacaaagaatttcagcggtgcatctggagccctacatgctgcagccaagaggaggaggatgagcgaaatcgacatctccgatggaagccttgtcacgtttgaggcgaacgatgaagcctttggctttactgtgaaggaagctgttctcttccccccagaagtagagaagggcatgtggcctgagaactatagcctttcagatcatgctccccttactgtggtattctcccctgtaagaatgccttgttctccacgcacccctcgaaccccctagccatcaattgtcaatacttgcgtgcatacaggaaaaaagaagccttgtacagcattagggtatactttcagaaatagtgagatatacagcagatccagagtttaggtacaaaatggagtaacatagggcgactgaatagttttctttcctttttttgtttattcgttcgccttgagttgctgtctgttgtatgtatctaaacatggttccatgttcataaatgtaaattttgctctgtttttgtatgtatatgattaattacattatgtc

SEQ ID NO: 24439 - DNA, 2660 bp, Oryza sativa
  ref <308>: DATABASE ACCESSION NUMBER: AK099881
  ref <309>: DATABASE ENTRY DATE: 2002-08-28
gatcgcggcgccgccgtgctcgcgattaacccagccgtcgcagctgcagtctccgccgccgccatggcggctcgtgcgctgctctcccgcctccgcttcgctcctctcagccaccaccaccaccgccacctcggccgcgctctctccgccgccgccaccgccgatccaccacccgacgagtcgccccctcctcctccgcatcctccaccgccaccgacgccgccctccaactcgaagctcttcgtcgccgggttgtcgtggtccgcggacgagcggtcgctgacggacgccttctcctccttcggcaccgtcaccgaagatggtgtgcgcggtaggtgttcgatgaaacggctcggaggaggaagtgggtgttccgctcgcgcgcgacctcgccaaatgttcgatgaaatgcctgttagggatttggtcgcatgctcggctgcaatctaccggcatgcgaagagcgggttgtttggcgaggctgtcaggctgtttgctggtatgatgagggtgggggtgagccccaactcgttcacattggttggtgctttaatagcagctgctgggatgggcaacttggtgcttgctgagtgcatccatgggtgggctatgaagagcctgttggaatccaatccttttgttcggaccgcattgcttgattcctatgcgaaatgtggacgtcctacgaaggcctgggcattgtttggtgaaatgagggatcctggtatagttacttggaatgcattgatttctggtctagtgcacaacgatctgtttgaggaagcattgctggttttcaagaggttgctgttttcatttggaccagttcataatgttgtgactatgattagcattgctcaggcttctgctggttgtggtgaccttggattgtgtgagagtgcacatgcttattcagtcaagattgggcttgattcagatgtctcagtgacaaactcaatcttgggtatgtacttgagctttggtagtcttgcgattggaagagagattttcaaaaagatcgctgttaatgatgttgtttcttggacgatgatgatgggtttccttcttgaggaagcccaggctattgaagttatacatatgtttgttcagatgaggttgagtggcatagtgcctgatagggtagcattggttacagtggcgcaagcttgtgcacatctgggtgatggaaggataggaaagttggttcataacgagattgtaatctgtgggttcagtggtgagcttcctgcagttaactcgttaatcacaatgtattctaaatgtgaggatttaagttctgcaagactgttgtttgatggtacaatggagaaaagcttggtttcatggacggcaatggtgtcagcgtatatagaaaatggatatgccctagaagggatgtatctctttgcgaagatgaggcatgaaggttcctttatgattgattctgtgacactggtcaccttattgcttgcttgctatgaggttgctaagtttgaactatgtattcaacttcatgcatattgttacaaatcgggtttgtgtctgtacaaacctgttcttaataccctcattgcagtttatggtaagtgtggatatgcgactttagcgcataaagtgtttgatgagatgatttctcggaatgctgtctcatggaatactatgattttatcctatggtgtaaatggccaaggagagaaagcagtatcacttttcaatgaaatggagaaatctagcgaggatcaagacagtgtgacttatttgaacacattgctagcatgtagccactctggactggtggatgatgggatgctcgtctttagaagaatggttaatgacaagggaataattccatgcccagagcatgtcggatgcatagttgatatgttggcaagagctggccgcttggaggaagcagcaggagtggctagcttgactcacaataaattaggagcaaatgcttggaaggctttgatgggaggagggcatttgcatggtgacatgaaatttactaaagttgctgcaaagaaggtgctcaccacggaatcatttgattatgggcatgttgtgttactttctaatgcttatgcatcatctggcaaatatagagctgctgaatctgtcagatcctgttatgcaaagcgaattacaaggaaaactttagggcttagttccattgagatagtgccgtacagcagaagatagtagaacaactcttacctagggaagagagaagatacatcaaacaattagtattcactgtctgtctgtctcaagctattggaatctatctcaggcataagttgagtattcactttcaggttgccaagtctcctgtggaaaaagtaaagcatcaagcatgattttcaaatgcaagttgatgaaatagatgattgccttggacctttttctttaaaagaaaaatatgccttggtctatggaacatgaccaacgatatcacatctcaactcactattgctccaggaatctctaacacgtgaatatggattctaatgtgagaataatgtatgacaaaaactctggaaggtcaagaggttttgggtttgtgcacttctcaaacgagtatgaagctaagtgcgccaaggatgctatggatggaaaggtaatgctaggacgaccattgcggataagttttgctcttg

SEQ ID NO: 24440 - DNA, 3107 bp, Oryza sativa
  ref <308>: DATABASE ACCESSION NUMBER: AK099882
  ref <309>: DATABASE ENTRY DATE: 2002-08-28
ggttggaaattccgcgcggtcaaacgaagcgagagaaaaaaaaatttcttaaaaacaagacaaaaaaaaaaaaaatcctcgagacaccgagcgagtgagcgagcggcggccgaggcggccaccgacgacgaccgccggagccggagcccggcggagatggagatggagtccaagtacgcggcgctgcggcgcgcggcggaggaggcggcggcggtggacgcgcacgcgcacaacctcgtcgccgacggctccgcgttccccttcctccgctgcttctccgaggccgacgccgccgacgccctcgccctcgctccccacaccctctccttcaagagaagcctgagggacatcgctgcattgtacaactgtgaagcttcacttgagaaggtggaggagttcagaagggctgaagggttgtcgtctataagctcaaagtgcttcaaggctgccaacttatctgcaattcttatagatgatggcatagactttgacaagatgcttgaactggaggcacacaaggcgtttgctcctacagttggcagaattctgaggattgaaaagctggcagaaacaattattaatgatgaatcattcagcgcatcaagctggacacttgactcttttactgaaatttttgtcactaagctgaaatcagttgccaacaaaattgttggattgaaaagtatagctgcatatagaagtggcttagagattgatccaaatattagcaagacagatgcagaggatggactacgtaaggagttatcaggtcagaggcctcttcggattacaaataagaacctgattgactatctatttacttgcagtcttgaaattgctgtatcatatcacctgccaatgcagattcacacaggatttggagataaggacctggacttgcgaaagtgcaaccctctccatctgcgtgctgttcttgaggacacaagattctctaagtgccaaattgttcttttacatgcctcttatccattttcaaaggaagcatcatatctagcatcagtgtactcccaggtataccttgattttggcttggcaattccaaaacttagtgttcaaggaatgacatcatcaattaaagagctccttgagctagctcccataaagaaggtcatgttcagcacagatggttatgcttttccagagacatattacctaggtgcaaggagggcacgtgatgttgtttatcgtgtactctcagctgcatgtgaagatggtgaccttagcattcaagaagctattgaagcagttgaggacatatttagacgaaatgcattgtatctatacaagttgaatgttgccaacgggtcagtcggtcagataacagcaatagctgacaacggcataccattatctgaacaagatgtgctctttgttcgagtcgtctggattgatacttcaggtcaacataggtgccgcgttgtgccagccggaagattttatgaaattgctaggaaaaagggtattggtctgacttttgcatcgatgggaatgacttcatttactgatggcccagcagatggaacaaaccttactggtgtaggagagatcaggcttatgccggatatgtcaacactattgaggcttccatggtaaacttgattttttatgtatatttcaatgatactcttttcaagtaggccacctgttcacccattatgacactttttattttcatccttgttagtgtttactaaagtttacttaattatggcagcattagttcttaattgaataatgtcacttctgaacatcatataatggtggattgctgtttgtgcaaggtcaagacgcgaagaaatggtaatggctgaaatgcatataaggcctggggaagcctgggaatactgtcccagaaataccttgggaaaagtcacaaaagttctgctagatgagtttaatgtgacaatgatggcaggttttgagaatgaatttttcctacgtaaaaaagtagtaagtggtgaaaaggagctgtgggtcccatttgacaataccccctactgctcaactacagcattcgatggtgcatcatctgtgttgcaagaagtatatacttctcttaaagcggcggaaattgtggttgagcagctgcatgctgaatctggaaaagggcagtttgagatagccttgaagtatgtgttgtgcactcttgctgctgacaaactgatatatgcccgtgagattattaaatcagttgctcgaaagcatgggctacttgcaacttttcttccaaaacctgacttgaatgatattggatccggttctcatgtgcatctgagtttatgggaattcgatcagaatgtgttcatgggatcaagtgaatataattactatggaatgtcaagaatcggagaaagcttccttgctggagtatatctccatcttccatcaatcttggcattcactgctcctcacccaaacagctacaaccgaattcagccaaacacatggagtggtgcatatcagtgctgggggaaggagaacagggaggctccactgagaactgcatgcccacctgggatacctcttgatctcgtcagcaacttcgaaattaaatccttcgatgcgtgcgcaaacccgcacttgggccttgctgctatagttgctgctgggattgatggactcaggagaagccttacgttgcctgaaccaactgaatcaaaccctgcaggttatgcctccaactccaagctcaaaaggatgccgaaggacttgatggaatctgtcgaagcactagctgcagacaaaatcatgcatgaattgatcggcgataaacttgtcactgccgttattgctgtacgaaaggctgagatcgatcactacgagaagaaccctgcagcattcgccgatctcattcaccgttactagggtgaaacactagttagttccacggagcaaagaggattacgagtgaattactacgacccacgaaattgcttattctcgcgtccttttccgctgtacttgcagttgcagtaatttttttttgattgaataactggttttaggtttccaaaaaaagggcacttggcaaactcatccttctagagaaaataaagcaattcaccaatcaggttctcggccgcttc

SEQ ID NO: 24441 - DNA, 2109 bp, Oryza sativa
  ref <308>: DATABASE ACCESSION NUMBER: AK099883
  ref <309>: DATABASE ENTRY DATE: 2002-08-28
gagttaggatcggtcaaagcaaaaaaaaaaaaaaaaaaggaacgctcccttttgtgcgccagcccgccgccgcctcctcccgccggagccgctcagctcctcctagcgcgcgccagcccgctgccgccgcctcccgccggagctgctcgcctccttcacgtgctcgcccgccggagccgcctcaccctacccaccgctgcctgcttccctgctcgcgccgcgccgtgatggagaggaaagagaggcggggtctgctcgccctaccccgccgcctcctcgcgtgcgcaggccggacatccaggcgtcgccgccggaaaggggatatgaggtggcggagattcttgctaggaggaggagagggggccattggaggagggctagaggtcgctgcgcatggcccgtgggcggtggagagatgaagccaggaggacgtcagcgtcggcgaggttgactgggcaagaggcgagcgtcaacagacgttccagggaggagcagtccgctggcgcggtcgcatgagagggtgccgaccggaggcagagccgaggacccctaggaccgcacccgcgccaccactgctgccatcgtcaacatcctatatgatttttcgttgttgttgttatcagggatgcgctggaacaagggcacaggaccagggccgctggacatcatcgatgctagcagataaggacaccaacaacagttgagtgatctccattggatatcccgtctcttcagccggtcgtcaatgatacaaccaggtcacgcatgaggtagcagtccactccaacccacctactgaagacttgtctcatttggtttgattgatgcgtggagtgaggcacatgctgtccagatcaaggtacagtagaacatcagcttatgagatctgaaagcaacaaaagggtaccaattttacacccatgtaaaatccagtgatttcagtccattctttgtggctattttcatactgcatcttggcatttgctatccgtttaatatgcttggcaaatgaacttgaattagtacaagtggatctttagatttgtatgtagaaggtcgagatgtttgcaaatgacatatgagttgagttgagtgatctagaatttagttcctatagtggaatatggatagctccagaaattgatttttttagtccatttattttaagctctactatttgttaagtttattctcaaaatatttaatttatagtattatccacaataattggagggcaaaactgaccaaattaaagttgccatatgttcatctggagtctgaaagctggccttggtctgcttcattttggtgttgttgtgactccaaccggtgaccggagcccgtactcaccgctagctaccatccccaacctgccccaatctttctccaggttatgttgctagcacttgatctgtacacgctgtgggataattgcttgttgacaaggaagatcaaatcctgatggtggaagaatggcaccccctgtgctccagctaacaatctgattagtttcctagatgcttgattattgattttatgtgtgatcattttattttgtttttgtatcagggctgcatagagtataaaagctttgcccccctatgcttgcactgagagactcttccgtagctgtcatcgcatatagtgttgcaagcagtatcctaaacacttaaaagtaggactcactaaattgaagaaaaaacaaatagctctaccttgcttatgatggtccttcatattggagcacatcttccatgggtctgtagcagctcatcctgctcaaggttgactataagttttggtcagtgaaggggatgtaattagtaatggaattagaacacaggttccttgacgaaatttgaagatgtaacccgccacccatgtttcgcagccatcgcccatggacttgccaagtttctggtggtgcccattgtggatgaaattactgattgcctgaagtactcaaagtttcatgagtataacaaagattacagcttgggtatctgtaaagtggttatgttgagataaaaggacaataatttgagatttctgtttacatctcaaatgttccatttaatttttttacgctactttataacttcgcctttc

SEQ ID NO: 24442 - DNA, 2932 bp, Oryza sativa
  ref <308>: DATABASE ACCESSION NUMBER: AK099884
  ref <309>: DATABASE ENTRY DATE: 2002-08-28
tggccccgatccaaacccgagaggggacaagcccacgcgcgagaggcgagatccaaccccaaccccaacccgagccaccagaggccgaccagatccacccccgcagccagcgaagacggcggccacggcggcggtcaggatgctgccggatggcggcgccgacgacgaggagcggtggctcgccgagggcatcgccggcgtccagcagaacgccttctacatgcaccgcgccctcgattcgaacaacctcaaggatgcgctcaagtactcggcgcagatgctctccgagctgcggacctcgcggctctcgccgcacaagtattatgatctatatatgagggcgtttgatgagatgcggaagctggagatgttcttcagggaggagacccgtcgtggcagctgctccgttgttgatttgtatgagcttgtgcagcatgctggcaacgtactgcccagactctatctcctctgcacagtaggatctgtgtacattaaatcaaaagaggctcctgcgaaagacgttcttaaagaccttgttgaaatgtgtcgaggcatccaacatcctcttcgtgggcttttcctaagaagctacctatctcagataagccgagacaaactgccagatattggttccgagtatgaaggggatgctgacagcattaacgtcgcagttgagtttgttcttcagaatttcatagaaatgaacaaactctgggtccgaatgcaacatcagggccctgttcgagagaaggagaagcggggaaaagaaagaaatgaactgcgtgatttggtaggcaaaaaccttcacgttctaagccagattgagggtgttgaccttgacatgtacaaagaaactgtccttccaaggatattagaacaggtggttaattgtaaggatgaacttgcacaattctacctgatggactgcataatacaagtctttccagacgaataccatttacagacattggaaacattgttgagcgcatttccgcaactacagccaaatgttgatatcaaaaccgtgctgtctcaactcatggacaggttatcaagctatgctgccgcaagtcctgaagtattgccagaattcttgcaagttgaagcttttgcaaagttcagcaatgctattggaaaggtgatagaggcccaagttgacatgccagttgttggtgcagtaactttatatgtatcacttttgacatttactctccgtgtgcatccggatcggcttgattatgttgatcaagtgttgggtgcatgcgtaaagaaactttcagggaatgcaaaacttgaagatagcagggcaacaaagcaaattgttgcacttctcagtgcccccctggagaaatatagcaatattgttactgcattagagctctcaaactatcctcgggttatggattaccttgataattctacaacaaaagttatggctcttgtaataattcaaagcataatgaagaacacgacttgcatatctacttctgacaagattgaagctctttttgatttaattaaaggtcttataaaagatatggatggggctcaaaatgatgagcttgatgatgaggattttaaggaggaacagaattctgtggcgcgtcttattcacatgttgcacaatgatgaccatgaagagatgttgaagatattatgcaccgttcagaagcatatacttcagggaggtcccaagcggctacctttcactgtgccatccttagtattctctgctctcaagttggtccgaagattacaaggtcaagatggtgatgtaataggggaggaagttcctgcaacgcctaagaaaatatttcagatcttgcatcagaccattgaagctctctcatgtgttccttctcctgaactggctctcagattatatctgcagtgtgcagaggcggccaatgattgtgatctggaaccggttgcttatgagttctttactcaagcattcatcttatatgaagaagaaattgcggattcaaaggctcaaatcactgcaattcatcttataattggaacccttcaacggatgaatatattcggggttgaaaatagagataccctgactcacaagacaacagggtactcagcaaaacttctaaagaaacctgaccaatgccgagcggtttatgcatgttcacaccttttctggactgacgaccaagacggaataatggatggtgaaagggtcctcctttgtttaaaggcgtgccttaagaattgcaaatgccgctcaacagatggctaatgtaacaaggggaagtagcggatctgtcgcgctatttatcgaaattttgaacaagtatttgtacttcttcgagaaaggaattccagagatcacgaacactgtaatccaggatttgattgaattgattaggacagagaagcaaagtgagaacactgtagctgatccatcgacagaggccttctttgcaagcactttacgttacattgaattccagaagcagaaaggtgggagcataggtgaaaaatatgagcaaataaaaactacctgattgtgcactaagtcaaaacaagaacagcgtcacgacgtgttgtttttgtctcgagtcatatttgcggaagttcagtgaaatacaagccattggtctcagctgcctctggcctaaaggatctttgcatctgttgttatttgtgcatcttacgctcaaagcggggcctcccctccattttgtgacatgtttgggttagtcaggtggcaataagctttacccttgggaagctcagatctgtacagcgcaacttgtgtaccagagtatcattgttgtatatcctttttctttcttttctttttttgtcaaagaacaattttagggttctaacttttttaactttggaggtacatatttctatttatctggctggaccttttgcttaattcatagcaatgaaggcgttgaatttg

SEQ ID NO: 24443 - DNA, 615 bp, Oryza sativa
  ref <308>: DATABASE ACCESSION NUMBER: AK099885
  ref <309>: DATABASE ENTRY DATE: 2002-08-28
ggcgtctcagcgataacccaaacgatatcgatggcggcggcggcggcgctaaccgtgcttccgcgcgcggcgggcgtactgcgcctctcgcagcatgggaggtctgcctcccgcctactctgcgccgcagccggcgacggcgaggcgtccccggcgccgcgggcggggaggctggtgctgtacacgaagcccgggtgctgcctctgcgacggcctcaaggagaagctccaggccgccttcctgctcgccggcacaccctactcgctcgcctccctcgagctccaggagagggacatcacgacgaatccggattgggagcagatgtaccagtacgagatcccggtgctcgccaaggttcttcccgacggcagcgaggaaaagcttcccagattatcgcctcgtctaagcgtggagctcgtgcagaagaaagtgttttctgcctttgatcagtaagatattttcacagtttctttcagaaggtgtttttttttcttccagttttgagtcagcagctatgagaatgccgatggataatggatggcatatgtgatctttacttgttgtaatctttattaatctctatgggtttgagaaattatacactaatttttctgg

SEQ ID NO: 24444 - DNA, 1230 bp, Oryza sativa
  ref <308>: DATABASE ACCESSION NUMBER: AK099886
  ref <309>: DATABASE ENTRY DATE: 2002-08-28
gaatcacccttatcgtctttggttccttctgcttgcttctcttgctggttcgtcggtcggtggagtttgagcctgcgccatggctgtcggcgggagagggagacggccgctgctcctgctcctgctcctcctcgccgtggcgctggcgctggcggcgcgcgcgcgggcgcagctgtcgccggggttctactcggcgagctgccccaccgtgcacggcgtcgtgcggcaggtcatgtcgcaggccgtcatgaacgacacgcgcgccggcgccgccgtcctccgcctcttctaccacgactgcttcgtcggcggctgcgacgcgtcggtgctcctcgacgacacccccgcggcgcccggcgagaagggcgtcggccccaacgccgtcggctcgacgaccgtcttcgacctcgtcgacaccatcaaggcccaggtcgaggccgtctgccccgccaccgtctcctgcgccgacgtcctcgccatcgccgcgcgcgacagcgtcaacctgctcggcgggccgagctgggcggtgccgctcggccgccgcgacgcgctgtcgccgagtcggagcgcggtgtcgaccgacctcccgggccccgaggccgacatctccgcgctcgtctccgccttcgccgccaagggcctgagctcgcgcgacctcgccgcgctgtccggcgcgcacaccgtcggccgcgccagctgcgtcaacttccgcacccgcgtctactgcgacgccaacgtgagcccggcgttcgcgtcgcaccagcggcagtcctgcccggcgtccggcggcgacgccgcgctggcgccgctggactccctgacccccgacgcgttcgacaacggctactaccgcaacctcgtcgccggcgccgggctgctgcactccgaccaggagctgttcaacaacgggccggtggactcggtggtgcagctgtacagctccaacgccgccgccttctcgtcggacttcgccgcgtccatgatcaggctcgggaacatcggcccgttgaccgggtcaaccggcgaggtcaggctcaactgcaggaaagtgaattcctgatcgatactactagatagcattgccgcgcgcaaattgttcatagtacaaagtttaaagttatataatcagctgtcaatttcatgtattaagtgaattatgacataagaatgcaatagaaatgtcccaattttagacatcaatcactagtggataattcttccgtttgttcg

SEQ ID NO: 24445 - DNA, 1064 bp, Oryza sativa
  ref <308>: DATABASE ACCESSION NUMBER: AK099887
  ref <309>: DATABASE ENTRY DATE: 2002-08-28
gtttccccaacccaaaccctaaccccgatgcttcccctcccccgtcgtcgccgatgacccctcgcgcgccgtcgatgcgccaccacccgccgcacctctacctcgccgaggtcgtcgcctcctggcaccccttccacaagaagccctgcctctccgaccgatccaccgctcccccctccgcccacttcgccgacgccccggagacccagacccagaccccgacacctcccctctccgccagcggcggcggcggcggcgggtcgttccggtggctcgggccacgcaagcgccgccgccgcggcgcggggtcgcggtcggtgtccggccgcagcagcgaccgccgtagatccggcacctgctccgacttccacgtcacgtgcggcgccggtggcggcggcgccaccgactccagcggcgagatgtgggcctcggacgtcggggaggtgcggatgagggacgtccccatggcgacggagttcggccccgcggcgcccgttggtggggctggatcggggtctggtgggacgggcgccgcagcggaggtggctgcggcggattccggctatggtagcgagccgggataccggggagatgtggagcttgggtacggggatgagatcgacgaggaggaagaggacggaaggcagcagctgttcttctggggcgaggaaatcggagattgtatagcagatatgaataagatggggattgttggtgacaataattttggggagcagaagagccatcaccgttgtaggcgcaagaagcatgatgtgaggatgctggatccttgaggcaaaaacttgaaactttttggtaaaatatgaaatatctacatgacctatatataccaccgcagttctgaggaatcaatttccttgcttcttttgtgcagcttgtgctgatgtgtggtcaaactaattactgatgtatcaatgtatgtatagttgatttgttgttccggggcaatcagtagttgtgtgagcatgttttcgagaattctgtatgtgcatgtatgatctatgctgtgccagcagttgaatttcctggtatcacttgctgct

SEQ ID NO: 24446 - DNA, 823 bp, Oryza sativa
  ref <308>: DATABASE ACCESSION NUMBER: AK099888
  ref <309>: DATABASE ENTRY DATE: 2002-08-28
gagtcttctcgcgccacgcgaatccacgccgccgccgcctcttgacctagcgccgccgccgctgccgctgccccttctcgccgccggcttcttcttcttcttccttgtgtagcgcgtgcgcctctcctctcctctcgtcggcgagtgatatggcgggacgtgggaaggcgatcggcgcgggggccgcgaagaaggcgacgtcgaggagctccaaggccgggctgcagttccccgttggcaggatcgcgaggttcctcaaggccgggaagtacgccgagcgcgtcggcgccggggcccccgtctacctcgccgccgtcctcgagtacctcgccgctgaggtgctcgagctcgccgggaacgcggcgagggacaacaagaagacccgcatcgtgccgcgccacatccagctcgcggtgcgcaacgacgaggagttgaccaagctgctcggcggcgccaccatcgccagcggcggcgtgatgcccaacatccaccagcacctcctccccaagaaggccgggtcatccaaggcatccaccgtcgacgacgacgacaactaggccgcccgggcgccttctgcattagtaggatcttttgctagctgttcgtctggatttgcattgtgttgttgcgctgagcagtaggaaggggaaaaagagagagagaagttcttggttggtggtttggtggcctgatcaggatgtgaatacggcgaaatttttgtgggtatttatctaaagatgtaagcctgtgatgaactgatgatcatgttgggttggtttgtttaatggttgaagaaatgaggaacaaactgaaactttgagcc

SEQ ID NO: 24447 - DNA, 2685 bp, Oryza sativa
  ref <308>: DATABASE ACCESSION NUMBER: AK099889
  ref <309>: DATABASE ENTRY DATE: 2002-08-28
gacaatcacttctccccccggaatatctccgccaagagaagagaagagacacccaacaacccaaaacctagcgcctctgcgctcgaggcccccccgaatccgcgaatccgccgactcccatggcgagccagggagagccctcctcctcctccgatccgaaggggaagaaggatttctcgacggcgatcctcgagaggaagaagtcgccgaaccggctggtggtcgacgaggccaccaacgatgataactccgtcatcgggatgcaccccgacaccatggagaagctccagcttttccgcggcgacactgtgctgctcaagggtaagaagagaaaagacaccatctgcattgttcttgctgatgacacctgcgaggagccgaagatcagaatgaacaaggttgtcaggaagaacctgagagtacgacttggtgatgtcgtgtctgttcatcaatgcccagatgtcaaatacggcaagcgtgtgcacatacttccaattgatgatactgttgagggcatcaccggaaacttgtttgatgccttcctgaaaccgtacttccttgaagcataccgtcctttgaggaaaggagaccttttccttgttaggggtgggatgagaagtgttgaattcaaagttatagagactgaccctgcagagtactgcattgttgcacctgatacggagatattctgtgatggtgagcctattaagagggaggatgaggaaagacttgatgaagttggttacgatgatgttggtggagttaggaagcagatggcccaaatcagagaacttgttgagctcccattgcgccatccccaacttttcaagtctattggtgtgaagcctccgaagggcatactgctttatggaccccctggctctggaaagaccctcattgctagagctgttgctaatgaaacaggtgctttcttctttctgattaatggcccggagattatgtcaaagctagcaggagaaagtgagagtaatctcaggaaggcatttgaagaagctgagaagaatgcaccatcaatcattttcatcgatgagatagactccatagcaccaaagagagagaagacccatggagaagttgagaggcgcatcgtttcacagctgttgactcttatggatgggctcaaagctcgttcccatgtcattgtcatgggtgctacaaaccggccaaacagtattgatcctgctctcagaaggtttggtaggttcgatcgggagattgacattggtgttcctgatgaagttgggcggcttgaagttcttcggattcacaccaaaaacatgaagctggctgaagatgttgacctggaacacattgccaaagacactcatgggtatgtgggtgctgatcttgctgctctttgcactgaggctgctctccaatgcatccgtgagaagatggatattatagatcttgaggatgagaccatagatgctgagatacttaactcgatggctgttacaaatgatcacttcaagactgcactagggacaagcaacccgtctgctctccgtgaaactgttgttgaagttccaaatgtctcttgggaggatattggtggactggagaatgtcaaacgggagctgcaggagactgtccaatatccagtggagcatcctgagaaatttgagaagtttggcatgtctccgtccaaaggtgttctgttctatggccctcctggctgtggtaagactttgttggccaaggcaattgctaacgagtgccaggctaacttcattagtgtcaagggacctgagctgcttaccatgtggtttggtgagagtgaggccaatgtgcgtgagatttttgacaaggctaggcagtcagctccttgtgtcctcttctttgatgagcttgactcaattgctacccagagaggaagcagtgttggtgatgccggaggtgctgctgatagagtgctgaaccagttgttgactgagatggacggcatgaacgcgaagaaaaccgtgttcattattggtgctactaacaggccagatatcattgaccctgccttgctaaggccagggcgtcttgatcagcttatctacattcctctgcctgatgatcaatctaggctgcagatcttcaaagcttgcctccggaagtcacctgtggccaaggatgtagacctgaatgctcttgccaaatacacccaaggtttcagtggtgctgatattacagaaatctgccagcgtgcatgcaaatacgccatcagagagaacattgaaaaggacatcgagatggagaagcggaggaaggacaaccctgaagccatggaggaggacgaggttgatgatattgctgagatcaaggcggctcacttcgaggagtcgatgaagtacgcacgccggagtgtgagtgacgccgacatccgcaagtaccaggccttcgcccagactctgcagcagtctcgtgggttcggcaccgagtttaggttcgctgaccagccagcgtctggcgccggcgccgccgctgaccccttcgcatccgctgccgccgcagctgacgatgatgatttatatagttagatcgctgtgctatttatatttaacctccgtgcctttgttcagtatgtctatttcgctttggtaaactttatcatatgtaacatacggggaaacagtgtactatttttaagttaatattttgagaggtactgaaccg

SEQ ID NO: 24448 - DNA, 1393 bp, Oryza sativa
  ref <308>: DATABASE ACCESSION NUMBER: AK099890
  ref <309>: DATABASE ENTRY DATE: 2002-08-28
gtttgtatatgtttgtctgtcttttgcactgctgttctgcatggtttgtcgtatattattttgttgtatatacatatacagatgtgcaaactatatttttgcagaatcgtgctagaaacccaatgtcaggtggctattctcagcagggctatcgccctcctcgtcctcagtcaaattggggtccgcatgggggggcaccgatgcaacagcctggttatggttacatgcagcctggagcctatcctggggcacccccacaatatggcgctcctcagcaaccttatggtagctaccctccagcatctgggggttatcagactgggtgggatcaatcatcaaatcagcaatctcagcaggccccccctggcacgggctatgattattacaatcaacagcagcaacctcaacagcaacaatctgcccctgggactgctgctcctggtgatgctactagctataattccagccagcctcctgcatatgcttcccaagggtatgattcgtcctacgctcagcagagtggtgggcagcagcaggcatatgattattctagttattatcagacccaagggcagcagcagggctactctcagcagactggatatgatcagcagggctatggaacttctggctatgggtccgccgctaattcaactcaggatgggtccgcaccaagctatggtgctcaaggtgtagctggtcaagcatctcctgggcagcaaacttcaactcctgctgctggaagccaccctggctattcaagccaaccacctactagcgctgcttcaagctacccggtgcaagggtctgctcctcagtctggatatggggcgccaccaccacagactggctatggtacccagccccaaccacagggagggtatagtcagggcagctatggcgcacctccgcagggacagaaggctcctcctaacacttctccttacggacaggcgccgcctcctggatctgctcctggtgggtatggccagtatggttactctcagaaccagcaaggctatggcgcacctccaccttaccctggtgcacctgctgcaagccacccaggctatggtcagcagcagtcctatggtgatccttatggcagtggaagctacgggcagcctgccgcatattctactgaagctacaactgctgctgcctcccaggaccaatctgcttccgcccctgcgactggtgctgcgcctgcgacaaccgctgctccggcacctactgctcctgagaacagtggagcccaaagccctgctagttaaacctgcaactcaagctttaagcttcttttagagaggggtttccggatttatgtgttgaaattgttttttgttgctccttaatgttgacttgttttaaatatagactgttattattgttt

SEQ ID NO: 24449 - DNA, 1317 bp, Oryza sativa
  ref <308>: DATABASE ACCESSION NUMBER: AK099891
  ref <309>: DATABASE ENTRY DATE: 2002-08-28
gtttggcggctagactttcgtcgatatccccgataaaatccacccgtctcccctcctccccactcgccttcgcctccatcctcctcctcctcctgccggcttgcatccgctcttccttcctccaggaggaaggcatacaggcatggcgctctcctgcatgaggtgctccccggccgccggcgccgtacgacgaggattggcatcggcggctccgccggcggcgctctccttcgccagatgcggcctccgtagagcggccgcgctcgggtggcgcgtcgccgccgtcaccactacgggagtgcaaggtgccaaggatgctggtctggagaaggctgccagaagtgcttcccaatcaaaggtggaaaatggctcaccttcagaaatcattttagatgattttgaagacttgagccctctatcagaaaatgatgactccactgttagtatcactgtagtcggagcatctggtgaccttgccaagaagaagatatttcctgcactttttgctctatactatgaagattgtcttccaaagcatttcactatcttcggatatgcacgcagcaagatgacagatgctgaattgagaaacatggtcagcaaaacactgacatgcagaatagataaaagggaaaactgtaatgagaagatggaagagtttttaaagagatgcttctatcattcaggccaatatgattcagaggagcatttcatggaccttgacaagaagctgaaacaacatgagggttccagagtttctaaccgtcttttctacttgtcaataccaccaaatatattccttgatgttgtaaaatgtgcaagcaaatcagcatcatctgggaatggttggacaagggtaattgttgagaaaccttttggtcgtgactcagattcatcttctgcattaacaaggggtctgaagcagtacctggtagaggaccaaatcttcaggattgaccactacttgggaaaggaactagtggagaacctgtctgtccttcgcttctcaaatcttgtttttgaacctctatggtcaaggcagtatataaggaatgtgcagctgatattctcagaggatttcggcactgaaggacgaggagggtactttgataggtatggtattatccgtgacataatgcagaatcatcttcttcagatactagccctatttgcaatggaaactcctgttagcttggaggcagaggacataagaaacgaaaaggttaaagttctgcgttccatgaagcccctgcaactggaagatgtggtgataggacagtacaaaagtcatacaaagggtggtaccacataccctgg

SEQ ID NO: 24450 - DNA, 1492 bp, Oryza sativa
  ref <308>: DATABASE ACCESSION NUMBER: AK099892
  ref <309>: DATABASE ENTRY DATE: 2002-08-28
ttggctttgctttgcatttctttcccaaactgaagaagctaagcttagcgcggcgccatggacgtggccatggcgctcgccgtcctcttcttctgcctcctcctcctctcctccgccgccatcaccttcctcctcctccgtcactgcctctccgggctccggcgccgccaccgtgctgccgccgccgccgacgtcgacgccgaggccgcagaaggcggggcgggagcacgacagctgatgccgccgtgttctcctcctcctcagcaagagctgccgttgttgcggccggcggcgaagttggtgccgtcgacgaaggaggagggggagccttggaagctgacgtggcgggaggtggaggcgctcaccggcggcttcgacgaggcggcggtggtggggcgaggtggctccagcacggtctacctggcaagcagctgcagggtcgccgtcgtctcgccgcccgtggcggtgaaggtgcaccggtggtgcggcggcgagcggtggctgcgcgcgttccggcaggagctcgacctgctccgccgcctccgccacccccacatcgtctccctcctcgcctactccgacgaccacgaggagggaggtgcactggtcctggagtacctctccggcggcaccctcgccgaccgcctccacggcggcgcatcgccgcctctgccatggcgccaccgcatgcgcgtcgtccacgacgtggccggcgcgctcgagcacctccacgacggcgcgcctccggtggtgcacggcgacgtgtcggcgtccaacgtgctcctcgacggccgtggcctgggcgcgcggctctgcgacctgggctccgcctgcgagggttctccgccgccgtcgcgcccaccagggcggccgtcggctcgccgggctacgtcgaccccttcttcctccgcaccggcatcgtctccaagaagtccgacgtctacagcttcggcgtgcttctgctcgaggccatcaccggctcgccggccgccgggatacccggcccggatggcggcgccggcgggggcaacctcacggcgcggttgctgccgcgtgtcaggacggagggggtggacgggctcgccgaccgccggctgggcgacgactacgacgcggcggaggccggcgacgtggcgaggatcgccgtcgagtgcctggcggcgcagccgggcctccggccgacgatggcgcaggtgcgcgcggccatcgcggagaaggcggcgacgtccatctccattgctcatcacgacctgcacgatgcctccgattccacatgatggatatcggattgcagtttatttttattttgtagatgatttacttagttatttttgtgtctgtgtgttttattattggcaaggtaattaattaattgtaggaaacgatgaacactgcttaggaaagaactggaatcaattgattagagtgatgaaatactggaatgtaaatattgatttctaaattaagagtgcagcttgtgcatttggatgcc

SEQ ID NO: 24451 - DNA, 2281 bp, Oryza sativa
  ref <308>: DATABASE ACCESSION NUMBER: AK099893
  ref <309>: DATABASE ENTRY DATE: 2002-08-28
ggttgctcccttcccgaacttcgccattctcgatctccatctcctcctcactctgctcgacgccggcgcccagcaccagcagcctccgctctccatctccgccgccgccgccctcctcccgccgccgctatttttcaggatcaagaaatggaggccactggtgctgaagctacattgtcacaggttacagcagttgatggagaagataaccttttccaagataaggaaagtagggctactgccaaggagcgtggggaggcagctgtttttggtttggaaaacattgttactgcaaatggagccacaagtgctgctgatcttgcacccccaaaagatgttgtggatgagtggcctgaacctaagcaaactcacacgttcttctttgttagaatctgttcatatgaggatcctagcctgaaggcaaaacttgaacaagctgacaaggagtgccagaagaagattcaagctcggtcccatatttttgaggctttgaggaccaagaggagtgaacgatccaatattatatcagagctgaagccattggctgcagagaataaacaatataatgaagttgtgagtggaaaattgaaggaaatagaacctcttcaaaagagtttaggaaagtttcgtagtgaaaataatgctatgcgcgcacaaggcgcaggtttatgctcatcaattgaagagcttgatcagttgatcaagagcttgaatgaccgaatttctcatgaaagcatatccttagatgaggaaaagaggttggtcaaagaaataaaacaacttaatggaaccaggtcaaaggttattgagaatgctgctaagagagctaaaatgcaagatacagttgttgagagaggcacaatacatgatcaggtcaaacaaactggggtgggcattgatgaagttaaaagggataggcaagctgtaagagacaagattaaggttcttgaagatcaaatccacgctgttgatggtgagattgctgcacttcaagatgacctcactgcagctactgctagaaaagataaagcatttgaagctctaaatgaattgagaaaaacacgtgatcttaataatacatccttccatcaataccgcacaatctcaaacagtgttagagacctttcagcgaggggtgaagtagaagcggtgcagcagctctgccagaatgaggttgagaagttcatggcacaatggtgcagcagcaagtcctttagagaggattatgagaagaggatactcgtttccctcaacagccgacagctgagtcgagatggacgaatgaggaatcctgatgagaagcctatcgttctcgaaacacaagtggcaccacctgctgaacaggagcctgctccactgaaaaagccggcgaagcaggcgaaggaggctcctgctccacgtgcagatgttactccaaaggatgagattcgtgccaaagcacctgccaaagctgcaaaggcaaaacaacctcttgatattgatgatattccagatgtccatgatgatgagcccccaaaggagaagacaaaacctaaagtagatgaagcaaaattgaaagagatgaagagacaggaagagatagaaaagaacaagctggcactggaaaggaagaagaagcaggctgagaaacaagcaatgaaagcggccgctcgagcagaaaaagaagctgagaagaagcttaaggagaaggagaagaaggcccggaagaggagtgcaacagctggaggtgccgagtccgaggaggcagctgaatccgatgccaagtctgatgaagccgaagcccaggaggaagagccagcagctcctgtcacaattaaaaagaatgcccggcacagaagtacggtgacgaaaacgaagacccctcttccgaaggcggtcctgaagaggaagaaatctcaggctttctggtcatggggtgcacccatggcagcattggcagctgcgctcgtggcccttcttggagccctggtctactaccagtactactaccttccagctagcaccagcaactgatgaacatgtcacaagtgctctggctgtgatacaagtgcctgcctgatcaattttttgcatttgactagaggcatatgatctctgaatgaggatcccctacatggttcctgttcttgtagttcctttactaagtgaattctagagaaggattataccgttataattttggctggagaatggttttcgctctactatactgtatgttgggtatctgttgtagatggatggacggcttgccgtatgaaataaacaaataatgcttgtgttg

SEQ ID NO: 24452 - DNA, 1249 bp, Oryza sativa
  ref <308>: DATABASE ACCESSION NUMBER: AK099894
  ref <309>: DATABASE ENTRY DATE: 2002-08-28
ggattcgtggttcctcctcctcacgggcggcggcgacggcggcgactacggcgatgcggctgctctccggcgcctctgcttcccgaatcccctgccccctcctctcactcgcccgcgcgagggcaagatgcttgccggtccccgcctctgccaccgcgtgccgagcggcctcctcgtcagccgcggcggccgcgggcgacggcggcgcgctgaagccgtggttgttcgtcgggctcgggaaccccgggaaagtgtaccaagggactcgccacaacgttggattcgagatgattgatgttatagcagaagctgaaggtatatccctcagcagtatgcagttcaaggcaatggtaggaaaaggtcgtattggagatgcccctatcatgctggccaagccacaaacttttatgaatgcaagtggtgagtctgtggggcagttggtctcatatttcaagataccacttaatcaagttcttgtgatgtatgatgatctagacttgccctttgcaaaattgcgtctactgccgaaaggtggacatggcggtcataatggggtgagaagcattatcaaccatttgaagcagaaccgtgatttcccacgtctaagaattggcattggacgaccacctgggaagatggatcctgccaattttgttctccgaccatttaacagaaaagaacaggaagagcttgatttcgctttccataggggcttggaggcagttagaataatggcacttgagggattcaacaagagcgcaacttatgtgaacaccgcacagtcctctgaaatgttgaatagatgataaagtgttcaatttattcttataacataaagattcttatgtcagatctgaatgtttcctatccagtagacacttgcacacatggtggtcattttactctcaggaaatcctgagctcccgaggacggaagagattatttgagctgcagcaacttggtacggtgattttcaccagcagcttaaatacagggaagttagagacgtcacactacatgcgtacttctgttccttacatttgtagccttgtattgatttcaaaaaacaattgtagcactgtaatttggtgacctggtagggggagagagagagagaagcctttttgtcttggtaatctatactttggaaatcgtcagcatactgttaaacaggatttcagtgttccacagtaccttgtctcactttctatatgtatatacaagtgttgattaagtaatcactcatttg

SEQ ID NO: 24453 - DNA, 3584 bp, Oryza sativa
  ref <308>: DATABASE ACCESSION NUMBER: AK099895
  ref <309>: DATABASE ENTRY DATE: 2002-08-28
gttggaagggaaagaaaagcaccgcagtggagaggaagaggagcaaaccctctcctctcctatatcaaccccaactccgcctccccttcgcccctcttcctttcccccctccgccccgccccagattcctccgccaccaccgccaccgccatggacgacctcgagcaggccatcctgctcgcctcggattcccccgccgcggccgccgcctccccggccgtgcgcgccgaggcgctcgcctactgcgcgcgcgcccgcgacgagaccccgccgtcgtcgctcctccacctctgcctctacggcctcgcctcctccccgcacgcccacgtccacttctggtgcctccagaccatccacgacgcgctcctcctccgccgccgcctcgccctccccgacgacctcgccctcctccgctcctcgctgctctccctcgccgtctcctccaacgccgcctcccctcccttcctccgcaacaagctcgcccagctcctcgccctcctcgtccgcttcgagtacccccatgtctacccttcctacttcctcgatctcatcccgccctcgccgccgctgccgggacccaccgacatgttcgcccgcgtcctcgtctccctcgacgatgacctgctctcccaggactacccgcgcaacgccgaggaggcctccgatgccgggagggtcaaggacgccatgcgcgcgcagtgcgtgccccagatcgcccgccactggcacgaggccgccgtgtccctccgcgccgccgaccccgccgtcgccgcagtagccctcgatgcggcgcggaggtgcatctcctggatcgatgtctccctggtcgcgaatgacgtgtttgttcccttgctctttgacattgcgctgtccccggggagcgtggctcctcttgctgccgcggcggtggggtgcctctctgctgtggcagcaaagaggatggacgcgagggcaaaggtggcgttgctgaggtcgctcatgtctgcccagaaggggtttggtagccctgacagcggtttgaaaatggcacatttggtgacggcatacgctgtcgaggctctcgagtgttatcgcaagcttggctctagtgatgctgatggagccgcggcattggaaatgctggaagaggtgctgccagctgtatttgcggccgcagagagcggcgatgatgatgaggttgattcgggctcggtgcttgagtttttatctgggtatgtgagtacgatgaaggcaccgacagagaagcaacttggacacttgggacagatactggaggtggtgcggatgcagatgtcatatgatccagtttataggggtcatcttgatgtccttgacaagatagggaaggaggaggaagacctgatggcagagcagcggaaggatttaattgcactatttcggagcatttgtcgtgtggcaccaggtgccactcagctgttcataagagggttgcttgtgacggccctttcatctgcagaagttagtgttgaggatgttgaggtcgcgcttactctgttttaccggcttggggaaatagtgggtgaggaagagatccggactggagctgggttaattagggagcttgtcccaatgctcctttcagcgagattctcatgccacacacaccgcctagttgcattagtgtacctagacacaattagccgctatatcaagttcatgcaggagaatgaccaatatgtgccacatctgcttactgtgttcttggatgagcgtggcatacaccatcagaatgcccacgtgagctgccatgcaggatacttgctcatgagagctatcaggctgttgaaggctaagctagtgccttacttggataccattttgcagagcttgcaagatgccctagtgcaattcactgctacggactgggcaaacaaagatattaagttctccagctcagaggatggcagccaaatattcgaggctgtgggactgttgatcggcattgaagaggtgtcaccagataagcaggttcagtgcttgacagctttacttaatcctctctgtcaacagatcgagtcacttgttatggatgccaaagcacaaggacttgaagaatcatctccaagagctataggtcttcaacagattattgttgcattgactatgatcagcaagggatttaatgaacggcttgtgatgggaagcaggccgacacttggcgttatgttcaagaagacccttgatgtagttttgcaagtcctcatctcatttcctaatgtgaagcccctgcgatctaagatcatatcatttctccaccgtatggttgagatattaggcatttcggtgcttccatgtattccaattgcactgcgacagttgctcgttgataatgaggcaaaagatatgtcggaatttctgtacttaataaaccaaataatatgcaagtttaaatcttcagcaaatgccttattggaggatgtgtttcctgccatcgcaagtcatttatctgtgatactatcacacgatgccttttcaaatggttttgcaagcaatactgaggaaatgcgtgagctgcaagagctggaaaagagattttacgcattcttgcttcatatagcaacacatgatctgtctacagttctcctaactcctagttgtaggcattatctagagaacataatgcagttgcttttgattacttcatgcagccataaagagatatcacatcggaaggcatgcgtacagacttttgtcaaccttatcaaagactggtgtagtagctctgaaattgaagataagcttcctggcttccgagtgtttatgattgagaagttcgctactggttgctgtttgcagagtgtccttgacaagtcatttaacttccgtgatggaatttcgattgccctgtttggtgaaatcatgatggctcaaaaggttatgtatgaaagatttggcgagaactttgttgtaaattttgtaacaaaacttcgagaagcacactgcccaccagaccttgctgaacagtactaccaaaagttacagggaaatgatatcaaggcattcaagtcattttatgaatcacttgtcatgaaaataagacaacagcagaatgggagtcttgtcttcagatagcgtcattcaattattttaaatctgtttgccagtgaaagattcctcagttctacaatttgaatatagggtagttgtatcatctatgtacataaagctctaccatttctgagatcagaagatgtatactgcgggaatatttttaccgagcctggctaccgtggcaaagttccttgatcaaggcatgttagtgagatgcaggggatacatccccagagtttctgctgtgagcatacagggtttcattatgtttgttttgatatttctctggaagtgatcattgttctgctccgagcttgaaattttttgtaaggcgattcgggtgaagctaaacagatgggataggcaaaagagtgatgtgtgggccgtgtttttcctgacagaaactgtcacaccgcctgttgtcgtgttaccaaattttggcagtggtttttcacccctttgttagctggggtgctgtacagattctttaatatagttgcgtcgttcgcatt

SEQ ID NO: 24454 - DNA, 1895 bp, Oryza sativa
  ref <308>: DATABASE ACCESSION NUMBER: AK099896
  ref <309>: DATABASE ENTRY DATE: 2002-08-28
ggcgagccccagactccacaccacacagcccccctttcccctcccctccacagccgtcgaaaccctagccccaaggttcccccacgcctcgcgctcgccgtcgccatgggcaagaagcggaagctcgattccaaatcccccgccgccgctaggtccgcagccgccagggccgcagcagccgcagccgccgccgccgccgccgccgccgtcgccgagccctcctcccagcccgaagccctagccgaggacccggccccctcgtcgcagcccctgggcctatccagcgagggcgcgggggagaggatgatgtcccgtgaggctggcggtggcgaggaagaggaggtggaggaggtcgaggtggaggaggaggtggaggtcgacgaggacgaggatggggagggggagggggaggaggaggaggaggcggcggagagggacgccgactcgatccaggcgctgctgaattcgttccccaaggaccagctcgttgagctgctcagcgccgcggcgctcagccacgaggacgtgctcacggccgtccaccgcgcggccgacgccgacccggcgctgcggaagatcttcgtccacggcctcggctgggacgccaccgcggagaccctcaccgaggcgttcagcgcctacggcgagatcgaggacctcagggtcgtcaccgaccgcgccacgggcaagtgcaagggctacggtttcatcctcttcagccgccggtccggcgcccgcgcggcgctccgtgagccccagaagaagattggcaaccgcaccacggcctgccagctcgcctctgttggtcctgtgccgccgggcggcatggccactaaccctgccccagcggtagccccagccccagcgcagctggcattgccgccagtgtcggagtacacgcagcggaaaatttttgtcagcaatgtcggcgcagacatagacccgcagaaactgctgcagttcttttcaaagtatggtgagattgaggagggtcctcttgggctcgataaggttaccgggaagccgaagggctttgctctatttgtctacaagaccctcgatagtgctaagaaagcgcttcaggagccacacaagcaattcgagggggttgtgctgcactgccagaaggcaattgatggaccaaagcccaacaaaggtggaggacttgggggtttgtatggtgctggcacttcaggcgggaggaaaggcgctggtggttatggagctcatagtcattctttgcctggtgctgctgttgggggccatgtgatgccatctccagtatccagtttgacttcattgccaggtgtagctggtggcccaggggtgaatcctgctctggggcaggccttgacagctatccttgcctcccagggtggagggttgggtctgaacaacatcctgggagttggtgcaaatggttcagggttgcctaacccaggggcttctgcaggactgggtagtagtggtttgcctgggatgcctggtgctggtggttatttgggcggctatgggggtggtggtgggtatggcagtactccaccaggaggcccaggaagaaattacatgggtcattaggatgcttataactattttactgtggccagatgattctacgtgttcctgcttcgcacttataaacttgctgttttaagctgtttctggcaaatcgattactctagtggtcaaagttttcacaagaactttgtttcctcaatcctatctttcaaaattaagcagtatgtacaactatttagattttcgaatggccatcagggcttgtgaccttattgtaaaagagcttgtgtggatttaaagaaccatggatcttttctacatcgttttggctaaataagtgcagattttcagcataagatcaggttaccttttaaatt

SEQ ID NO: 24455 - DNA, 1558 bp, Oryza sativa
  ref <308>: DATABASE ACCESSION NUMBER: AK099897
  ref <309>: DATABASE ENTRY DATE: 2002-08-28
gatcctctcctcccgcatcacgctccgcctcccccaccggccgcggccactgcaacgctcgctcttccgccgcatcgaatcccaacgagcacgtcctccgcctcctgcgccgcgcgaccttccagtgctgcagcccgcaggtggtccctctcccatgccgcgtgacctaagctcgcaccgcatcgcctccctctctcccaccaacagcatcagcgcatcgcataaaggggatcgtcggcagtagggcaagcgacggaacgagccataccacccgcgcggccgcgccagttcaagggaaacatgcgcaggcctagccggctcccagttgtctatccatcttcctctcctaataaatgtcacctgcgttatttggttgttgtctcgcctccctctccctgtcttctttgtatatattacacacattatgttgtttgttgtattgctgcaccatacgatcacacaggttcatggatccatcttctaggcgatgagattaattgttccccttcatgctgatccctattgttcccggttcatccctaatacagcattccaggtaaatatctctttctaatcgatattgattgatgcagattgtttctcggcaattcagctattagttcccgacatatattttagtatcccaacctgacctcttttcttccgtacaacagtatttgtggttgcattactcactccctgcttcactttcttctcagatttgactgtaggtttatttctggattcaagtaccctacaacgttgaataataagtatattggcacaatttttttttggtacatactactagatttgattccaaaatatacattttctgctatgctcaatttttcaatcatttaagttaccttgcaactgtccatgaattttatattttatactggttatagtattatgtccagtgaagcaactacagtatttgatatgcaagttatgcgactatagattattctttgaagtgacaaattataaaaaaaaaatgtcatcctccaggcagacggtgattttgcacatgatgtgattggagataattccatcatatgcagcatggtgatcaatgatgtaagtgaaaggtatagtctctgcaggtccctccctcctgggattttctttacaaatgttaattgatttcataatttaaattataatattattatctcaaaaaatttcttgattttccttatctttcattcttatgtatttgaggaggcaagaaccaataacctttttttacagagcgattagccaattgctaacgtcagttcagtcgatcaatctgcagaacttccccccgaatttgtatgtatattaggttactcatctataaaacagggattggtgactgggcaataagcttcatatcatcgatattagctgtataaggtatttttcagctttgctcttctcatttggaaacaagcgtttggtctatataaactgtgttcagttagacaatagatagcctacagtagctccagccaaagtatgtatatgtgaccattcaattgttgtcgctacatgagaaagacttctcttt

SEQ ID NO: 24456 - DNA, 1508 bp, Oryza sativa
  ref <308>: DATABASE ACCESSION NUMBER: AK099898
  ref <309>: DATABASE ENTRY DATE: 2002-08-28
caaccacaccactctccaaatccatccatcgatcgagaattcctcttctccctcttcttgttcttcttctcctctctgaatttaacaagaaatcaagaactaggtgtttgttttgactaacaagaactcggtcgaacactctgcgtgcgtgtttgtttgtgtgtgtcatgtgctctgggccgcgcaagccgtccacaccgccgctgccgcagcagcagaaggaggcgacggtgatggcggcgtccttgcttcttgagctggcggcagcggacgacgtggcggcggtgaggagggtcgtggaggaggagaaggtgtctcttggcgtggctgggttgtggtatgggccttcggcgagcggcgtggcgaggctcgggatggagcggaggacggcggcgatggtggcggcgctgtacgggagcacgggggtgcttgggtatgtcgtggcggcagcgccggcggaggccgcgcgcgcgtcggagacggatggggccacgccgctgcacatggcggctgccggtggcgcggcgaacgcggtcgcggccacgcgcctgttgctcgccgcgggggcgtcggtcgacgcgctctcggcttcggggctccgcgccggtgacctcctcccgcgcgccaccgcggcggagaaggccatccggctgctgctcaagtcgccggccgtgtcgccgtcgtcgtcgccgaagaagtcggcctcgccgccgtcgccgccgccgccgcaggaggcgaagaaggagtacccgcctgacctgacgctgcccgacctcaagagcggactgttcagcaccgacgagttccgcatgtacagcttcaaggtgaagccgtgctcccgcgcctactcccatgactggaccgagtgccccttcgtccaccccggcgagaacgcgcgccgccgcgaccctcgccgctactcctacagctgcgtgccttgcccggagttccgcaagggcggctcgtgccgcaagggcgacgcgtgcgagtacgcccatggcgtgttcgagtgctggctccacccggcgcagtacaggacgcgcctctgcaaggacgaggtcggctgcgcgcgccgcatctgcttcttcgcccacaagcccgacgagctccgcgccgtcaacccctccgccgtgtccgtcgttcgcgttccgcggccaatccgccatgccggtggcgacgcacgccgcggcggcggagccggacgtgtcatgggtgaactctcttgtcaaggacggccacgccgccggcgacatattcgcgcagtggccggagcaggagcagatggtggcatgatcatcagaggctcatagcaacctagctaaccaaaaaaaaaagaagttctttctttcaattaatttttccccttcgtttgcttaatttgattcaaatgagatggttttttagtacatatttaagctgttcgcaaataatattgttcatcaacaaagaagcatgtatacccaaagggagctctagattgatgaagaacagctgatatttactctatt

SEQ ID NO: 24457 - DNA, 1693 bp, Oryza sativa
  ref <308>: DATABASE ACCESSION NUMBER: AK099899
  ref <309>: DATABASE ENTRY DATE: 2002-08-28
gaattacgaccgccgccgccgccgccgtgctctcgctcgcagggcgcatcggcgagccgccatggcggagcggaaggaaggggaagggaaggtggtggtggtggaggaggaggaggaggagcggcggctgcggggggcgctgcggagcctgcagcaggaggccggggtgctggagcggctggtgtacaagcaccggaaccagcaccgcggcgccgcctacttccagtacctcctcaaggtgaggcgcgacgtgaggctgctcctcgccgccggcctcggggacgtcctcaccgccgtcttccccgtcctcgcctcccgcaagccggccaacaccatcctcgccgtcaacaggcagagtaagaagaagcctggtgcaaaccattgtcaccatgagaggcttttgggtgtcgcacgcttgttatcagagatggctgaacctgttatgatgggagcagttcagatctcgtttttacttgcaagatcattttttgttgatctttgcacagcgattcttgctttgctagcaagagtgagggctctggttcaacagatgctacttgatgttgtctcagtttacaacaaggcttctgatcttattgataggaagcaatctgttaagattagtattggtggagcgcaggctttcagagagtactatccctcaagcaatgatgcccgtacttttctggaatgtgtttgggtgaaagataaatttgttttgcatgaaaatacaaaaggtaactgtgagaaaacccaagctgaggatcaaaagtcatgtgcttccgaatcagcagtcctgtatgaaactcttggacaagtttctgaagatatggaaaatgctgaaggattgaactctcccatgaagctaccagatgccaccttagcaaaccagccagagaaaacccattgccatcgtgatgaagattctcaaagtaggaggcaattggtgaatgacaacaattctaattctctttcagatgcagttgctactcatgtgcattcaactccatgccctgatgtcaagcctgagacaaagaagagagttgcattcattgcagttggaaatccgaaagccactgctagttcgattggaacaactttaactaagaagcagagactagatgtgattccacgcgccactgcagaacctgaagatctatatgtcaagcctgagacaaagaagagagttgcattcatcgcagtaggaaatccgaaagccactgctagttcgagtggaacaactttaactaagaagcagagactagaggtgattccacgcgccactgcagaacctgaagatctatatggcaaattttctgaggatacagacaagtccatattttagattgttttgcactgcagctgaccagtgatcactgaaatacttctcagctttctaacatgaaaagaacaatcaatacaaaagagggctcggtgtagctcaagatatggttaaattttgaagcaacttttgctgtagcatctaggaggttgcttggtttatctcgctaaatcattagtatagccttcattgtattctgggatgcaatattattttgtcatccatttttcaggtgtaattttgcacaaagatgaattttagttcgtcccatctgatgttcaatgtaatatgcattcattctttgatttgacgctgactgcattacgtttgtggagtggccttaagaactcg

SEQ ID NO: 24458 - DNA, 1293 bp, Oryza sativa
  ref <308>: DATABASE ACCESSION NUMBER: AK099900
  ref <309>: DATABASE ENTRY DATE: 2002-08-28
gacgacacccatccctttcccgcctcaaaccccccaaccccaatgctcagagaactccagccctctccatcaccgtccctttccggcttcgtctccccaaccggcggctcaccgccgcggcggtgttccaggaccagaccaacccaagaaacccagcgagcaagggaggcgacgacgatgaggcgtacggcgaggtggaccgtattgtgtccagccgcaccatcaagaatccggtgttcgcggaggacggctcggccaccacggtcaccgccacggagtacctcgtcgagtggaaggacgggcacgagccttcgtggatcccggcggaggccatagcggcggacgtggtggcggagtacgagacgccgtggtggacggccgccaagaaggcggacgcggcggagatcactgcgctactcgcggacgagacgctgcggcgtgaccccgacgcggaggatgcgcaggggcgcacggcgatgcacttcgccgcggggcttggatccgaggagtgcgtgcgcgcgctcgccgaggccggggccgacgtggggcgacccgagcgcgccggcggcgggctcacgccgctgcacatcgcggtcgggtacgggcgtccggcggccgtgcgcgcgctgctggagctgggcgccgagccggaggcccccgacgggcagggccggacgccgctggagctggtccaggacgtgctcgcgaagacgcccaagggcaacccggcgacgttcgagcggcggctggcgctggaggcggcggcgaaggagctggagaaggccgtgtacgagtggggcgaagtggagaaggtggtggacggccgcggcgagggcaagtggcgggagtacttggtggagtggcgcgacggcggcgacagggagtgggtgagggcggcgtgggtggcggaggacctggtgaaggacttcgacgccgggctggagtacgccgtcgcggaggccgtcgtcaacaagagggaggcggcggaaggggaggggaaatgggagtaccttgtcaagtgggtggacatcgaggaggcgacgtgggagcccgcggagaacgtcgacgccgaactcctccaggagttcgagcagcggcaatctggggtggctgctggcggtgatgctccgccgccgccgccggtcgccgggtgacagcgtgtcgccgtcgacggagggtgttcgattcttcctggttttgctgtgtttaacagaacgggataaaatgtttgtgctgctgcaaaatgtatcattagcgctttgataatttttgagttgagcagaactttaacct

SEQ ID NO: 24459 - DNA, 1863 bp, Oryza sativa
  ref <308>: DATABASE ACCESSION NUMBER: AK099901
  ref <309>: DATABASE ENTRY DATE: 2002-08-28
ggaggttaactaggttgaggttgggcgagagagggaggaagggaggcggcgccggcacccccctccccgtccccggccgccgcgcccccccccccccaagcttccctccctcccttccgcaatctctcctctcctcttggcgacagctaccaggaaacaaggaaggagcaacgcaacagtgggagggattaattaagcttaccgggcttggctgtcaatttgacctctccaattccacctccacagggtagggcaacacgaggccggagactaaacaacaatctgattattcacaacaacttctctcctctccatgatggcttcgctccaccgccccctctctgccatggcagttgccgcctttgccgccgtctcctcccttgagctgcctgacaggctgtctcaccacaagttgcctgacacaaccgtggatgccgaagctgtcgtctcgattccagccagcaggcccgatgtatcagcagcaccttctgcttctgccatgtctcgcctgcacttcctgccacgcaatctgcagacttcgcacccggctaaggcgcctcctgcatctttgcctgtcatccacacggtttaccactatgcaaagtttgccaaatactactcggaagaggaggcagtgacgactgcgatgccatcctcgtcatcgccggatgttctgtacctctggcatctgccggaccctaaggtctgcggtgactcacatggcaagtctcagacagtggtggttctgctcgggtggttgggctcgaggcagaagcacctcaagagatatgccgattggtatacctccaggggttaccatgcagtgaccttcaccctccccatgtctgacattgttagctacaatgttggagggaaggctgagaagaatgtagagatgctctcagaacatctcgctgattgggttagcgaggaggatgggaagaagattgttttccacaccttcagtaacactggctggctttgctatggggtgatactggagaatttacagaggcaggatccttctgcaatggacaaaattaagggctgcgtagtggactcagcgcctgttgctgtccctgattctcaggtttgggcttcaggcttctcagctgctatcatgaaaaaacacagcgtagcggcaaaaggagtgaaaccaaatgatgcaaggcccgatgtcctagttgtggagtctaacaaggatcatcccaagccagcagttagcgaggccattctactttcagcgctggagaagttgttcgatgttgttttaaactacccagccatcaataggaagttgtcgggtgtgatggagctattgtcgtcgaagcagccaaaatgcccacagctgtacatatacagctctgctgacagggtaatcccggccaagtcggtggagtcgttcgtggagagtcaacggcgagccgggcatgaggtgagagcatgcgactttgtgtcgtcgcctcatgtcgaccactaccggagcaatccagagctgtatacctctcagctcactgaattcatggaggactgcgtgttggcccgctgccaggcgaaggaggaggaggaggaggtcaccaactaactaagatgatgatggtggtgatgtgcaactgccataaaatagagataggcatacataccaactgttattttcattcattcttcactggcgctcaattgcaaagagaaaaataggtgccaggagaggagtattactagtacttttttttagacaggagagcgagtacactactgttttctttcgtctcgtctcatactctcattggtgggattgactttcaatcaattgtaaacacgttgctagaagaaaacaaaaaggaaaatggtggttactgactc

SEQ ID NO: 24460 - DNA, 4371 bp, Oryza sativa
  ref <308>: DATABASE ACCESSION NUMBER: AK099902
  ref <309>: DATABASE ENTRY DATE: 2002-08-28
ggcgtcgcctccctctcacgacaagcaaacccaacccaaaccaaacacgagccggacgagacggagcgctccctccctctctgtcgcccgcgacgccgcgaagccgcgggcgccaccgccgccgccgccgccgccgccggagatggacggctccggcagctgggacgccatagactggaaccaaatcaaggagccgaggccgccgcggagttcgtcccggggcatggaggacttcctcctcgaggatgaggaggtttacgcccagggtcatggtgttgttctactaaacacagatgaggctggcattctttcagtgacaaatttccgacttctctttgtgagccaagccacaaaaggcgttatagagttgggtaccatcccactaactgcaattgagaagataaatgatgacgtaaagcttcaacccttgccccgccagcatgataagaagcagccccgtgaacttcttcaagtcatcggtaaagacatgagggtcattgtgttcgattttcttcctaaaaccaagcagaaaaacgaagtgtttgatgctttgagaagatatagcaaacctactcatctgtgggatctatatgcattttcttgtgatccctccactgtttatcagaaatctgatccaaagatgcggctcttgaaggaataccatcgcctttttaggaaatggttcccgcatagtggatccgagttcgaaaaagacttgcgtaatgaatggtggagggtaagtaaagtaaattccacctactcactatgttcgacgtacccatctgcattgattgtgccaaggagcataagtgatgaagatttattgcaagcttcttctttccgatccggcagacgcttgcctgttatttcgtggtgtgaccctgggtctggagctgttctggcaaggtcatctcagccattggtaggattgatgatgaattttcggaacaataccgatgagaagcttgtttctgctctttgcacccaaattattgatgccactgggtctctaaggaagttatatatagttgatgcccggccaagagcaaatgctttagcaaatggtgcaaagggaggtggctcagagtcagcatcaaactacccaagatctgaggttctctttttaggaatacaaaatatccacacaatgagagatagtctttttcgccttagggactatgttgatacccatggatcagtatcatcaaatggaacatcatcagctgtatctcttgttggagaccggagaaatcgtggatcaacctggggtggagggaatctgaatagcatgacacaattttcttcaatgttaggggagtggctaaaccatatccagagtatcatggtcggtgcttcgtggattgctgcacaaattgtccaagaatcagcttctgttctcgtccattgcagtgatggttgggaccgcacaactcagttggttgcacttgcttgtttgttgcttgatccatattatagaacgttcaatgggttccaggcccttgtggaaaaggattggctagcatttggccatccatttgcagagcgaatgggagttccaacgataactgataataatagtggatcacagtttgagctgctaagacaaccttctcttgggactttgagcaattcaccaaacagaggtgctttaggatcatcagtgtcaacgtctaatactacttctggtcaatcccagacatcaaacaactcttcacccatactgttacaggtaatctattctttcttgggcgccctgtgttaaaacagtacttttccagtcaaatttatttgatgtaactgagtctcagttctcccaatgtacctcaattcataaacaagcatcagcaactgccaacagtgagctaaatgaataatgttttttcttcttttattttctcatacacaatcaaccttttctgattctgtaattggtttccttattgcctgtatggcagatgttatactcttttgtgagggtaagcataagctaatactcttctggagttgtattgtacaaactgagcactgaagagtctgaagaccgctcagcatttaggattaagttgcacgccctcgcaaatcatgcatggcagatggtttccatttttatattgaaattattagttaataacaggcggtgctatagtgactactacattcaagtgactgcattctggctttttaataatcttccttatgaacaatgcgaaccattatccatttggcaattctcgcagtgaatatcttgtgattaagatatcaattgtttctgtatcactcaaaacttgtattaacccacctcagaacactcatatcttatttttcagtggctggattgtatttctcagttgttacgtttgtatccatctgcatttgagttctcatctaaattccttgttgactttatggattgtgtgttgtcatgccgctttgggaacttcttgtgcaataggtatttaatctagatatctcattgcagctactttcatatgtatattttgtgattgagtgaatataagtgaacgagtagaggaagcaatcaaataaagacatgcggacatgctcatgttttcatctgtccaaaataatggaagttcttttctgactagagtgacatgcttaggtaaattgaaacattagttgcaggggtctgtttgagactgagtctctctttgagggtacatgattttcgttttttcatattaccattgtaagattctacggttttccatgatgtcatgactcacgaatggaaggctttatgctatattgccatctagtcaattaggggggaaaagaaagagcagtgaaatgtttctattcatcatctgtcatgatttatctgttgtaagtttgtactgtcttctaatgtgtctggttctcacattattttgaagtattagctggctacatgtgaacaatatagttaatagtttgccagtaataatgttagttgttacaccattcttaggctgtgtagtccactagatgtggtccgaaactcttttgactgtgtcttcccaaaacgggcttgtccagaaaattatagtttgttgttcatgtatgcacctgtctcttggtaataagcaatgtttgactcctttcttttatagttcttgatctatcttgtttggaaaatatcgtgcatatctgacttcaatttaaaatgcaagtgagcgagaaagggagcaatctggtgctgtaagctcttgccattgcatgtggacgtacttggctgatctccgagcttctggtggcagcttccataagcatcgtaatccattctatgatccattaaagcataatggtcccctagtgccacctgctgcagcacttgctcctaccctttggccccaattttatttgagatggacatgccccattgaatctcaaggtggtgatcttgaatctcaatggcatgccatgaataaaaagtacacagaagcaatgaaggcaaaggacacagctgaatcaagggtaaaagatattaaaacgaagatggaatctatgcaattagaattacagagggagaagcgtgcaagtagttcagccttggccatggctcaacgtgctcaaagggagagcgttgccatcagaaaggcagtgcgatcgttgggctgtacggttaatttcggcacgaatgaaagccaggtggagaaaactgaggggctgacatattcatttcgaagagacacagattttgagtcccagcacgaaaaaagttccgacttctctgtatccatcaccgcgattgaggacagcttggtttcagaaacaccaagcaaccatatctgtgagtcactctgccctttccgcaccagggaaggatgtagatggcctgatgcagcgtgtgcacagcttggaagccagtttgttggtctaaaggcaaattttgatgccttcgaccggctatcggtacaagacagctattttggttcagaataggaaggagatcttcgactctccatgccaatccaaatgcacttggcagctgccaatacttttttttcacaagttggcgcctccaagtcctgcacagctgcactaatatcaagctatatacgcggaaagcaaatcaaatgatacatgcttttaaccattttgccatgaagtacgccaagctcactttttttttctttgttgttgtttcttggaatacctctgtaatagtctctaactgggcattaggcgttcttcactagaggagttagcaactggttagtagctactgggactgaaaatcagtccttcgagctgtatatagaaggagatagattcatacagttaacagtataatgcaggatgtaaaagggataagggacatttctttctttcttttattttcattaaaattggtttagttacgttggg

SEQ ID NO: 24461 - DNA, 1396 bp, Oryza sativa
  ref <308>: DATABASE ACCESSION NUMBER: AK099903
  ref <309>: DATABASE ENTRY DATE: 2002-08-28
gctactagactagagcgagcagagcagccggcgatgcggcggcgccaccgcgagcagctgcctcccggggccgaccgcgaacgcctcctcgccgaggaggtcctctacctccactccctctggcgccgcgccgcccccgctcccatccctcctcgtggctccggttccgtcgccgccctccgccgcgtcgaccgccggaggcgcaggaggctcgagcgccgcgcccaggagcagcagcgggaggaatccggcccggagtggcccctcgcgccgtctccgcccgcctccccgacaacctggcacgacaacaaggccgcctcctcccccgcgcagcgcccgccgcagcagaagcagccttcgcctggatcgctctcgcagcgagccgcgctccgcgccgccgaggagttcttctccaaccgcgggtcggacgacgacgacgaggtggtggaggaggaagggtctgaatcggagggcgaggaggcggcggggttcttcatggggctgttcgagcgggacgcggcgctgcgggggcactacgagcgggggtgggagggaggggagttcgtgtgcatggcgtgcgtggggaggaaggggaaggccaggaggttcgccggctgcgtcggcctcgtccagcacgcccgcgccgccacccgctgcgggaggccccgggcgcaccgcgccttcgccgccgccatctgccgcgtgctcggctgggacatcgacaggatgcccagcgtcgtcatcgacccccgcggcacgctcggccaggcactcgccgccgccgaggccgctgccgccgtcgctgcccaagagaacaatgttgatgctgttgagaagacgatctcttctgaagatcaggttgcagagaaggaagatgttgagactggaaaaaatgacggatctttgagtgatgtggatgcgatgaaggaaaattccaatgtggggaagaacagctcttcaattaatgacaataatggagatgttcatgagaaagggaatggtggagcttatgaaaaggacataatctgctgcatacacgtgaactgaagaaaaaggcttctgtactatccaagcaggcatgctcatcacagtctggtatgtagcagagcttcagtgtttgtaggataattccactaataagtgtaattgagggcaagcgtataagtacaataaatcattatcttgaattctgggctctacctaagattatctgatctacactattgcagtttatataaactgctgttctttgattacctgattgagcattagctcattctcccacctgagcactagatatcatattagagagaggtctctacctctgtgaccagttgtattcatttgtaattgcttgaaacgaaggtccagctagttgggtgttgccctttattcg

SEQ ID NO: 24462 - DNA, 1676 bp, Oryza sativa
  ref <308>: DATABASE ACCESSION NUMBER: AK099904
  ref <309>: DATABASE ENTRY DATE: 2002-08-28
gaggtgttccgcacctcgcccctctccttcgccatcgtcaacctccgacccacccgccctggtcatatcctttatttctgccaattatgtgtatgcacagctgctctactcctctctctaatttagtgccttctagtatctacttcacattgcggtattatctgctctcaacttctcatactttattattattattattattattattattattattattattattattattattattattattattattattattattatttgcaaaaaaaaaaaacttctcttgctattcatcaatgaaatgtgcctctgtttcaaaaagaaaaaaaaaggaaagaaagaaagactctgcactgaactacataagtaatgtacgatatcggttcattgaaaaatggtagtggtgtacatcacagtgctcacttgtttttgccttcagaagggttattgtgctttctatttcaagacaattaatactacctgctttaccttgttaatttctggtcgtgctaattacttcagttaatccctggtgacaactggcaactcagctcttgttgcctttgtcctatgatggattgtatgtggcactgcatttttgacagcctaagacttttaactcccccccccacccccttccttaacttaaattatacatgttcttatatgcccaaagagtcttgtgaaactatttgctgatcttagccctgatgagactcgtgatttgtggatcatggcaaaggatattggtgtacgtgttgagcagtaccagagggcttcttcgctcacattcacaattcaggacggacctcactctggccaaacagttccacatgttcacgttcatcgttccccgaaggaaggaagattttgagaacaatgataacaataatggcatgtatattgtcaatatctttcgaatctttctgagagggactgcaaatcttaagcacaagtacaatgcaaatgaaacacgaagtgctggtttgaagaaattgagtaacacgtaagcatggatacccaccatctccttctccggctctctcttcgtggaggacactagttttgcctcttcttcagtcagatccgatccagaacaatgacgaaagccatgatcatcgcacaatctacattcggttggacctcaagactgaaaacatcttcagcaagagtcagtgacaatgatgctgctccagctttcttcctcgttatccttgcgacctcctcaccgccgctgttgcggattttgcagcttcttctcttgaaactgccctcgattgagaaggcgggaacatggccagtacgatctgacgacgcatgggtacatcctgacatgtgcacttctgcttcatgactgctttgcataactgagcattttctcattgagaagagttgttgtgatcttgccctcttgccttggccttcttctgacgctctgtaacaattccattggtcatgcatgctgataatctgttgcaacagcagaaagtaaaataaaaatcttagttcttacttactccccatgggttctattaatggtttctgttcttttggcccatctgctgcacttgtaacaagaggtaaaagaacttcagtcggaaagtagaatgaactagcggataaatcaaactctgtatgtaacttctccattttttaagttttgtttttaactctgt

SEQ ID NO: 24463 - DNA, 1356 bp, Oryza sativa
  ref <308>: DATABASE ACCESSION NUMBER: AK099905
  ref <309>: DATABASE ENTRY DATE: 2002-08-28
gattcattactcactcttttactcttcttgacaagagtagaacaacaacaacatcatcatcatctatcacacacactatcagggcaggtgatcgaatagctaggaagcaagcaagcagagagtagtagatcgagtgatcggaggatggggtcgcggtacgaggtggaggtgacggtgtcgtcggcgcgggacctcaagaacgtcaactggcgcaacggcgacctcaagccctacgccgtgctctgggtcgacgacggcgccaagtgctccacccgcgtcgacctcgacaacgccgacaaccccaactgggacgacaagctcaccctccctctccccccctcctcccgcctcgacgacgccctcctctacctcgacgtcgtccacgccaacgccgccgagggcgtcaagccgctcgtcggctccgcccgcctcccgctccgcgacgtcctcgacgacgccggcgtaggcgcccgcgtctcccgctccctccgcctcaagcgcccctccggccgcccccagggacgcctcgacctccgcctcgccgtccgcgagtccgcgcgctactacgacccctcgccctacccggctccctacggccaacccgccggaacacgcgacccctatggcgccccgcctccggcctacagctccggctcaggcgggcagtacccgtacggtggtggctacggctcaggcgggtacgcggcgccgccggcagggtacccgagcgcctacggggcgccgccacagccagcgtacggcggcgcgcctcctgtggcggcgtacggtgcagcaggtggggcgccggtggttgtggaggagacgaagaagaagagcaagatggggatggggacagggctggcggtgggcgcggcggcgggcgtgctgggagggctggcgctggccggcggcgcgagctacctggaggacaagttcgaggagggcgtggcggagaaggtggaggacgatctcgacagagacgacgactacgccgccggcggctacgacgacgactattaattaattccattttcattttattcatccaaccacaccacgcctatccctgcacttcaaagttcaaactcatcctaatataaccgaataataatacctatacttactattacctctttttatatgatactccaataattgagaaacacaaattaaacaagagtaataatcaatttttggtttagaaaacaactcattattcatgctgatgatgatgtgttgttcatttctttttcattcaaggggggaaaaaagaatctttctcctcgccaagaaagagagatgttgatgaacaatatttatatcagaccgatccagtgtggatttggacattcctgc

SEQ ID NO: 24464 - DNA, 2060 bp, Oryza sativa
  ref <308>: DATABASE ACCESSION NUMBER: AK099906
  ref <309>: DATABASE ENTRY DATE: 2002-08-28
gagaaaggcgaatcgccccaatcccacaagaggcgaggggagagaggagagcgcgcagcgggagcagcagaagccgccagccagccatggcggtgggcgcgaccgccacgaagctgcacatgccgtccgcgggcggccgccgcccgtccctgttccacctcgcggccgtcgcggtgctctgcacggtgtcctacctcatcggcatctggcaccacggcggcttctccgcctccccggccggcggcgtcgcctcctccgtctccatcgccaccaccgcctccgtctcctgcgtctcccccaccccgacgctccttggcggcggcggcggcggcggcgactcctcgtcgtccgcgccgctcgacttcgcggcgcaccataccgcggaggggatggaggtggcgtcgggccaggtgcaccgcacgtacgaggcgtgcccggccaagtactccgagtacacgccgtgcgaggacgtcgagcgctcgctgcggttcccgcgggaccggctcgtgtaccgggagcggcactgcccgtcggagggcgagcggctccggtgcctcgtgccggcgccccaggggtaccgcaacccgttcccgtggccgaccagccgcgacgtcgcgtggttcgccaacgtgccgcacaaggagctcaccgtcgagaaggcggtgcagaactggatccgcgtcgaaggcgaaaagttccggttccccggcggcggcaccatgttcccccacggcgccggcgcgtacatcgacgacatcggcaagatcatccccctccacgatggatccatccgcaccgccctcgacaccggttgtggggtagcgagctggggcgcatacttgctgtcacgcaacatcctggccatgtccttcgcgccacgtgactctcacgaggcacaggttcaatttgcactggaacgtggtgtgccggcgatgatcggtgttctttcatccaaccggctcacctatccagctcgtgcctttgacatggcacattgctcccgctgcctcattccctggcagctctacgatgggctgtacttggctgaggtggatcgcattctgcggccaggagggtattggattttgtctggacctccaatcaactggaagaagcactggaaggggtggcagagaaccaaggagggcctgaatgcggagcagcaagcgattgaggcagtggccaagagtctttgctggaagaagatcacgctcaaggaggttggtgacattgccatctggcagaaacctactaaccacattcactgcaaggcctcccgcaaagtcgtcaagtccccacccttctgctcaaataaaaatccagatgctgcatggtacgataagatggaggcttgcataactcctctcccagaggttagtgacataaaagagattgcgggtggccagttgaagaaatggccagagaggctcactgcagtgccacccagaattgccagtggtagcattgagggtgtcactgatgaaatgttcgtggaagacaccaaactatggcagaagagggtcgggcactacaagtccgtgataagtcaatttggacagaaaggacggtaccgcaacttgcttgatatgaatgcgcgctttggcggcttcgctgcggcattggtggatgaccctgtgtgggtcatgaatatggtcccaactgttggcaattcaacaactcttggggttatatacgagcgtgggctcatcggaagctaccaagactggtgtgagggcatgtccacgtaccctcggacctacgacctcattcatgccgattcagtgttcacgctatacaaggacagatgccagatggacaacattctgctggaaatggacagaatactgaggcctgagggtacagtgattataagagatgatgttgatatgatggtgaaaataaagagcattaccgacggtatgagatggaacagccaaatcgttgatcacgaagatggcccgctcgtccgggagaagctcctccttgttgtaaagacatactggacactcggggaagaaaaggaatagcaataacgtgaaataaagtgttagaaaaaattg

SEQ ID NO: 24465 - DNA, 1940 bp, Oryza sativa
  ref <308>: DATABASE ACCESSION NUMBER: AK099907
  ref <309>: DATABASE ENTRY DATE: 2002-08-28
ggttctctcctctccccttcctccccccacccgcctcgtcgccgatccgatccgcctcagcctccgcctcgcggcccggcctgcctgcctcgccgccggtggtcccgatccgaggttgctcttgctgggcatcaaacatgggtctggtgaaggatggcgccgccgatttggaggaggggaccctggagatcggcatggagtacaggactgtttctggtgtggcaggacctctggttatcttggataaagtaaagggcccaaagtaccaggaaattgtaaacatccgattgggagatggcaccactcgccgtggccaagttctggaagttgacggtgaaaaggctgttgtgcaggtctttgaaggcacttcaggaatagacaacaaatataccactgtgcagttcacaggagaggtcctgaaaactcctgtctcacttgatatgcttgggcgcatttttaatggatctggaaaacccattgataatggcccacctattttgccagaggcctacttggatatctctggaagttcaattaatcccagtgaaagaacctatccagaagagatgatccaaacagggatatcaaccattgatgtcatgaactccattgctcgaggccaaaagattcccctcttttctgctgctggtcttcctcataatgaaattgctgcccaaatttgtcgtcaggctggccttgtgaaaagcttggagaaaggcaagcatgcagagggtggtgaagatgacaactttgctatcgtgtttgctgctatgggagtgaatatggaaacagcccaattcttcaaacgtgattttgaagagaacgggtcaatggagcgggtcaccctttttctgaatctggcaaatgatcccaccattgaacgtatcatcacccctcgaattgcactgacaactgcagaatatttggcatatgaatgtgggaagcacgtgcttgtcatcttgacagatatgagttcatatgcagatgcgctccgtgaggtatcagcagcccgagaagaagtgccaggtaggcgtgggtatcctggatatatgtatactgatctggcaaccatatatgagcgagctgggcgtattgaaggaagatcaggctccattacccaaattcccattctaacaatgcctaatgatgatattacacatccaactcctgatcttacggggtacattaccgaaggacagatatacattgacaggcagctgcataacagacagatatacccacccatcaatgtcttgccatctctctctcgattgatgaagagtgctattggtgagggtatgacccgtcgagaccattcagatgtgtctaaccagctttatgccaactatgcaattgggaaggatgtccaggccatgaaagccgttgtgggagaggaggcgctctcttctgaggatctgctttatttggaattccttgacaaatttgagaggaaatttgttacacaaggagcatatgatacaagaaacatctttcagtcacttgacctagcatggacattgcttcgcatattccctcgtgagcttctccatcgtatccctgcgaagacattggatcagtactacagcagagatgctacccactgatctatgttcagaaaaatcaaatgttttctctcaagtgcagcttgaataaattgaaatgtttgaacttgtggcctttttgctgtagttatatatagtccggtcctattctttctgtcgggtgagcataattcgttcgtagatcactttgtcacggcaacttctgtaatattgtgccatgtatctttaaactttcacacttgagctctttttggttttcattcgccagaattgttagcaagagcattgtaggccaagatgctcgaacctccaactctccaaggcactggctgtatctacttttgtgaatgaataaagatggaacaataaactgcgatg

SEQ ID NO: 24466 - DNA, 2217 bp, Oryza sativa
  ref <308>: DATABASE ACCESSION NUMBER: AK099908
  ref <309>: DATABASE ENTRY DATE: 2002-08-28
gcggttgggagaggaggagaggcattgccgatgggctcggtggcggacgatgcggagatcaccggcccgctcctcgccgccgccgccggcggcggcggtgacagcgccgcggcggcgggggtggagagggtgccggcgtggagggagcaggtgacggtgcgggggatcgtggtgagcgcggtgctgggcgtgctgttctgcctcatcacgcacaagctgaacctcacggtgggggtgatcccgtcgctcaacgtctctgcggggctgctcgggtacttcctggtgcggtcgtggacggcggtgctcgggaggctagggttcgtcatcgcgcccttcaccaagcaggagaacaccgtcatccagacctgcgtcgtcgcctgctacggcctcgccttcagcgggggttttgggtcatatatgcttgcaatggatcagaaaacatacgaacttattgggccagattatcctggtaacagggcgatcgatgttatgaatccttcattgggttggatgatcgggttcatgtttgttgttagcttccttggactatttagtcttgttgcactgcgcaaggtaatggtgattgattacaagttgacctatcccagtggaactgcgacagctatgttgataaatagcttccacactaccagtggagcagagcttgcagaaaagcaagttagctgtctcggaaagtatttgagcattagttttttctggaactgcttcaagtggttcttcagcggcgttggggattcttgtggttttgacaatttcccatctctgggacttgcagcatttaagaacacgttttattttgatttcagtccaacctatattggatgtggtcttatatgcccacatattgttaactgctctacacttcttggagcaatcatatcttggggtttcctctggccatatatatctacaaaagctggggactggtatccagctaacctaggaagcaatgatttcaaagggctatacggatacaaggtttttatatctgtatctgtgatacttggtgatggtctttataacctcatcaagatcatctatgctactatcaaggaagtaatgaatgcacggtcgaagcaaggaagacttccccttgtgcgggttcatgatgatgatgaaggctctaaattatcagctgaagaaaagcttcggaatgacacgtttctaaaagacagaattccatcatggttagcaggatcaggttatgttggccttgcagcaatctcaacagcaactgtgccaatgatcttcccgcaggtcaagtggtaccttgtcctgtgtgcctatgttgtagctcccctgctcgccttctgcaactcatacggctgtggcctcacagactggaaccttgcgtccacgtatggaaagattggcctttttatttttgcctccttggttggccgaagcggtggcgtgattgctggcctagcagcttgcggtgttatgatgtccatcgtatccaccgctgccgatctcatgcaggacttcaggactggttacctgaccatctcttcaccaaggtccatgtttgtgtcacagttgattgggaccacccttggctgcatcatcgcccctctgaccttttggctctactggactgctttcgatatcggcaatcctgatggcatgttcaaggctccatatgccgtcatctaccgtgagatgtcaatcctgggtgtcgaaggattctcagcgctgccccaacattgcctggcgatctgctcggtcttctttgtcgcagctattttgatcaacctcctgcgggacgtcactccgaagagcgtctccaagttcatcccgctcccgatggctatggctgtcccattctacattggggcgtactttgcgatcgacatgttcgttgggacggttatcctgtttgtctgggagagggtgaaccgcaaggaatctgaggactttgcaggcgcgattgcatctggtttgatctgcggtgatgggatctggagtgttccatctgcgatattgtccatcatgaggattgacccaccaatgtgcatgtacttcaagccatcccttaccagctgaaaatagcgcaaaatccgttgtttatttggatgccaaaatagaaaagaattttcacatgtatatatttctctctgttgtaaattagactgcgcaaaagtgcagtaactttgttctttctgttaatatatttctctgtttatgatatgttct

SEQ ID NO: 24467 - DNA, 5040 bp, Oryza sativa
  ref <308>: DATABASE ACCESSION NUMBER: AK099909
  ref <309>: DATABASE ENTRY DATE: 2002-08-28
gacttcaccattttttttttcttctctcctcaccccttcaccacagcgggcgccggcgagcggcgaggccgggccggatctcgccgccgcccaccgcttgacctccctccgtggcgctgcctccagccaaatctctaaaagctcgggaagaaaataacaaaagcagcaatggacgtcgatttttggggagtggtaattgagccgtgcaataagaaggagatcttttgtcctgaggataccctgtatcatctaacatcggtagcccttgatgaggcttacgggctaaaagactccaatgtgaaagtatttgtcgaagttaatgatgagaagtttgcgattgggacgctttcctccaaaaggcatccgcatatcaaggttgacttctgtttcaagaagaactttcaactattccacacctcactaatcagcaaagttgccttttgtggctatcaagtaaagaatttgggaaaattcactgattctgaaggtgatgaatctgatgaggaggttccaccaggtattcgtctataccccaagttagatgataatatgatcaaagaagcacagaaaagtaaacttcctgcaaagtctgctacagttgcatccgccatgcaaaaggcttttgtaaaggaaatagagcactatgagaaatcaaaagctgatgatgacaacaatgaacgataccgtgatatttcagtagttggtgaatctactggtaatgaggattcaagtgatgatgctgattatgaaggtaagagttctgatgaagaagagactactgcaaaggaaggtgagagtactgatgaaaaagagactcctgcaaaggaaggtgagagttctgatgaagaagagactcctgcaaaggtatgtgtagattgatttgggaattggggaatgattggcctcaccactgaccagtacccccacacatgcatatatttatttaacagaattacaagcaggtccctgataaagttgcatattacaccaacactccccctcaagatgggcaaaagatatcgatcatgcccatcttgttacaaaataactcattcacttgggcctaatccctttgttagacaatcagctagttgttcacaagatttagtatactctaggctaagcactccactatcaattttctctttgatgaacaacctatcaatttcgatatgctttatgtgatcatgctgaaccggattgtttgcaatgctgataactgatttattatcacaatggagcaccatagtgccatcccttcaagtatcttaggattctatgagctgcctccaaaagaccagacctaggatcatgcatatatctatttaccacactcactacataagagatatcaggtcttgtatggcacagatatatcaagcgtcctacaagcctccttgtcaactggatcacctgtctgagcacatagttgatgatttttatcaattggtgtagcacttgaacgacatccaagcattcatgtttctgccaatagatcaaggatatatttcccttgggagagaacgattccctttgacgaccgagcaatctcaatcccaaggaagtatcgaagaggtccaagatccttcacctcaaaggtctttccaaacatttccttcaagcacctaatttcttcccccatcatcaccggtgatcactatatcatcagcatacactgccaagatggtaatacatgaacccttatgtgtataaaaaaccgtgtgatctccattgcattgggaatatcccatctcacatagtgcacgcctaaatctatcaaaccatgcacgtgagactgcttcaaaccatataatgatctcttgagtttacatacctttcctaccgtttggttatttccaaatccaaggggaatctccatatagacctcttgtagatcaccataaaggaaagcatttttcacatccagctgatgtagaggccatccaaagttaactgcagaagacaccaaagctctcactatacccatcttggccacaggagcaaatgtttcatcatagtcaatcccataagtttgactataaccttttgcaattgatcttgctttgtatctatccaccttcccttcaggagtttgctttactgtaaatactcacttacatcttactgctctttttcctggtggaagtctcacaagttcccatgtcttgttctcctgaagggcatgaagctcctccttcattgcatctttccacctaggatcttgcttggcacatctccagtctttcggaacaggcactgcttgtaatgatgcaatgaaagttttgtatgcaggtgaaatgtgggagtatgagatataatttgcaatgtcatgcttagagctaatatgttcaaagccaagacgtataggaggtttcccagcattacttctagtttccctacgttgtgtaagaggtaattctacttgttcaagtatagggggaacatcaccagacgtttcaatgaggggcaagggagttggaggagagaggcacggggaggattcttggactggatgctcaggttgttcagactcttcaacttgctcccgtgcaaattccctaatttggtccccatcattcttccttgtcatctccacaagatatgcgattaataagatatgcagcagtcatcacttccacaagtatttgggtacattcatctgaaacataagtgaacgtgccacctccaacaaatgtcggttcttcctctcagctacaccattttgaggaggggttccaggacaagtggtttgatgtatgatcccttgatccaagacataagagacaaattcgttgttgatatactcagtcccattatcagttcgaatgattcgaacatttgcatcaaactgatttgaatttatgaaaatcttggaagcatcgaagaacatcattcttgtgcttaagtacataaatccaagtcattcgagtgtaacaatcaatgaaggaaacaaaccacttaaatccactcactaaagtaactggccatggtccccaaacatcataatgtattaatataaagggttcataactacggaggccactcccaacatatggggtccgtgtatgtttgccaaattcgcaagcgtcacagacaagtctacttttgttcactccattaaagagaattggatatagcttacttacgttatcaaatgatggatgtcctaaccggcaatgaagcaaaataatctcctcagcatttcctgcaactgcagccaatcctacttcttcattattgatgtaccacaacccattgcgcctgactccagtcccaatcctcctcccagtccccctctcatagtgatccaaatctgcccataattgttgcaactcactagcatattcttgaacagttcttccctcttgcttcaagttctccaccttgtcttgagcctcaaccatcatcattgcattgtcttcccctgagtacattttgctcaatgtcttccacacagttgatgcattagaaattgtctccaccatcctcgcaatggatggagccactgaggtcattaaccatgttgccaccgtagagttggtggaattccacaccttccagtccacactaagcttgtcatctggttcaatacaagtttcctccaaatagtgttctaccccttttgccctcaacatcaatcttgtccttctagaccagctcaagtaattttggctctcctccaacttaacttcattcggcatttgctctagctttatttcaggtgatgcccctcctattctaggccccatcatcccagtagctatcaagtcttgtagtaggcttttcatctcgcctttagtgaccagcgatgattcctcaacccctttcaatggatccatctcctagagcgatgccaactaacactccttgctgcccgtgttcaccacaatcacggcaactcttattccatcaagttttcagcaagcaaagaacgggaacatatcctcgcttgtgctcttagcaacccaaatcacataactggaccaggcttcttcccgcacctgtcaacaaagaaacagaaataaacttgctctctttcccacaacaagctcacaaatcagtcccaaatccaactcccaaaacagtaccgtcttttcttcctcctagcttgcgcacacagagctcctctcctccaggaagcccacgaacctgagggcctcgcgtgcgcgcagcggggctgctaccagcgcgccgagtggcgcggcggcgctgctgctgccccgcacgccggtgctgctcctgctgctaccttctcccgccttcctgctgctgctgcctaacgcctgagagaggggtggaatgagcttgttggcctcaccaccgatcagcacccccacacatacatatctttattcaacagaattacaagtaggtccctcataaagttgcatattacaccaacagtatgagatacttaagtggatgatagtttctgatgcttaatttctcagaaaccttgtaacttttttgttgttgttgtttccttgatctcccagaatactaaagaggaaaatgaaccagtggtaacacccttgaagacatttccacatgagatggcaaagatagaagcaccaattacggacaacaaaactggtactaatactagcaagagaggtagtcatcttcaagttacaaaccctcacccagcaaaacaggcaaagaggacgcccataaagaacgacacgcctaagcgttctgctagctatgtctgcaactcatgcaaaaagactttcaactcctctggtgctctgaaggatcattcaaaggcgaaacaccctgcaaccaattgatacgagataacactagtctgtgttagattgttagtcataggtaactgaatttttttttttcgccgggagagagagagaatatttttgaagcagctatttcctagcctcatctgaaacaatattaggattcgagacgatggtctcttcaacataattttggaacactttatgtgaaaagattctggaacgtagataccacagtttctttatgaatgagtgctgaacggtttcattgttctggggatggaac

SEQ ID NO: 24468 - DNA, 1894 bp, Oryza sativa
  ref <308>: DATABASE ACCESSION NUMBER: AK099910
  ref <309>: DATABASE ENTRY DATE: 2002-08-28
gagtcagtatactctcactctgtctcctcccccgcgtcggtcgcttcgcttctactggaggagagcagaggtggtggttggtgagagaggatgcgcggcggcggcggcggcggcggcggcggcggcgaggaggccggccagaagctgaagagcatggacgtcgacaagctggagaacggcggcgacaagcccgccctcaagtaccacggctggagggccatgcccttcatcatagggaacgagacgttcgagaagctggggacgctggggacgtcggcgaacctgctggtgtacctgacgcaggtgttccacatgcggagcgtggacgcggcgacgctgctcaacggcctcaacggcaccaccagcctcgcccccatcatcggcgccttcctctccgacgcctacctcggccgctacctcgccctcgccatcgcctccgtcgcctccctcatcggcatgttcttgctgacgatgacggccgccgcggacgggctgcacccggcggagtgcggggtgggggagacgtgctcgaaggcgacgtcggggcagttcgcggtgctgttcatgtcgttcgcgttcctggtgctggggtcggcggggatccggccgtgcagcatgccgttcggcgccgaccagttcgacccccacacggagtccggcaagcgcggcatcaacagcttcttcaactggtactacttcaccttcacctccgccatgctcgtctccgccaccgtcatcatctacgtccagagcaacgtcagctggcccatcggcctcggcatccccaccgcgctcatgctcctcgcctgcgtcctcttcttcatgggcaccaggctctacgtccgcgtcacccccgagggctcccccttcaccagcatcgtccaggtgttcgccgccgcggcgaggaagcggtcgctcaagcagcccaaggaccccaagcagaacccgtggaggctgtgcagcgtgcagcaggtggaggaggtgaagtgcctcatccgcatcgtgcccgtctggtccacggggatcatctactacgtcgccgtcgtgcagcagtcgacctacgtggtgttgtccgcgctgcagtccgaccgacacctcggccggagcttccagatccccgcggcgtcgttcacggtgttcgccatgctggcgcagacgctgtggatccccatctacgaccgcctcctcgtgccgcgcctccgcagggtcacgggcaaggacgagggcctcaccctcctgcagggcaggggatcgggatcgcgctgtcgacggtggcgatggtgatgtcggccgtggtggaggaccggaggcggcacatcgcgctgacgcagccgacgctggggacgaccatcaccgggggcgccatctcggccatgtccagcctgtggatggtgccgcagctcatggtgctggggctctcggaggcgttcaacctcatcagccagatcgagttctactacaaggagatcccggagcacatgcggagcgtggccggcgcgctcgccttctgcaacctggcgctggggaactacctcagtgggttcctcgtcaccatcgtgcaccggaccaccggcgccgggagcaactggctggcgcaggacctcaacaaggggaggctcgacctcttctactggatgatcgccggcatcggcatcttcaacatcatctacttcatgatctgcgccaagtggtacaggttcaagggggcagccgccaactgagatgcaagtgaagtgaagtttgttcgtttgggtggttaattaattatgtcaatggcagataattaattggtggagtgcttttagctgggttttttttttctgcctcatcatttctctcttgtatttttgtatctgtggtgtcttgaattataaaatctataggattaagtggg

SEQ ID NO: 24469 - DNA, 1489 bp, Oryza sativa
  ref <308>: DATABASE ACCESSION NUMBER: AK099911
  ref <309>: DATABASE ENTRY DATE: 2002-08-28
ggtagtagctgcttctcctcccgatcgagcagaggcagtagtagcttagctagcagatatatactgtagcgatggagtaatatgatcgtcgatcgagccgatccgcgcgatgcagattcgccacgccctcgtccacctcattaccctggggatggttatcagctcggcattgatgatatggaagggattgattatcatgacagggagtgagtcgccactagttgtggttctatctgaaagcatggggcttggatttgaaaggggggatatcctgtttttgcaaatgagcaaacaccctatacgaacaggagatatagttgttttcaatgatggccgtgaaattccaatcgtccatcgcgttattgaggttcacgaacgacgggataatgcacaagttgatttcctcacaaaaggtgacaacaatcctatggacgaccgaattctttacacacatgggcagctttggcttcagcaacatcacatcatgggacgggccatagggtatctacccaaagctgggtgggtgacattggtgatgactgagaaaccagttattaagacaaatcaagctgcaaatttgcaggtgatggggtgcttcaattccaaaccaaacaatgccggtgcgatcagaagaagacatgggagggtagaagtggatgtttgcgcctggattatgagttcctgaggctcagaggagctgcgtcgaggacttggataattttcatggctactcgctactcatgagcactactcctgactaggcccaggaggcgcacgatcactcttcatggttcattcatggcacatctgctaaattgattatcaagaagaataatggcagaggtgatgaactaactgtctgaattcagtgttttttttttcgccgggaaggctgaaggagaccatccgagtatattaagaaggagtaaaagttacaagaaaaacaccacaactgaattcagtgcttgctggactgctgatcttctgcaggctttggaggattatttgcctctgctcttctcagcctagtcaaagatgataacctgatttccccttctttttaattggtctgaatgaaatccaggagatttgtgtcagtcgaggttgaattcttttacagggagcgagttggaagatagtacaattttgcatttatgaacgaagaggatgatgcagaggtccgcgtgcacctatattgttgcatgtggtgtaggacaataggagtgatactgtactgtgtttgatcatcttttgtcttgtgtaccgtcaatgcccagtgcttagaatgagatgctacctgttgtcttggacacgtgacggctatgctgcattcgtccgaagcaatttttgtgcgtcttcctaagacatgtattgagggataccatgctaatataaggtatctgagggtctggagcaatatgtaagcatatgagatacagataattagactctgaaactttgtgtttgtattccatgataagtttgctgc

SEQ ID NO: 24470 - DNA, 2176 bp, Oryza sativa
  ref <308>: DATABASE ACCESSION NUMBER: AK099912
  ref <309>: DATABASE ENTRY DATE: 2002-08-28
ggtgtagtagcctgcaggcagctgctagctccaccatttgagtggctagatgaacccgaagttgctgttcttcccgctcttggctacgttgctcctcctgtgccaccacgcacacgccgtctgcgagccggcaacatgcggcgacctcaccatcaagtacccattctggctaagcggtcccgacctcaaccggtcgtcgttggccattgccgcctgtggccacccgtccttcgagttgtggtgtagccgcgatggcgtggcgtcgttgaggggctcgcaaatcctcgtcctcggcatcgactacaccaacagttcattcgttgctggacacaaaagggtcgccgacggcggcgacggcgtgtgccgcaccgacttcaacatatcgtccagtctagctctcagcccgttcacgattagcagcagcaaccgggccatctgcttcctctacagctgcaacggcacggagccaccggagatcgacggccttgtgaacgccaccatctccaactgcagtaagcctatctacgcgtacctcggcgggagctacgaccgtgacaagccaccggcgatcaaagccgggaactgcacgtactcgtacctgccggtgctgtggccggagtcgccggtgaacttgacggcggggaccaactacagcccgctcttcaagaaggggttcgtgttggagtggcagaagaatgggttcggcgactgcgacgcctgtaacgcgagcggcgggcagtgccggtacaacaacgattccgcggcggcgttcgcgtgcctctgctccgacggagagctgcgagggacgatatgcgccggcagcaagaaaactggcaggagaaccatattaatagttttgacagcagcagctgcaggcttgctcttgccatgtatatatgtgctaatatggcatgggaaggggaaacaactacggtatttcctttacacaaagactagcagcaccagtgaaaggaacattgaggccctcataatatcttatggatcaatagctccaacaagatacaagtattcagaagtaacaaagataacatcatttcttaattataagcttggagaaggaggttatggtgttgtattcaaaggaaggttacaagatggtcgtctggttgcggtgaaattcttacatgactcaaaaggaaatggagaggaatttgtgaatgaggttatgagcattggcaggacctctcatattaatattgttagcttatttgggttttgtttggaggggtcaaaacgagctcttctttacgagtacatgcccaatggttcactagacgattatatctattcagaaaatcccaaagaaattctagggtgggaaaaactttacggaatcgcaatcgggattgctcgtgggctagaatacttgcaccatagttgtaacacacgaatcatccatttcgatataaagcctcagaatatccttctagaccaggatttttgcccaaagattgctgattttggtttagccaaactgtgccgcaccaaggagagcaagctttcaatgacaggtgctagaggaacaattggatttatcgctcctgaagtgatctatcgatcctttggaattgtttcaacaaagtcagatgtttatagttacggaatgatgttgctagagatggtcggaggccggaagaatgctaagtcaatggttgaaaattcaagtgaaaagtattttccagattggatttatgaccactttgctctggatgatggattacaagcttgtgaagtcacaagtgaggttgagcaaatagccaaaaagatgactttaattggtttgtggtgtgtacaagtattgcctatgcatcggccgacaataacccaggttttagatatgttcgagagaagtttggatgaactggaaatgccaccaaaacaaaatttcagtgaattactagaacatccagctcaggagattaacacagaaagtacgagttctactataaataccaaagctgcacaagctctaagtgaagtgctaagggttgaggagacaagcctcgttaattcaaaggatcctacagtgactaccaactatgcaaaaagatgatctgcagtcaaattttggcatagtatcatcacacattcatgggtcatggcattgactagtgtgtttaaggtagctgaatcgaagatatttctgaattctgtc

SEQ ID NO: 24471 - DNA, 1919 bp, Oryza sativa
  ref <308>: DATABASE ACCESSION NUMBER: AK099913
  ref <309>: DATABASE ENTRY DATE: 2002-08-28
gttcgactggacgaggcaattagccaaacaatagcagtggcaggatgcaagccatgacagccatggagactatttcattgctgcagcccactgctcttccagctctgccgacaaccacacctacaagagctacagctgaagcatcacatagggcagaggaggcatcacagtccgctcttgacggctctgaaggacaccaaggtcccaagccttaggttctgtaaatgatcctgactagggtgaccagtaaaagcgaggattgtggtttggaattatgaagagcgcatgacgatttgcaggtgattgtgagcatatcacgcgcacctagcaaagtgcttgtgtagaggagaaagggaagctagcaaaatttgtgggtgaagaaactaacagattgaagtccagtcccttgttagtgtgattttttttttttttttttgcgattgcattcattagttccatcactgacaatctgcctgccatactacccaactgtagtaaaagatattgatagatgacatgatgtttcaaatagtggttagcaagtaaatcaatgttatattaaaaaaatatttaccttgctacccaactaagggcctgtttagatcccctggcaagttttttcatcctgtcacatcgaatgtttggacacatgcataaaatattaaatatagacaaaaaaactaattacacagattatgtctaaattgcgagatgaatcttttaagcctaattgctccatgatttgacaatgtggtgctacagtaaacatttgctaatgatggattaattaggcttaataaatttgtctcgcagtttacaggcggaatctatgatttgttttattattagactacgtttagtacttcaaatgtgtgtccgtatatccgatgtgtcacgacaaaaattttcacccctggatctaaacacagcctaaagcaatttgccttgcaggttcatgaatagattgatgttttgatgatatgaccaatctgctgctaaaaatgtgctacaggtacccaaatctcaagccttattatggcactgaataacttgaaccgaaaatttgatgttatataaattaagtagatctcatctactataaagatcttcagtagccatgtttaatgaaatcatgaggtaagtacatattcatgttttttagaaaactagagcttcacatagacacatatctaatttgctgtcactaggaagcttgttgttagaggattttacagttttctgaagtttgaaattaattcagttcctttttaatggaggtagtcttggtacattggctcatatatatacgtgtttcaaattagtgtattacttgagttcattttttgagtggattattcagtgataatgtactctaccattttttcttttcttcttcttttatcacagattgagccattggattgtttttcaatcgttcactatcttactatggtagaaaacgaaactttaatctgttttcatatcatttgtccttactaactatccttttatgtagtccagaaaattaggtcgcaggtaccaaggtatcattagtatggtctccatttatatgcaagcactaggtttagtgtcggaatggtttgttttgggttcttggtcttttatggttgtgtgtttgtgtccgctgcaggtagaggggagttggaggggaatggcagctcgctgcaggtagaggagagttggagtggaatggcaagtgcgagtgaggcgaatggattgtgctgccattcaagattgactttagaagttctcttctttttttcatcttaccgataattcaagattgtgctaccatatgtttatcttttgagttaacaccaaatgtctggtggttgccgattgccgtgtggatttcgaagcttgacaattgcttatttctttagagtgaatctatttct

SEQ ID NO: 24472 - DNA, 2167 bp, Oryza sativa
  ref <308>: DATABASE ACCESSION NUMBER: AK099914
  ref <309>: DATABASE ENTRY DATE: 2002-08-28
gaatcaccaactgcccagctccattcctcacccaacaagctcaccgccttctccttcatcatcttcctctattcatcgccgccgccgagctcagccgagcagttgggaagggaacaacaagtagacgtcgtcttcgtcttcttcaaggagaagccgatgactctgcggccactcaacacagagagaagcttcctcctctcctccccgaagccacacagccccagggatgcctgctcgccgccggtgaggtcgccctcctccaccaggctcctcgcctgcaggaagctcccctcctcctccaagcccatggccaccggcgccggcgtcctcgagaggtctctcagcttcaagaactgggagcccactgccgccgaggaggccgccgtcgccgctccgccgccgcacgatgaggcggccagccggtgcatcaacggcgcgcggccggggatcctgctgctgcagcagagctccaaagccaagcagggcgacgccgcgacgtcgccggcgcaggccgcgctgatcgagttcatctcgccgaagccgcggtcggagctggaccaggcggcgaccaaggtgcagaagctgttcaaggggcaccgcacccggcggaacctcgccgactgcgccattgtcgtggaggagctgtggtggaagacctacgactccgcctgcctaaacatcaagtccatctccttcttcgacgaggccaagcaggagaccgcggcgtcccgctggtccagggccggcaagcgcatcgccaaggtcggcaagggcctctccaagaacgagaaagcccagaagctcgcgctccagcactggctcgaagctatcgacccgcgccaccgctacggccacaacttgcatctgtactacgacatctggtctgcgagctcgagcactgagccattcttttactggctggatgtaggagctgggagagacatgcatcaccaaaagtgcccgagaagcaagctttattcacagctgatcatgtaccttggaccaaacgagagggaagcttttgaagttgttgtggagggtgggaagctgatgtacaggaagagtggagttcttgtgaacaccactgaagattccaagtggatatttgtgttgagcacaacaagatcattgtatgttggacagaagaagaagggtaaatttcagcactcaagtttcctagctggggcagctacaacggctgctggaagattggttgccaaagatggtgttcttcaggcgatatggccatacagcggtcactacctcccaacagaagagaacttcagagagttcatcagcttcttggaggagaacagtgttgatcttgccgatgtcaagagatgttcggtcgatgacgatgaattcccgtcattcaagaagacagaggagaaaccagaggaagctgagaagcctactgaacccacacatgatgagatcatggacagctcacaaattgagctgcctgaggtagacatagtgaaggaagcggttgtcgaaaacagcgaggacaccaaggtggcaccgatcatggccagccgcccatccttcaaatgggcaaccgcgaatggtgctcgcattggctgtgtccgggactacccggctgatctacagagcatggctcttgagcatgtcaatctttcaccaagagtggtgccctctcctactacaaacaggctgccgataccgtctcctcggccaagcccgaagatcaggctgtcacctaggctgcactacatgggtctcccgacgcctaccggttgcaagctcccgatcccgagcccggagatcaggaggtcaccaagggatcagttcatggggtttcagacaccgtcagtgtctctcacactcccaaagcttgggaagtgaatcaagtgatcatgccatggcattgttcatgcagcggtctcatgatatcaatactgctgttatggaagctataacagcaaaaatttttagttagttgtagcttagatcagagatgacaccatttttgtcgtttgttttgtttgttcataagtgtgctgccattctttagtatgttcatcctctttgacctgaggtgaatccagggcacggtgtaaacaacgagctgtatagcctggattcgcaaactttcaagtacagaatgtgactggatttttttgaaattaaagagattattttgctc

SEQ ID NO: 24473 - DNA, 2913 bp, Oryza sativa
  ref <308>: DATABASE ACCESSION NUMBER: AK099915
  ref <309>: DATABASE ENTRY DATE: 2002-08-28
gattgctcctcttcgtcttcctccggcctcctattgtaattgctgctttggttctttttctccgtgacttgcgtctcccattcctctcgcgccatccaatctttctatccaacaattaatccccttcctctctcttctcttctcttcttccccaaatgcttcttcctcgcattcgcaatcgcaatcctgccctaatccccaatcccaatccaatccccccgcattaatcctaatcctaatcctaatcctaatcccaatcccatggacgagtaccaccaccgcatgggcgccgccgccgatttccgccgggacctcgaggacctcgtctgcgaccacctcgggggatgcttctccccgacgtcgtcctcgtcgtcgtgctccgcggcggggggaggggtcgccgcggggcaccagcccgacgaggagcccgagtcgtctgccgcgcggaggcggaggcgggagtcgcgcctcctcagccggtgggtcgcgcgccaggccgaggaggtgctctcctccatggagcgcgaggtcgagcgacgcaaccgggaggccgagctcctcgcgctcgcacgcctccaccccgtctccaccctcgacccctcctccttcctcctctcctcgcccaccgcgccgccgccgcgcccccaggcaccctccccgaccgcgcccccttccctcctccagatgtggcgcgagctcgagcaccgccgatccgacgccgaccagccctccgaccgcgagccctcccccgacaccgccgaccgcgagcgcgtgcgccagatcgcccgccgcctcaccgccaacaccgacgtccccaccgccgccgccgctgccgccaccaccggggagtggctcggcgggacggagagacagagggtcaggctcgtcagggagtgggtgcagatggccagccagcctcgcgactcccgcgtcgcctcgcgcagggacgacacagccgctggcgagagggagaggcgaggggagcctcctcgcctccgtggccgacaagcgcgtctcgatgtcatcactcggatggcccgagagcgccaacgcgagctccaggggatatcagggtatcacattgtgtccgagttccctcaccgcagccgcaaccgcatccagggattgcttagggggaggttcttgaggaacgtggttcttccagttgaggaggagggacgaccaccatccgtggcggcgagggagctcgggcagttgaggcagagccatcgtgtgtccactttgagatcagagagtgctgtaagtagtgaagatgttagccggtttgattcttctgtggctgaaagtgttggagtactaggtagtgacgaacctcaacaaggggctgaggtcagggccctcactggtactgagaatacgacccaaattatgcttgaggatgtgggtttacaggaggcagatgcagaaaatgctgccatagagtcaccaagtgtagctttggataacatggttgagatgcatgaaactcaagttgacaataggctgcaagatgaggcaggacgggatgcaagattttggcagccatctctggacgactcacttgataggtggcccaatgaaactgcagaggatgctgaaagaaattgggaagataatgcagaggaactacacagtgaaactatggaggatgatgccagggagcatgatcatcttcaagatgagcatgatgaatggcatgatgacgagtctcatggtactgagaactggcaagatgatttccaagattctccacttgacatgggccccattcctagaactgaaaatagattcatcccgccatgatgacaatgtgtacagcatggaactgagagaattgcttagcaggcgaagtgtatccaatcttcttagtaatggttttggtgaaagtttggagcgattaataaggtcatatgttcaaagacgtggtcgtggacccctcaattggaatctcgatgcagctattccatctgtgaattcaccaaacgaaaatcaggaacaagagaggaatgctgaaactcggcaattccaagctcctgttaacagacctgcgcttgttatccctcccccacctttgccaccccgacagccactatggcacagagaattgcgtcataacaactggagcactagacacagggaatgggatgctattaatgatttgaaagctgacatgggtagacttcaacaagggatgagcagcatacagaggatgctggaggcgtgcatggacatgcaacttgaactccaacgctcagtgagacaagaagtgtcggcggccttgaatcgctttgcaggacctgaagggtatccgacggatctatctgacgatggatcaaaatgggatcaagtgaggaagggaacctgctgcgtatgctgcgatgcgcaaattgattctctattatacagatgcgggcacatgtgtacttgctcaaaatgtgcaaacgagctaattcgcagtggtggcaaatgcccactatgccgagcgccgatcgcggaggtggttcgggcatattcagtaatgtaaagttgtggaaatacagtagggaagggaataaaactgatggaaaaagcgaagttttgctgcacgaagctttgttcaggaaaaaggggaaacaagagctctgctgctgcttcttcttcattctttttcttcttccatttttgtctgtcctctctcgtcttcttcttgtgtatctatcgatctactacaggtttacatatttgttgccttgctgttggccgcagcgcgagcagcaaagggcgtgttaattgattgttggaaagagtttgcgatgggtaggactggagtaaaaagagagcggctgcccattgtaagttctttccctgtatttatgtcctgaactgaactgaacagaagagacactggcagttactcatatagattattaatct

SEQ ID NO: 24474 - DNA, 1712 bp, Oryza sativa
  ref <308>: DATABASE ACCESSION NUMBER: AK099916
  ref <309>: DATABASE ENTRY DATE: 2002-08-28
gtcacggacggggggactctctctggctgccatggcagaagcggcgaagcttccacgggtctccgcctatatatccccacccccaagcccgcgccttgccgacctctactcctcctaggcgtgtggcgggtttgactttctgactttgggagggagatttgtccaagaagaattccgttggaggaggattcggagagctccattggtctgtgggtcggtcggtccagcttgctggagaataagaagggggtgttgttgcgttgcgggcgagggaaggaggggaggagaggaggcgtcttgccgttggggttctgatccctcttggggctcccgtcgaggaggtggcacgatgaagacgccatcactgcttgttcagtgtttccctggcttgcttcccagcaaggctacgagttgtgtgccaattgtatcagaaagggatctacagctaccatcaccagctgtcgagataatcccatcaaagagtgctcatccttacaaatatgctggcgagaaggttgatgttcaaggtcttgacattttcaaggggaaggtcagtgtagcggatatgatagccttctccccttctgaagtagtcgcatccaaatatgatggatctctgaaatattgggagagttccattactctcgtcaacattattaaaaatgagatccgtgatgggcagttgagcttcaggggcaagcgggttctagagcttggttgtggatctggtctggctgggatttttgcctgtttgaagggtgcatccacagttcattttcaggacacaaatgcagaaacaataagatgcagagcaatacccaatgtgcttgcaaaccttgagcaggctcgggacaggcagaacagaccatcagagagccctgttacaccatcacgacaactgttagccccgaatgtacatttctatgctggggactgggaggagctccctactattctctcagttgtacacccacctgcagcaccaacaaaccttagcttctcagaggacgactttatggatggctgcagtagccatgatgggagcagcatagttggtgtcgacaattgccccaggcgatcaaggaaactttctggtagccgtgcatgggagagggccagtgagacagaccaagctgatggaggctatgatgtaattttgatttctgaggtcccctatgcggtgaactctttgaagaagctctatgcccttatcacaaagtgcctgcgacccccatacggagtactgtatgtggtttcaaagaagaacttggttggttccaatggcggcgcaaggcaactcagagctttgatggaggaggagggtgtccttggtggccactttttaaccgagttagctgaccgggaaatttggaagttcttcttcaagtaaactagcaaaccaaggagctgggaagatgaaatggggccctggccttgtgacacaattttttgatgtctactctgcagcgctgtacataccgcaaagcgtagttccattaattctttggtaatataggattatgatatgtgtgcctcagttgttgtgcttgctgatgtgttggaaattccacccttttgtagatctcctatgtggtgttgctaagtaaagaaatcaaattgtaatgaaccttctgcataccgaaattatacggtgatggcattagtcagagcacgataccagaaatatttacgaactgttactacttgcttgg

SEQ ID NO: 24475 - DNA, 1430 bp, Oryza sativa
  ref <308>: DATABASE ACCESSION NUMBER: AK099917
  ref <309>: DATABASE ENTRY DATE: 2002-08-28
gaatgcccctcccccttgaccggccaccacaatgcggccgccctcgtcgtcggcgacgcccgggacgggccgggtgtcggcgttcacgatgcgcgcggtggcgcgcatgtcgagggcgcggtggttcatcttcctgaggcgggtgtaccagtaccagaacggcccgaggtccgacctgggctccaaccccttcaactcgcccggctggctcgccctcgagctcggcgtgatcatggcgcagatggtcgtcaccaccgccgtcgtcgccacctcccccaaggagcgccccgcgtggccgctccgggtttgggtcgccgcctacaacgtgggcaacgtgctcagcctccccctcctctactggcgccaccggcattcctcctccggcgcccgcggcggcacgctctccgacgatcccgagatgcacggcgccaacgaccctctaaggaacaggtcgtatctgatgaacaaggcacgggcgttcctggagctgttcttcgcgatgtggttcgtgatgggcaacgtgtgggtgttcgacgcgcggctcgggtcgttccaccgcgcgccgaggctgtacgcgctctgcatcggcctcctcgcatggaacgccgtcgtctactcgctcccattcctcctcttcctcctgctctgctgcttcgtcccggccgtcggctacgcgctcgggtacaacatgaactccgcgtccgtcggccggggcgcctccgacgagcagctcgccgcgctgccgcagtggcggttcaaggagccggccgacgcgccgagagaccgcgaccacgacgatcaggagtgctgcatatgcctggctcagtacaaggagaaggaggaggtgaggcagctgccgtgcacgcacatgttccacctgaaatgcgtggacaggtggctcaggatcatctcctcttgccctctctgcaagcaagagctcagctagaaaaacaagctgacatgaatacggagctactgataccgcgccttccgacgcatgcgtcgcacctcacggaagaagaaaaagaaaagaaaaaaaaaccctggcacgccaaccatgcgtgcactgacctagttcgatattgctgatgacggcacgatgaatatttatgcatacacttgcatgtgaaaaagatatgcttggattaattaggctaggtagacaagcgggaaatgtgtaaaagagtttttttgtgtgtgtgtgtgtgtgtgtgttgtttgcggtgttgttgcatctctcgaatgtggtcgatcgagatgcgcgtgtacgtagtttttttcagcagaaaccaaacgagaacatataccagggtttgcgctcgtgctccagcgaatgccaacccaaaggtattcggcccggtcgaaactactacagtactgtattctaggcctggctcagagtgggccaacattttcggcccagtttatcg

SEQ ID NO: 24476 - DNA, 1412 bp, Oryza sativa
  ref <308>: DATABASE ACCESSION NUMBER: AK099918
  ref <309>: DATABASE ENTRY DATE: 2002-08-28
gactcacacacactctcctcatcccagagcaagaagctcagctcctcctcctctcgcatggcagccatggccaccaccgcgtccagcctcctcaagacctccttcgctggcgcgcgcctccccgccgccgcccgcaaccccaccgtctccgtcgcgccgcgcaccggcggcgccatctgcaactccatctcgtcgtcgtcgtccactcccccctacgacctcaacgccatcaggttcagccccatcaaggagtccatcgtgtctcgcgagatgacccggcggtacatgaccgacatgatcacctacgccgacaccgacgtcgtcgtcgtcggcgccggctccgcggggctctcctgcgcgtacgagctctccaaggacccctccgtcagcgtcgccgtcatcgagcagtcggtgtcccccggcggcggcgcgtggctcggcgggcagctgttctccgccatggtggtgcgcaagccggcgcacctgttcctcgacgagctcggcgtcgcgtacgacgagcaggaggactacgtcgtcatcaagcacgccgcgctcttcacctccaccgtcatgagccgcctcctggcgcgccccaacgtgaagctgttcaacgccgtcgccgtcgaggacctcatcgtcaaggagggccgcgtcggcggcgtggtcaccaactgggcgctggtgtcgatgaaccacgacacgcagtcgtgcatggaccccaacgtgatggagtccagggtggtggtgagctcctgcggccacgacgggccgttcggcgccacgggcgtcaagcggctgcaggacatcggcatgatcgacgccgtgcccggcatgcgcgccctcgacatgaacaccgccgaggacgagatcgtccgcctcacccgcgaggtcgtccccggcatgatcgtcaccggcatggaggtcgccgagatcgacggcgccccgagaatgggcccgacgttcggagccatgatgatctccggccagaaggcggcgcacctggcgctgaaggcgctcggccggccgaacgccatcgacggcacgatcaagaaggcggcggcggcggcggcgcacccggagctgatcctggcgtcgaaggacgacggcgagatcgtggacgcctgagcgaatagaacagggtaaaaaaaaatccgcaagacgtggtggtgacacggaggagttggggacgagaagaagatgtggactttcccctgtgtttttttttcgggatttgcattgatccccttgtttgttttagctctggatgttgattagcgtcttgttcatagcacttccactgccaccgtgtgtgtgtgctctgcttgcctgatgagggcaagaaaacttccatggatccgtctctctgggaggaatgaataaaaaggatgaggaaataaaaatgattcagtgcc

SEQ ID NO: 24477 - DNA, 2019 bp, Oryza sativa
  ref <308>: DATABASE ACCESSION NUMBER: AK099919
  ref <309>: DATABASE ENTRY DATE: 2002-08-28
ggtgtcctcgcctgagggtgtccccatcccatcccgtcggctgggcgtggaggtggagtcccgtgtcgcgagttcggccgccgctgccctgcgccgatctccatccccgtcggttgtcctgctgcttccgccgcatcctggagctgccgccatgtccgacatggagtccatgacagcccttatggagtctacaggctccaagctgcagctgcttcagcgtgcatttgccgagcttgagagccagagtgctgtttcattgaacttaaagtggaagcaacttgaggaccatttccatggccttgagcagtcgcttaagaaaaagtttgatgagctgaaagagcaggaaaaggagttcaaggagacagtcacgaaatcggagcagatgcttgagcaacaagaggctgctgtcgtggcaaaggaactgacttctcttgaaagactgcagcagaaaagggatgctgcgttggctatgatcttcggcaagtcaaagctgaacttgtctatgcctgtaatcaacccaatcagcaaatctgtgagtaacaatgctgtgttaaatggcaacatcgctagcctgtggcccaaacctgcaactgcgcatggtgcatacctgcaagatggaaacactgctgtgaagcctcgttctcaacttgttatcctctgtgaagaaatgaatgttaacgggcttcataagttcatatcagacaatcgcaaagacttaacatccatccgtgaggaaattcccgttgcacttaggggagcaactgatccatatggcttggtgttagcttctctagaagacttctattttggagacaatcttatattggatggtaaaaaggatggaaaccttctgggtgtacggaggacgtgcctcatgttgatggaatcacttgctcagctgcaaactgatgctactactggtttcatatcaaaaggccaaatgcttactgctagtattaaggagagagcgaaaaagatagcgcttgagtggaaatccaagttggatagccttgactttgatgctagcaatgggaactgcctggaagcacatgcgtttcttcaactcctggctacctttgctatattttctgaatttgcggaagacgagctgtgtaagcttctcccatcagtcagtcgtcgtcgccagacacctgagctttgtagaatacttgggttgtcacagaacatgccaggtgtcattggagttttgattgaaaatgggagaactattgatgcaattaatttggcttatgcatttgagctgactgatcagtttgaaccagtcgaattactgaaagcttatctgaaggaggtcaagagtatgtcacatgtcaagaccggaaagatgtctccgggagtacagaatgaaattaatgaacgcgagttgtctgccttgaaagctgttatcaaatgtattgaggagcacaaacttgatgagaaatatcctatcgacccacttcagagaagagtcatccagctagagaaagccaaggcagacaagaggagggctgttgaagctggaaagccacagtctaagaggcctcgtgccaacggatcagtatatgcgccacatattactagcttttctgacaaaagcttctaccaggccgctgcgccacagaggcattcctacccttacgagaggcagtatgtatatggtgctgaggcccatcatcacccaacaatgataagctcagctccctatggcatgtcacctgcccacacaacatactatggtaatggctatcaggttcagtaccaggtaccatatatccactgatggagagagcgccgtgtcctctttcttaactatgtagcttttaacctgctactatgtgttgtagttgtatcaatccactagctagactgcctagctgaaattagttcgaccactcctgtgtgtgctgagtggccagtgtgaaaatctgttaatttccctgacgacttatgacataatttactcctaatgtttagttaaataatttgcttttgtttaatataaggagttgagatagtccc

SEQ ID NO: 24478 - DNA, 1869 bp, Oryza sativa
  ref <308>: DATABASE ACCESSION NUMBER: AK099920
  ref <309>: DATABASE ENTRY DATE: 2002-08-28
gggtgtaatcctcctcctactctgggtcagctcttaatcccttcaacttccgtcggttggacgccaccggaagccaatccctgtttggtgttttacccccaattttgtcagattttttggagcgaaaccacgagctgtttgaagtgttcggcttcggaatctctttcttggagttctaggaatggggttttgatacaaagattgaagcctttttgttagcgttggtgcaaagattgtattgtattgttttttttttctgcgatgggtggaggcgtcacggagcggctcccggagggcagcagcgagccgctgctcccgacgaagcgggagggcggcggcggcggcggcgagttcgccggcgcggtgttcaacctgtcgacgaccatcgtcggggccggaatcatggcgctgccggccacgatgaaggtgctggggctcgccccggggctcgtcgcgatcttgctcgccgcgctcctcaccgacgcctccatcgagctgctcgtccggtccagccgcgccgccggcgcgccgtcgtacggcgccgtcatgggggacgcgttcgggtggtgggggaggcggctgctccaggtctgcgtcgtcgtcaacaacatcggcgtcatgatcgtctacatgatcatcatcggtgatgtgctatctggaacctcctctggtggtgagcaccattatggtgttttagaaggatggtttgggccacaatggtggaacgggcgtttctttgtcctcctggttacaactcttgttgtatttactccactggcatgtttgaagcgtgtcgattcactgagttacacatctgccatatccgttgctctggcagttgtttttgttattattactgcaggaattgctattgtcaagttgataaagggacaaattccaatgcctaagttgtttcctgatgttcccgacttggcatctatttgggaacttttcacagcagtgccagttcttgtcactgcttatgtttgccattataatgtccacccaattcataacgagctgaaggacccttctcagattaagccaatagtacacacatcattggttctatgctcaactgtctatatcacaacaagtttctttggatatctcctctttggtgaatctacgctgtctgatgtgctcgccaacttcgactccaatcttggtattccatacagtcagatgctaaatgatgctgttagagtgagctatgctgttcaccttatgcttgtgttccccatgatattccatgcactacggcttaatttggatgggcttctcttttcctcatcaagtcctatgtcttccgacaaccgaagattttctgtaatgacagcggtacttctcctagttattttcctatcagcgaatttcattccgagcatctgggatgccttccaatttactggtgcaactgctgctgtgtgtatcgccttcatttttccagccgcgatcactctaagggatccacacagtatagcaaagaagtgggacaaaatcctgtccatcttcatgattgttcttgcaattgtatcaaacgtagtagctgtgtatagcgatgcatattcaatgttccacaggaaaagttccccttccatagcctgatattccaaaatcctattggcgagtcagtggattctttatctgaaagatggcttgtacattagctagcaaataaaatcattatttaggcaagtatttacgggatttattttacggtttatttggcaaacaacccttgactcaattatgttgagttggatgtatctataggatgggtgtgtaaactttggtccgaagtgttttagtccaatgtacaattcaagatcaatttgaatcaaatgtgaattatggagttattattgt

SEQ ID NO: 24479 - DNA, 1735 bp, Oryza sativa
  ref <308>: DATABASE ACCESSION NUMBER: AK099921
  ref <309>: DATABASE ENTRY DATE: 2002-08-28
ggctcgccaagtccaagaaagggaaacaaaaaaaaaaggggggaggagagacgaagagagagacaagaacaagaaagggcaaaggcaggggaagaaagcagcgaaaggattcaacgcagctcgcgaaggccgcgatccgccgcctcgcctatccttcttgacagccgaccttggggcggatttaccgaacatatttgatcgttctttgctggagtttatcaatggcagcaggggtcacttttaactggattaaaaccccacttgacatccggagatttcatgacttttctagtttaagttttcgatgccgaaatacttttggatcaatccaaccttcctggctgacaacagaccaggaaccatctttttccaaagttcgagtggctgcagattactcagattctgttccagattcaaagtacacaagagatcggggttaccatcctcttgaagaagttaaagaacgtccaaaaaagaaggacctgtcactgacagatgtggaaactgctagaactgtagtagaggccaatagcaagggattacttgtgttccctgcaagagtgcataatgaacctcatgggcatgttgcttggtcagactttcagtatattgtagatgactatggagacattttctttcaagtacccgacagtgagaacatcttggaagatgatgctgcaaacaatcctgtgacagttttgattggaatggatggccctattattggagaaactagtgtggtgactagtgattttagcgactacatggatgttgaaaattttatagacatgcctgatgagaacgacagcaagatcgatacagaaataactgacattcttatagagtgggggatgccagcaacaatgcgtgcaatacatccaatttattttgcgaagtgtttgacaaaggctgttcatgataaacacagggaaaagatggatagtccatcaaatggtgtctcaattgtaggatatttgagacctgctttcatagaagaagaatcttatctaaggagcttatttcatggtgagtgcaatggtgatggttattcgtctgattggagagatgaatgcaaaagagaacctgcaccagcttctggaaccaatggcctaattgatgatgataaatcgagatttgatttcacgaatgtgggaagtagcactgattcaacaatctacaaactggaaataatgacggttgagctgttttccatatatgggaagcagttgatgattgatccacaagattttcaagatgcagaaccagatattcttgcaaattctgcttcagaaattataaatcgcattaaagaaaacgatgatcagtgcgctatggcactcaggtccctctgtcataggaaaaaaggcctcactgtcgaggaggctagcttgattagcatcgacagtctcggtatcgatgtaagagctttctctggtttggaagctcggacagttagattttcgtttaatgcgcaggcactctctgaacgttcagcagagaagaagataaggcgaatgcttttccctcgtcgtaagaacgtgaaaccttctactgaagatgaatgttaacctatcaaaacctggttaggacacaagagagtaaagggattcagcataagaggtgcatccaatctgatgcgaattcgttagagatactgcaaatctgccgactatgaaaatgacctcatttcctgaagagttagataactttgatccaggttttgatctgattgagg

SEQ ID NO: 24480 - DNA, 2203 bp, Oryza sativa
  ref <308>: DATABASE ACCESSION NUMBER: AK099922
  ref <309>: DATABASE ENTRY DATE: 2002-08-28
gcggtggggtagtgaaaaaaatcatcgcgcgcgcgacgaagcagcagcgacgtctcggtgagtgacggtgagctcgatccatccattcaagaacgtacgtaggtgcgacggcggaggcggcggagctgatgaattccggcggccggagcctcctctcgtccccgctcttcgccagctcttccccggccttccgcggcggcgccgccgccgcctcctgctcctcgtcttcctccccgtcctcctcctcccgcgccactgtggtgcccatggtgcacgacaccggcggcgggcgagcgtcgtcgacggcgtgccactactcgccgtcgctggtggcggcggagccggaggagcacgtccacggccgctccaaggacgacgacgacgacgccgccgtgtcgctcatgggcgagaaggccttgctggagctgctcctcgacatggctttggaacaacacgcacccgggaagaagctaccagctgaagagagggaagagagtgagttcgacatctatctgagagatgataaaagccatgtcctttaccatccagaattcagctctacatctgtgagttcttcaccattgtccgtaaaatctagcgaaagatcggatcttggtacagcttcagcggttctgacgaaggacgtggcattattagcagaagaaacagacattttagcaacccaactgaaagcatcgcaactttacagtgtggattcgagcaagtcaaatgaagaactgcagagcaagggtcaggtgttcgttagatcgacgaggttactcgagaggagatccaagcggcgttatgctcctcgagcatcgatcgctgatgtttcctgcagcgctgacaattcgaagaagaaagagaaatcaaagaagtatggcagagttcttgaaccagatgagcctttcaagctgttcctaagagatcgggagacgacggaattcctgacagcaaaagaggagagacatttgttcagtaaaatacagattcttatgaaaatagaggaggctcaccggaaactagaagttcaatgcggccgtgagccgacattggcagagtgggctgaggctgtagggatgagcagcaaggagctgcagtcctctattcgcaccggaagacggtgccgggagaagatggctcgatcgaacttcaggcttgtgattcatgtagctaggaagtatgaaggatatggtcttgacatccaggaccttgttcaggatggatgcagtgggttgatgaagacctttgagaagttcaatcccagcaaggggtgtcgattcccgacctacgcatattggtggatacgccaatcaattaagaagtcaatcttcaagaactcaagactaatccggttaccggagagtgtgtatgcgcttctgagaaaggtgggcaaggcaaggatggaatgcatcatggaaggggagcaacccaccaacgcgaacgtagcgaggcgcgccggcatcaccatcgagaagcttgcgaagctccgagcgaaaacccggaaaccccggtcgatgcaggatcatgtctggtcagatgagggtgtcaccttccaggagatcacagaagacccaaatgtggagccacctgacctgagtgtggacaggatgatgatgaggcagcaggtgagggacttcctggggatcctgagccccagggagaaggagatcatcgagcaccggttcgggatccacgatggcgagccgaagacgctacatgtcatcggggacatgtttgggctgtccaaggagaggatcaggcagctgcagaaccgggcgctggagaagctcaagaggagtgcatccttgcaggggtttgatgtctactttgatttgctaacctgaagaagaaaggccaagcagctcatttggtttcagaaactttcagtcaagttgtccatacaaaacagcagaaacacatacacactgtagctttctagacctattatacatatatactacacacccagtgacacgtactgtacaagtatagtgctagatctgcagaaagaaatgtggtacacggattcagagtttcagatggcatccttttttgcttatgtaagtaaatttcccagcaagctgctgttggtgcttatactgatactgcaagtctgcaatgcaaagcaaccctcattgtaattaaggataatcatgtacatttttttacccttaatttgagctgatcaggcgctgtaatt

SEQ ID NO: 24481 - DNA, 1875 bp, Oryza sativa
  ref <308>: DATABASE ACCESSION NUMBER: AK099923
  ref <309>: DATABASE ENTRY DATE: 2002-08-28
gtgaagctggagagctagcagaaacaaacccctctcactcccagatacctgctgctgccactagcccactaccatggatccttgcaagttccggccgtcgagctcgttcgacacgaagacgacgacgacgaacgcgggagctccggtgtggaacgacaacgaggcgctgacagtggggcccagggggccgatcctcctcgaggactaccacctgatcgagaaggtggcgcacttcgcccgggagcgcatcccggagcgcgtggtccacgcccgcggcgcctccgccaagggcttcttcgagtgcacccacgacgtcaccgacatcacctgcgccgacttcctccggtccccgggcgcccagacccccgtcatcgtccgcttctccaccgtcatccacgagcgcggcagcccggagacgatccgcgacccgcgcgggttcgccgtcaagttctacacccgcgagggcaactgggacctcctcggcaacaacttccccgtcttcttcatccgcgacggcatcaagttccccgacgtcatccacgccttcaagcccaacccgcgctcccatgtccaggagtactggagggtcttcgacttcttgtcccaccaccccgagagcctccacaccttcttcttcctcttcgacgacgtcggcatccccaccgattaccgccacatggacggcttcggcgtcaacacctacaccttcgtcacccgcgacgccaaggccaggtacgtcaagttccactggaagcccacctgcggcgtcagctgcttgatggacgacgaggccacgctcgtcggcggcaagaaccacagccacgccacccaggacctctacgactccatcgccgccggcaacttccccgagtggaagctgttcgtccaggtgatcgacccggaggaggaggagaggttcgacttcgacccgctggatgacaccaagacatggccggaggacgaggtgccgctccggcccgtggggcgcctcgttctcaaccgcaacgtcgacaacttcttcaacgagaacgagcagctggcgttcgggccggggctggtggtgccggggatctactactccgacgacaagatgctgcagtgcagggtgttcgcgtacgccgacacgcagcgctacaggctggggccaaactacctgatgctgccggtgaacgcgcccaagtgcgcccaccacaacaaccactacgacggcgccatgaacttcatgcaccgggacgaggaggtggactactacccatcgcgccacgcgccgctccgccacgcgccgccgacgcccatcacgccgcgccccgtggtggggaggaggcagaaggcgacgatacacaagcagaacgacttcaagcagcccggggagaggtacaggtcgtgggcgccggatagacaggagaggttcatccgccgcttcgccggcgagctcgcgcaccccaaggtctcccctgagctccgcgccatctgggtcaactacctctcccagtgtgatgagtcgttgggggtgaagattgcgaataggctcaacgtgaagccaagcatgtgaagaaactaaggcacaagaatgcatcatctcttgttaattaattggagtactaccaaccaaataaggccagacaatgtcagatgcacgcatcttctgttgtcgttgggccatcttttgtatgcatcctattgttaattactagtacatgatatccaagtgatcatcagcaaggctacagaaattctgtaatacgataaattaaaagaaaccaaaatggagcctgcatatgtgtaacttaattaatgtactggcgtattaatgccactgctgcatgttgtaatactccatcaaagagtctattactattaagtatttaaattatc

SEQ ID NO: 24482 - DNA, 1746 bp, Oryza sativa
  ref <308>: DATABASE ACCESSION NUMBER: AK099924
  ref <309>: DATABASE ENTRY DATE: 2002-08-28
gattaccacataccatacctatggattcatccattcttcctgctctgctgattgccctgttcatacccatcctcctccaccttgtcacccgattcaagtactcatcctacaatctccctccaggctcacttggcttcccattcgttggccagagcatctccttcctccgggcccttcgcagtaacactgatcaccaatggtaccaaggcaggatcggcaagtatggtcctgtgtccaagatgtggctgtttggctcacctgcagtcctgatggccggacctgcagccaaccgcttcatattcagcaacaaggacctgctcttcacggggacaaggtcgatgaacctccttagcggccggaatatactgatgctctcaggcgaggagctgaagcaagtccgtggcgcactgcagaatttcttaagcccagaaatggtaatcaggtatgtctctaagatggatgaggaagtcaggaggcatgttaaggtgaattgggttggacacaagactgtcaaggttcttcctttggcaaagaggctcacattggacatcatctgctcggtcatcttcggacaagaggcaggttctgtcagagaagcccttgccaccgacttcccggcgatggtgagggctgcgctgtcgattccagtgaagatacctttcaccaggttcagcaggggcctgagtgcgagccaaaggatcaggaagttgctcagggggatcgctcgtgagagagagacgctcttgcagcagcagcaggctcatggcgcttcagcagctgacgatttcttcacatacatgctcgccttgcgtgctgaaggtgcgcactcgctcacggtcgaggacatcgtggacaacgcgatcttccttctgatcgcaggctatgagacgacatctgttctaatcacattcatgctctggcacctggacaaggagccagaagtcctttccaagataactgaggagcaagatgagattgccaggaacaagggacctgaggatgctctaacctgggatgatgtttcaaggatgaagtacacatggaaggtggcaatggagacagtgcgaacaatccctccaatttttgggagcttcagaacagctacagagacatcgaataccagggctatcacattccaaaaggttggatggtattcacagcccaatctgttacacatttggatgcaaatattttccctgagccaagcaatttcgaccctgctcgattcgagaacaactcttcgattcctccttattgctttgtgccatttgggggaggtccaagaatgtgtcctggaaacgagtttgcaaggactgagacattggtgaccatgcactccttggtgacacagttcaggtggaagctgtgctgcaaggaagaaagctacaagaaagatccgtctccgacgcctcttcttggactcccagttgaactggagccgagatgcctccctgaaaatgctcatgcttaaaaattgcttcatgtccgtgcattttgagtttatgctatttgcagttagccagagagaatcatggagtaatgcagtacaaatccaagaactgacaagaattcaagtccaaattcaatccttagattgagaaaaacaaaagcaaatctatatgaacaatatagacactatctatattcggattctccaacttttgttatacatatgtagattaaatttaaactggcgtgttcgaggggtatgaataatgttatgatctacggtgttggcacttttcc

SEQ ID NO: 24483 - DNA, 1934 bp, Oryza sativa
  ref <308>: DATABASE ACCESSION NUMBER: AK099925
  ref <309>: DATABASE ENTRY DATE: 2002-08-28
ggcatctcactcaggctggccggccgaaatcgatcggcagcaaaggccaaccaaactaagccaagagcgagctagctaagctggttttctgcttgtgccatgggagaagatggcggcgtgaactcttcttccaactctccggcggccgccgttggtctcgtgctggtggtggcgatctgcacgtacctggccgtcgtcgccacccgcaagcagaagcggcggcggcggcggcggccgccggtggtcggcacggcattccaccagctgtaccacgtccggcgggtgcacgactaccacacggcgctgtcccgcgagcacatgaccttccggctgctggtgccggccggccgcgagcagatatacacgtgcgaccccgccgtcgtggagcacatcctccggaccaacttcgccaactacggcaaggggtcgtttaaccacgggaacatgagcgacctgttcggggatggcatcttcgccgtcgacggcgacaagtggaagcagcagaggaagatcgccagctacgacttcaccaccagggccctccgcgacttcagcggcgacgtcttcaagaggaacgccgccaagctcgccggcgtcgtctccagccacgccgcgtcaaaccaatccatggacttccagggtttcttgatgagagcaacgatggactccatcttcaccatcgcgttcggccaagacctcaacacgctggacggctccggcgaggggcgccgcttcgccgcggcgttcgacgacgccagcgagttcaccatgctccgctacctcaacccgttctggaagctgtcgaggctcctcaacgtcggcgccgaggcgatgctcaaggagaggatcaaggtcgtcgacgggttcgtgtacaagctcatccgtgacaggtccgacgagctctccaacaccaaggcacacgacactgattcgaggcaggatatcctgacaagattcatccaggcaacgactagcgattctgggacggttgattacaagtacctgagagacatcatattgaacattgtcatagccggcaaggacaccacagccgggtcgcttgcttggttcctgtacatgatgtgcaaacacccggaagtacaggagaagatctgccacgaggccatggaggccaccaacgccggcgaggccgcttccatcgacgagttctcgcagagcctaaccgacgaggcactgaacaagatgcactatctgcacgctgcactgacggagacgctcaggctataccctgcagttccactggataacaagcagtgcttctcagacgatgtattgcccaacggattcaacgtcagcaagggggacatcgtgttctacatcccctacgcgatgggccggatggagagcttgtggggcaaagacgctgaatccttccggcctgaacgttggctcgatgagaacggcgtctttcagcaggagagcccgttcaaatttacagctttccaggccggcccaagaatctgcctcgggaaggatttcgcgtacaggcggatgaagatcttcgcggccgtgctgctccgtttcttcgtgctcaagctgcgggacgagaaggagatcatcagctaccggaccatgattacactctccgtcgatcagggtctccatctgacggctatggcgagatgagggcacacactacagtctgggcacgcacagcagctggctcctgtactcatgcaagtgatagctccttgtgcataccaaaacgaacgagatctgcaaaccttaattatgtctgatcgtgaataacccgcattgcaccctagaataataagtgcatctgaactgcagtcagggtcagagtaacttattggagtgaactggtgttgtagggaacttcaattgtacaacttggagggcgcaatacaaatgaatggattaaatagtagaaagttgattttaaaagggctttc

SEQ ID NO: 24484 - DNA, 1810 bp, Oryza sativa
  ref <308>: DATABASE ACCESSION NUMBER: AK099926
  ref <309>: DATABASE ENTRY DATE: 2002-08-28
ggttacgcgccgccttggtagtagttggtacttggccggtgagacgagcgccccaccaccatctcattcttgcctcctccaaacgcagcatccccggcggcgcggcgcggcgcggcgcggcgtggcgtctcgtctcgacccatccctccccctcccacgcagctacgcaaacgcaaacgctggccgtcggatcggctatcgtgcggcaccaccacctgtctcgcttatttggtttttgcctcttcttccatttggaagcaggaaacagatttggagcgggagagagagcccacggctatttcctacctcgctaagcaaccttccaacctcgtctgcttaagcctgcaggaagcagcgtttctgagagtgagagtgagagaaagagagagagagagagatggcagggaggaggcagcttctgcttcttcttcttctctggggattcttgctgctcattcgtcttccttattcagcgtcgcagtccttcatcggcatcaactacggcgacgtcgccgacaacctcccgccgccggcgtccaccgcgcgcctcctccagtcgacgaccatcaccaaggtgcgcctctacggcaccgacccggccgtcatctccgccttcgccggcacgggcatctccctcctcctcggcgccgccaacggcgacatccccaacttcgcgtcctcgccggccgcggccgccgcgtgggtcgccgcgcatctcccgtccacctcgtcgccggcgatctccgccgtctccttgggcaacgaggtcctcttcgccgacacgtcgctggcgtcgcagctcgtcccggcgctgcagaacatccacgccgcgctgccgcccaactccagcgtgaaggtgtccaccgtgcacgccatggacgtgctggcgagctccgacccgccctcctcgggggcgttcaagccggagctcgccgccgcgctcgacccactcctggccttcctgagcaagaccggctcgccgttcctcatcaacccgtacccctacttcgcgtacctgagcgacccgcggccggagacgctggcgttctgcctgttccagcccaacgccgggcggcccgacgccggctcggggctcacctacaccaacatgttcgacgcgcaggtggacgccgtccgcgccgcgctggacgccaaggggtacaaggacgtggagatagtcgtcgccgagaccgggtggccgcacagcggcggggccgacgaggccggcgccaccgtggggaacgcgcgcgcgttcgtctcggggctcgtgtcgcacctccggtccatggccggcacgccgcgcgcgccggggaagcccgtggacacgtacctgttcgccgtgtacgacgaggacctcaagcccgggaagccgtcggagaagtcgttcgggctgttccagaccaccaccctcgccgagacgtacccgacggggctgatgaggaacggcaccgccgccggtctggcaccagccatggcgccggcggcggcggcgccgacccttccggtcaagccatcacctgctccggcgagactgccggggcaacaaccacaggtgactccattgcagccgggctcggcggcggcggccgggccttcagccctgtgcgcgccggggacggcgacgacgacggcgaggggagcagcagctgctgcttgtagtagtcctagtgcagcggaatcgccacggacaatgtcagtgatcagcataattgcaggcgtgttgttaatgtacctgttaatctgaggggcagatgcatggatgcattctcttgtactcacattttgttaatcaaatcctgttgatcttgcc

SEQ ID NO: 24485 - DNA, 1672 bp, Oryza sativa
  ref <308>: DATABASE ACCESSION NUMBER: AK099927
  ref <309>: DATABASE ENTRY DATE: 2002-08-28
ggtttctctctcctgctccccccccaacgccgccgccaccgccgccgccgccgccgccgaatccgagacccccatctcggattcacctctcccgcctccggcctccgtcaccgtctccccacgcgcgtcagtcatggcgggaatggcaccagagggatcccagtttgatgctaagcactatgattctaaaatgcaggagcttctgaaccaaggtgaaaccgaggagttcttcacatcttatgatgaagttcatgagagttttgatgacatgggtctccaagagaaccttctcagaggcatctatgcctatggtttcgagaagccttcagccattcagcaaaggggtattgtccctttctgcaagggtcttgatgtgattcagcaagctcagtcaggaacaggaaagactgccaccttctgttctggaattttgcagcaacttgactatgctgtggttgagtgccaggccttggtccttgctcctactcgtgagcttgcacagcaaattgagaaagtcatgcgcgcacttggtgactatctgggtgtgaaggttcatgcttgtgttggaggtacttctgttcgtgaggaccaaaggattcttgcaagtggagtgcatgttgttgttggaacacctggtcgtgtgtttgacatgctgcgtaggcagtccctccgtcctgattacatcaagatgtttgtccttgatgaagctgatgaaatgctttctcgtggtttcaaggatcagatttatgatatcttccagctcctcccgtcaaagatccaagttggtgtgttctctgctacaatgccccctgaggcccttgagatcacccgtaaattcatgaacaagcctgtgcggatccttgtgaagagggatgagctcactcttgagggtatcaaacagttttatgtcaatgtggagaaggaagaatggaagcttgacacactctgtgacctgtatgagacactggccatcacgcagagtgtcatctttgtgaacacccgccgcaaggtggactggctcactgataagatgaggggcagggatcacacagtttctgctacccatggtgacatggaccagaacactagggacatcatcatgagggagttccgatctggttcttcccgtgtgctcattaccacggaccttcttgcccgtggtattgatgtccagcaggtgtcccttgtcatcaactatgatctgccgacccaacctgagaactacctgcatcgcattggtcgtagtggtcgttttggtaggaaaggtgttgccattaactttgtgacccgtgacgatgagaggatgctgtttgacatccagaggttctacaatgtggtgattgaggagctgccggccaacgtcgctgaccttctgtgatcaagttcagaagagttatgttaaggggcctgataaggattgtttttgtctgaagtatcactgtcttatctgggggggggggggagtgataaaggtgggggttctgttttaaaagtcactgtggtcgtagacaatttccaaatttttatgccatgttatgggaatttttgtagttgctaggctgtgctatgtgctggtgaggagggaggagtcttttacttttattatatctattgttaaaactatgtatgaccgaatgatgttatttatttgtgtcatggttgactatttgcc

SEQ ID NO: 24486 - DNA, 1597 bp, Oryza sativa
  ref <308>: DATABASE ACCESSION NUMBER: AK099928
  ref <309>: DATABASE ENTRY DATE: 2002-08-28
gggttatccttcccaattccccgctgatctctatccaatccgcgccgcgcctcctcctctccaagacaggagatgccgccttggtggtggtggtgggatggatggatgtgagagcagattgattgattttagctgctgctgctgattgattgattgattggattggtgatgataattgctcaatcggatgcatgcgatgatccaattcttcttcttcttcttgtgatctacaaattccaatacatatactagtagtagtaagagtaagcattcatataagataatggaggcgtcggatctgaacacccacttgccgccgcgcaagcgactgctcgccggcctcaggatggccgcccctccctgcgccgatgctcccccacccgcgctcctcaccgccgatctcgccgcccgcctccgccacatgatggcctcctcatcctctcccgacgacatcgtccaggccgccaggtcggctgcctccaccgccgcccaagctgccgcggccgcccgggccaccgccgccgagaaggcggccgtcgctgccaaggctagggctgctgcccgcgctgccatggagttcctcgattccatttccaggcctgcctcatccaggaacggcctccagctcaagctcaaatccaggaagaagcatgtgcaggtcaagctcttgtacaagcccaatggccgccttgaggagggtagaggaggacctcctactactggggatgcttcttccaagccccgcaggcgcggcagggagaccgatgaagaggttgctcgcaaattgcaccgcgccatgaacagctcgccgcgcatttccttcactggaccgaagaggccacgcaccattgctgctgagaatgggggtgtgcttgatgcttgcaatggttcttcaccttatccaccaacgtttgaggtcagcacgataactaacggatgctctttagggcaatctagtgagctccctgtgccattttccgagcatgagggtcttgatgatgataataaagattcttctggtcatgatactacaaagagtagggctatcgttggtaatggagttggagctggaaacctaagtgctggtaggaaagtgaagatcaagagaaaggaactgcttttgaaccaacataatagtaaagatacacaagaggccaaagaaataaaaccgtctatagattctatacgatacgacgaatcaaagcaaaatggagctgaaaagagattgaaccagcttgtagatgcaaaggatcccggtgatggtttggcgccgatgaagatctcatctgtatggaggttcaaaaagttcaaaacatcacactgctcttctgacagtaaggttttgcacaacgtgtgcccctctacttcggcggctgagacctctgcttcggtgaaagctgattagtgaggtaccttagctcatagttggcagatgcttgtcttagctatgtttgttgtgagattttgtatgttgaagctaccattcggacaaacagggagggcaggtgatctctcccggtagattccccaccttctatttgattttcatacaaacgtgcgtgcttttatggtatataagttactggatatttctacc

SEQ ID NO: 24487 - DNA, 965 bp, Oryza sativa
  ref <308>: DATABASE ACCESSION NUMBER: AK099929
  ref <309>: DATABASE ENTRY DATE: 2002-08-28
ggctcgcccctctgcttttgctgctgttgcgttgcgtgatacgctcgcctaactttggctaattctgctgatatttgctctccttctgtcatatcaccttgccgctgcttctgatcatctcccgttcttgcattcttcttcttcttcttcttctccggcgtggtgtgctgctgacggctgacgctggctggtcgtggacatgtcgaagaagattgtggtgaagctggatctccatgacaacaaggacaagcagaaggccatgaaggtcgtctccacgcttgccggcatcgacgccatttccatggacatggcgtcgcgcaagatgacggtgatcggcacggttgacccggtgaacgtggtgagcaagctgcgcaaggcgtcctggccggcctacatcgagtccctcggcccggccaaggagccggagaagaagaaggagggcggcggcgatgccaagaaggatggcggcgatggcaagaaggagggaggaggagacggcaagaaggaaggcggcgatgggaagaaggaaggtgacggcaagaagggtgaggcggcggcggcggccaagaaagaggaaggcggcggcgagaagaaagtcgcggcggtggcaccgatgccgatgccgatgcaccaactgccaccgccgtacatgttcaacgccgggtacatgaaccagtaccggccgccgccgccgccgccgccggcctacccgtacgcgccgccacagtactactacgcgagggacatgagcatggaggagaaccccaacccgtgtgccatttgctgatcgaatggtattcttgcattgcatctgatctgtagcaactagcaagtagccctacgtacattttctcgaacatgatgtgtatactgttttttttttttttttttttttgagaaccgatgtgtatactgcatagtagtgtatctcgtgtttgaattggagggtagaagaatttgccggc

SEQ ID NO: 24488 - DNA, 3398 bp, Oryza sativa
  ref <308>: DATABASE ACCESSION NUMBER: AK099930
  ref <309>: DATABASE ENTRY DATE: 2002-08-28
atggcactgaacctttcttgcaatatgggaagttttaagcgtgtaacaagcatcaatgctcccttcattgacttctccagtgttagtaattttgcaagctcggtagctcgtacaagcttatcaccattgcagcagctggagatgagcctcaagatgcaccggtcaagtgcagcctccatgttgaatgcttcatcatctaatgcaatcgtgtccagacccaaggcagccatttcttctattttcttttgaatctgtgagagatgcagtttcctcatcatgaattcagtttccaaactattggcaccaaggtcagatgatgcaagaggaaatgacagctcaagtattgtcaaaacaggtttgggcatcacctgtggataggactccggggacttgcatagaatgcagaatatattattagcatctaagcccaccacccagtggctttcatcttcggattttcttgccttgattgaactaaatattggaatccagcttccaccgaattgaccagaaaagaccctcagtattcccttggaatcaaaggaactaagttcaccattctcactgaaaccaaaccaagataatttagaggcaggagttaaaacaagtcggctggacaatgattgagcacattcagatatcttcagtactttaacatccagcacctggtctcctgatgaaagacaatctgaagcatgagacacaatcgctagctgatctccatggcctgccgcagtaaccactgggccaccgactgagaggatatgcatctgcaaccctccctctgtgaaaatgcgcagaaaatttaaagttgtaactgcagcgacccatccaacaccaacagccacagccttcacttcttctccctcaaacctcattgaccactcactgttgcctgcccaactactgaaagggcggtacataagagtgctcatattcttgtcacccttgcatggatttgcaaagacacttcctgattcattcagtgcagccattgtgaaaccaaaataatcagtcatcgaaggaactctaggacctcttccggtgtcatggaagtctacctctacatgtgaatgcccctcattttcgatagtagtgatacttccaagcatattgtaggcaaggaaatttcgcttgccaggttgaggtggtgtggacccaggttgaaatgcagtttgcattcttgctgtaaccagtcttactgaagttgctgaatcacctattgccttatcagcaacctccttgttatctctatgtgtatctttcattctcttgcgtgactccatctgaagtatcagatcctcatcttcactatctccatttgagtgatcatgataggttgacttcctcctcaatctcttgtggttgaatggacctaattcaccaagactttcatcatcatcatcatcatccagtccaccagaggtactcggcctctcctcatcatcctcgtcatcaaacaaaggaaccttagtagagttcaggtcaggtgcaccctctgtgggcgatttcaaagtcgacgggatgaccgattcccaaatgccaaatctgccagttacgtcgatcactgctacagcattactttcaggtttccaagccaagctacatatcctttcatcgaacttctgcctctcaacatcctgctttgacttcacatcccagatcagaacctgcttatccaatccagcagtgactaggtacctcccatttggagaccagcagagactacacactggttgctcatgctcccctttcagagtgaacacctcctcaccggtgtccctatcatacatgaccacattattcctcaatcccggaacagcaaggaactgcccatcagggctccagcacagggcattgttgattgagtggtctgaaccaaatgtcggcgcaatccgcttcagactacgggcttcagtccccgtgcagagatcccagaagatgactgtgccgaaggtgtcaattgatgccaaataatcgtttctgggatcgaaagacaacccggttaccgatcccttgtggcccttgagcactttggagatggtgttgtcgatggtggcaatcaacttgatgccgtcgtcgtctccggccgccgccagcagagtccccttcttgttgaaggccagtgaccggatcggcagggtgaaccgggcgatattgctctggaacaccccctctgggaaagaacagaacttgacggagtgatcgatggagccggacgccagcgacgcgccggagcccggcgcgacggcgagcgccgtgacgccatccttgtgaagccggatcgtggaaagcgccgccgcagccgcggagcccgagctccggccaccggcggcggcgaccgcagcggcgtcatggatgaggatggccacgtcggcggcggatgcggtgacgacatgctgcccgccttggccccacgcaacggagcagaagactggcgagccggccttgtgcgcctctcggagcttcaccgcgcgccctttcatggtgacaccgacgacgacgacgagagattcttcacccacgaggctgaagctatggtggcggcgggtgttcaggaatttgttaggggtttccagagattgacgatacgcggggtggggttttggttgcagacattttggtgggttttggcgcgtccccccgcgcgggaaaggacgtttggcgggaagcttttggtggagtaccgcgggaaaaatacaccgaatttcacggccgcagtggcggaggtaaggtagggatattttcaaaaataaactcaaaaggaatatatgtttaactatcgcatttcttagctgaaatatcattgctaaccatcacaataaaaaaaattgtgctttttagtcaaagtccagcacgttatatacttttggatttttttttccttgtcccagcattgctcttgcgcgggcggctggaagcaaaacaccgccaccttcctcactctttcttgctgcatcgccaccgtcggaaaccgagcggccaaccaagaaggcggtggcaggcaaaacaagttaatgacgcttcttctcggcacgggaggtggagtggcatgcaccggtgggtagagtactcggcgcggccaatttggccacgccggatgcgcatctagccctcctgcagcaagattgggagcgggcaactccggcggtgccgaatccctcaacagcaatggcgctcgcggtgacggcggcccggtggaggagcggggcggcacagggcgacatgacgaagcacggtcatggtcgatggcggaggacgaggacaatgcaagtgacggtcggacgacgaggccggcgcgtttggcagcggtggaggcaaggaggtcgtcaccgaagaggctgacgtggcgtggaggaggctccgttgccgaaaggctggagcgggcgttggcgatg

SEQ ID NO: 24489 - DNA, 1941 bp, Oryza sativa
  ref <308>: DATABASE ACCESSION NUMBER: AK099931
  ref <309>: DATABASE ENTRY DATE: 2002-08-28
gatctccggagatgatggcggcggcaatggggtcgccatggctgcgcatcaggctgctcccggaggtgccgccgcgcctcctgcggccccacctccgccggaccctctccgtccgcgcctccgcctccgcctcggcgtcaccggacggcgccggcggcccggtgcgggtccgcttcgcgccgtcgccgacgggcaacctccacgtcggcggcgcccgcaccgcgctcttcaactacctcttcgcgcggtccaaggggggcaagttcgtgctccgcatcgaggacaccgacctcgagaggtccaccaagaagtccgaggaggccgtgctcagtgacctcgcctggctcggccttgactgggacgaaggtcccgatgttggtggggaatttgggccgtatcgccagtccgagcgcaattcgatgtacaaacagtatgccgagaagctgatggagtctggtgcagtctatcagtgcttttgctccagtgaggaacttgaacagatgaaagaaactgcaaagcagatgcaacttccacctgtatacatgggcaagtgggggactgcttcagatgcagaaatacaacaggagttagagaaggggacaccttacacttaccgtttccgtgtaccgaaggaagggtcgttgaaaattaatgaccttattcgtggtgaggtcagttggaacttagacacgcttggtgatttcgtgattatgagaagcaatggccagccagtgtataacttctgtgtcacagttgatgatgctaccatgcgcatctctcatgttatcagagctgaagaacatctgccaaacacattacggcaggctcttatttataaagcacttggatttccaatgccttcgtttgctcatgtatcacttattctagctcctgatagaagtaaactgtctaaacgtcatggggctacttctgtgggacagtacaaagagatgggctatttgcctcaggcaatggtaaattatttggcacttcttggttggggtgatggtactgaaaatgagttcttcaccattgatgacctagtggaaaaattcactataaatcgtgtcaacaaaagtggagcagtctttgatgctgtaaaattaaaatggatgaatggacaacatctaagatcatttccccctgatgtactcatcaagagttttgaggatagatggaaggacacaggcattctccaggagtctgaaagtggttttgctaaagaagcggctgagcttttgaaggatggcatcgatttgatcactgatgctgacgcagccctttcaaacctgttgtcgtatcccctccatgctacattaagcagtgatgaagctaaatctgtggtgcaagacaagctttctgaggttgcatcaggactcatttctgcttatgatagcggtgaactttgtcaagcactagctgagggccgtgatggttggcagaagtgggtgaaaatttttggcaaatcacttaaaagaaagggaaagtcactctttatgccgctccgtgtactgctgactggcaagcttcatgggcctgacatgggcggcaccgtagtcctcatacacaaagccggcacctgtggagcggtcactcagcaatccggtttcgtaaatctcgacgagaggttcagaatcctgaaggaggtggagtgggagtcactggtacaggagcaagagtccccagctgaaactgccgttcctgcttctcgataggctgcaagattcagatcaatcagggagagtttttgttttctgtaatactccactataaagcataggatatgttccattttactacccatttctacagttgtgaggaaactatagtttcggttttctgtagttaataaagcggaattttgcttagctgttctgtaattgtcgatttgaattggattggatggcaaaggttacgaggtgatgctgcttgtctttttcc

SEQ ID NO: 24490 - DNA, 3631 bp, Oryza sativa
  ref <308>: DATABASE ACCESSION NUMBER: AK099932
  ref <309>: DATABASE ENTRY DATE: 2002-08-28
gaccttatccaactccttgtgcgattgagcccaaccccagcagcgagcgcaacggcaacgccttgttggcgaccggccgccgccgccgcccgccggcggccgggcggccagcggggggtggctgatgagggctccgctgggcggccagcatatgggggtgcgggcgccacagtccgtagaagcgcggggaggctgcgactgggtagccaggcgcgtggagcggtggaggcaagcggcggccggtgggggaggcggctgcgtgcgctcggtgtctgcgtcgcatcgagcattcgagctggtggaaggagcctatcgaggagctgagcaagcgagctgtggttctcgattactgatttcctggtggctgaaaatcagcgacggaagatttgaatagctattttaaccgtgggtgatgtgccaccaaccccaactacttgtggtaatggaattgttgcggtggaagaggctggtgaacaggtagaagaggtggaagtacaattgggttcatttcatattgcttgacgagctgaacaggtaatctaagcatgtttgcatgcggattaattttagttgttggtctatttagtgtcatataaacgatgtagtcgcatttgtgtttaggcgaagttgttttcggttttattgttgatcttctctgcggcacccgggcacacctcagattcttaccatcctccaccaccacggacagatatcaatgtttcaacgggctcggccctctaattatttagattttgtttaaacaaactatgtaatataggaatgacggtaatatatatatttgccggttgccgtcagtcttgattagcatcgttgggactagggagcccacaagatcaaagagttatatagaactcatactccagttccttgaaccttattccctcacatcttggatcgatttgcggataactgaattagctgaacaccctccacacgctggcactgagaactacaccagcgtggaagcggcgacttcaggggctatgggaataggataggagattgtgaaatcacatcactgcgtactagttaagctgctagtaagtttcaaagctggggccaaaagtcttgtttgcaacatgatggtgcacatatcctctatacttgtagttctgacttcttatggattaattcactcaattaagaagaaacaaaaaattaaactcctctaactccagattttacaagatcatacgcgggtggttctcaatatgagaggggagcccaggcagttcggtgccttacagcatttatatacaaggaattgataaactttgtcacaagaaagaaacatgcataggcacattagtaaatctctcaactcaaggctggagagagtgcacttcagctaagaataactacaataaactctgacctaatgtggtgaaaagaaacagattctacttatgaacagaaatgcatcatcttgcattgtcatctcccaattgaaagattactaatcgtgcctaaactcttcaacgacgagtcaaacccttggttctgcatgagtgctgacaggctgaaagtaaagcgcattggtgacatctctgggaggggcatatctccgttgaggtactgcacaacttgtcgcatggttggccttacattagacattgggtgcgagcacaagagccctaacttcaatactaaacttgcttcactaatgttaatgttgccgttaagtcttgggtcaataacagcaaggatctgttccttgctgcaattctcaaacacccagtccgtcagcaggagtcgatgcccttcgatgtcttgctcgacaggccttcgcccactggtgacctcaaggagaaatgcgccaaaggcgaacacgtcggtaagaggggatgccttcccggttagtgctaattcgggggccatataaccaaaggtacctgcaacaactgttgtttgtagctcggtgtcacggttgtagagccttgcgagcccgaaatcacctagccgtccattcatgtcgttgtcaaggagcacattgcttggtttgatgtcccgatggataacaatttgctcccactcctcgtgaagataaagcaagccagatgcaataccttttataatctggaacctttgagcccaattcagagtaggcttgtcatcatggctgtacaaatatttgtcgagactaccatttggcatatagtcgtagaccaaaagaagttcttctttgagccgacagtaaccaagcagttgtacgaggttgcggtgccggaggcgaccaatgcttgctacctcagcaacaaactcctttattccttgccttgagtcgtgtgataccctcttcacagcaacctccgaactagaagtaggaagcactcctttgtacaccctcccgaaccctccaattccaagcaagttcttgttcttgaaccgttctgttgcctgaagcaaatccttgtatgacagtctatgtgctccaaactcaagctcccaatcttcacgcagttcgacatatctctgaaacttcctcttaatcagtagaaaaacaccagcagcaacgacaatcacaagcaccaccgagactattggtagagctatcaccatggtcttgggcggataagacttcttgcttcttctgccaggtaacttgggaagcttgtccatgtcaatggccggagcttgcgtgcacacaccgaagctccagccgagcacgtagtgttgcgaggtcattgtgcctatcgacgctgagaagcccacatatgcttcatcggtgatcactgttgagaggttggatctcgtagagaccaatggcttcatgggcttcttgattcctaccggagcaagcctcacgtcaatctgtgtagcatcgtcgtcatagtccacccatacttgcatggctttcccactaaccagtgttagactcttgaactcaccggtgttgtcatcatagtagccggcatcagaggcatttgaagacacaaggctattgatgtcgatgccgacgtggttgtcgtcgatgtcggagaattcggggctctggatggtatcaagctcaaccgcgaagatgtgatttctgttgtcgccgttgcttgatctgttgaggaatcccaggtatgtgctggcgagcccggaggagaggtccttggttggggtgatgacgagggcgatgccatggccgccgacaccaggggaggcagtgacgatgccgaacacaaaggacgccgagaaagaccgcactgctgccttcttctccccgccttctggtgacgacaactcctcgaagcgcagcggcgtcggatggaatgcgtggcctttaacctgcggcttgccattggtcagctcgagtaggccatctggtgtgaccatggccgtgccgtcgagggttaggtccttcactccggcaaagccggagtaggcaaactggtccccgccgttgccgtcaccggcagcagcaacggctgctgcaagatgaacgccatagaggaggctacactgtagacacaatatgcaaactggcttaaccatatgctgcatatctgaattctgtgttatctcactagctagcttctctctagtgttaatggacaatgtattctctcattagcttgtacttaccagaatggtttatatgaacatgagctgaaggtttcagtcc

SEQ ID NO: 24491 - DNA, 4743 bp, Oryza sativa
  ref <308>: DATABASE ACCESSION NUMBER: AK099933
  ref <309>: DATABASE ENTRY DATE: 2002-08-28
gaccggtgatggactttactctattattatcattagttggtactgaatgtatgtctatgtaatttgtatatgttcatatttatttaacttttatgtatcgttgtcaccttattatcatcgggatttaaatttcaatctccataaatattacgcacacacaaatgtgtatagtgatggatgcgcgcacatgcgttctgtataaaaaaaatctattagacgtattaactcagtattgtcttttgaaaattacatgagtgataaccgattaatcactctttaactaagtaatatcagcacttaataccaaattcttttttttttactgtctagtactacctccgtttcagttataagactttatagcattacccacaatcatatatatgttaatgaatctaggcatacacatatgtctagattcattaatatatatatatatatatatgaaacggaggaagtagcaaatatttgctcaaaattacaactattcaattaacggtcatctcgaaagtagaatttgtgaagaactctagtgcacgtccattacatagctactgcagaaaaaaatgttaatattagttcaccatattttcttcgatataataatactacacgtacgaaaaaaaatattaacatgggaaacacacacgtttctggcccaccccatgccatttacgcttaggcccttcacagtgtgtttgcgtggtgagtttctttgtgccgccagctcaaatgaatgcctacgtggcgagtaattgcgcatccctgcagagcatctcacctccacgcagggagatgagttttctcgctcttcgtgagtccacacatggcccacaaacgaatcgtgcctgcgttgttggggtcgagcctccatctcgtcgtctcctcgcgccacatcgaaaaacctattcccaaaatcaccctcccggccatggattgatccctcccatgccaccgattccgtcactcccgcacaaacctcgccatccccttcggagaaacgcacggaggccaacggagcaccgtcgatgtgaggtggatcctcgacttcgccgctggcgggctagatgatgacgacgacttcctcttccacgccacggaggagttggagtggagccactacaaggccaagcgtcgcgcttctgcctcaccgccgccgccatgaggcggatcctcaacttcgtcgccggtgggctggatgacgatgacaacttcctcatccacacagcggaggaaacggagtggagccactatgaggccaagcgtcgcactttcatcctgccacctccgccgtgaggtggatccttgacttcgccatcgacgggctggacaacgacggcaacttcctcttccacgcccaggagacagagcggagccatgtgcggatgacgaggaagacgacgacgacttcctcttcttcgagaagtggtgcatttgcggccgtgacgcctggttgagagaggcgatggcgatagggaggagagaggcgaaggagagggagctcaggcggtgggcaacaggttgagggaggcgatgccgatagggaagagagaggagaagggtagctgggggaattaatttattgggctggggcaccttcattgtcttggtcacctgtattgtgagctttgtagtctcgacactagctcgccccaatcaaagccatgcaaaagaagtaacatgcactgtggagttgaatggccttgggctgatttcgtgtgtcacataggctagagacacgcatagcgtggcttgcatagttattgcttaaaggcaaggtctgtggcttcgcagttgcaatcctttactatgtgcacgccacctacttaccctaatccccttagcccatatgcatatactatctccgtctctaaatgaagctatttttagcacagtgtcttgtctcaaaataaagctatttctccacctacctcctatcaactaatcacaaccattcttcttcagctgctttctcttttcaaccaattatgtattttctccaattattctcacggtctcatctaccttcttaatactcgtgtcaacctataaaatgtatatatattttgggacgggcgaagtataaggaaagaaaaatctccgtacgctgttgtctggtgacgatctccagttatccactgtatatataaaaggaaagtgaaggatgagctccaccattcggcagcctcatcatcatgcgtcttcttgctcgacaagcaccttaattagatcgtaatccctccattaaaaaaaaaaggagggcaacctaggaggggtgtgacccctccccaacgaatctacacaaattggttttttttagggagggaatagttattagtagtcacatctgcccaaaaaaaaactatttttgaaagacctgaatttacaaagaaaaactctgcagcaaatgatttcacaattggatcacagagagagagaatcttgagctttatccacttgaggagaaatgcacggcgaagtgcagggcagcgaccatctcgttgacgctggtatatattttggtacacctaccattttacacgcggcacgtcccacaatctccgccctccgtctcatgcgaggcaaggccgcagctccccgctccatctaggccgtccgtacatacacgtgtcggccgatcgtgccactccggactttctctctccctcctctcccccgctgggtcaggctcctctaccttcaaaaggtcggtatgtatatgccttagtcactgacatgtggtcccgacgaaccatggacccacctgtcagtgactaaaggcaaggtgcttcggaggcggcggagagagatgatctcaatccctccgcgctgcgctgcgattaaagcggacgagacgtggccaccttccttcattctcctagaagccatcgcctcgtctctccgcttctcgcaagcaaaacccacatcgcccattcgcccccatcccattctgctcgccgtgctcgctgagctccatggagaagaaggataagggaaggcaccgcggccgcgacggcggaggcggaggcggcggcggcggtggtggtggtggtggtggtgtggatcgcggcggtggagggagcggaggaggagggccgggaatggggcggcgcgggagcgatgcgcgtggccagcaggcggaggcggcggccgcggcaatcagcggcatcgccacccgccttggcttcgggtgcaccatcagtacgtgctaagcggccgctgtccgctgctccccgatcgtttctgctcgggctgattctgctctccggaagggatctctaatggtgggttgggtggtgttgttcgtcgtgcgtgcgtgcgtgcgtgtttgcagatgtcggcggcgggatgccaccgcagatggagttcctgatggcgtgtacggacggcgacgtcgcgcgcctcaaggaggtggttgatagcatggatgaggatgatcggcaatcgctcacctctgtgaggatggaggggtatgagccactgtttgaggcagcaagctcgggaaaaattgatctctgcaagtacttggtggaggagcttgggttcgatgtcaatgccgaagctaatcatgattccggtatgacacctttgttttgcgctgtgttggatggacaagagattactgtgaagtattttcttgacaaaggtgctgatccgaataagaaagatgcagcaggctttgctcctcttcatgaagctgcaaaaaaagggcacgttggaatagcacgactgttgttatctaaaggagctagtgttgatgtatcttcttctgaagggacacctcttcatgttgctgcctctaatggaaaatctagcactgtgcagattttattagagcaccgcgcaaatccaaacgtgatattaccagattgttatacaccattgaccgcagttctttctgccactcctgaaatagtgaatgaatctgagtgtttgaagtgcatgaaactccttgtgaaggctggtgctatttataatcttgcaactcctgatactccattgaagatagcaactagaaatggcttaactgagtgtgttgcatacttgctggagatcaccacagttaaactaagtgaacatgacaaaggaagtgatggagacagaaaatctaagctgaaattacatggtggaaaagcatttgaggagggggactatgctggtgcaatcatattttacaccgaggcaatgaaacttgatcctgcagatgccacactgtattcaaacaggagcctttgccatctgagaagtggtgcagcgcaggagggctttgctggatgctaatgattgcataaaactcaagccagagtggactaaaggtcactatcgcaaaggatgtgcccacatggcactcaaggaatacgaagaagcttgtactgcattcatggctggaacaaagctcaatcctttaaacgatgaaatgcaggatgcattttgggaggcagctaaaggaatgatgtatgaacatatggctggaaagcgcgtcagctcggttgattagaggtcatcggcgtgttcgtgctctgttctgtttcttttggacccgaatgtcagcttggatggtttaatttcgtgttagtacttgtgtctatatgatgtttctcgttggttaaggacacagcgaattggtggtggaacaagggctcgattccgcgtggaaccgatgttttcacataacatttcttgaaactgtacttaacgttacctgtttgcatgagcgtgttctttgatgattgtatcttggtg

SEQ ID NO: 24492 - DNA, 1728 bp, Oryza sativa
  ref <308>: DATABASE ACCESSION NUMBER: AK099934
  ref <309>: DATABASE ENTRY DATE: 2002-08-28
gacgaggtgtgtctctctcccgttcacccgtccgtatccttcccggatcactctctccactctccgctccccaccgcgcgagagatattttcgcgcgccatgtcgctgcccgccctcgccgccggccgcgccgcctccatgcggccgccgcgcgcctcggcggcctcgggggaggcggctgctgctgcggcggcggatcagccggcggggcggaggccggtgaaggtgatactgccgaagaagaagccgcagaagtggtcgacggggatggcgcccggggagtacggcggcgggccggcgacgcccaagccgcgcaagtactggatggggaaggaggaccgcgaccccgtgggcaacaccgacgacttcatctggaacaaggacttcctcccacacatggagcgcgtcatcgccaacggcggcgcagacacgccccccaccatcaccagcctcaccccggtggatgaggactcggaatcagggttcctaagcatcaaccgcgcaatgagcctcgacagtgtggatgttgatctgagcaaggagcttcaggcgccaaccaggccaatcttgaaaacccaggttgaggctgcctggagggggcgggccattggagctgaggctgtcaacggtgttgcgtctcctagatggaggctagttccgactcgccgggaacaagcaaagtgggaccgagcagctaaggcagcaactggtggcagtgatgtcatactaagggaatcaaagtcaagagggcagcaaggagaccctgaggtattggcagctaaatcaagggagcaatatctagagttgaaacaaagattgcagttgtttactttaggcattggtggcattggtttggtctccgcctatttttcctactctcctgagattgctgcaagggctgattggatctgtcctgtatctccgcatgcttgggaccagtgtggattccttagctggtggaactggagaaactgtgaagagtgctgctgcccatccaagactgcttattccagtggcacttgtgatgatgtataaccgatggaatgagattttagttccagattatggcttcatgcacctggaattgatacccatgcttgttgggtttttcacctacaagattgcaacatttgctcaggcaattcaagaatctatacctgcagttgggaatcgtgaatcttgaacatagttctggtgaatagaattaaaggccaaggttttataagaatctgatctggggatgttaccaagataagatgcacactcagtcattgaggagcgagtataccatctgaatcttgatccaaattttattatagctgcacaatagaaagtttgtacataggaattctccatgacatctgttacactctcatttgttcaaaaagatgattggcaagaggtcaagtacacacacctaccccgtacattccatttattgcacgcctacggactacagcaactctcagcattgtcacagagccaaaacatgggcaaccaaaagaactcaagaagacgaagatttcaataaatcacggctcaatctgccactctgattcatcatctcattgcctcgaggcctgctgctgctgctagtagtagtagtacattcatttgaactgcctaccaattttgaaagcacccaaatttccaaatttccttttcttatctctttcgttgctggcctcatccatttggccaccaaaagaatcctaaaatggtatctcc

SEQ ID NO: 24493 - DNA, 2437 bp, Oryza sativa
  ref <308>: DATABASE ACCESSION NUMBER: AK099935
  ref <309>: DATABASE ENTRY DATE: 2002-08-28
gagccgcagtcttgccctcctccagccattgtcgtcatgtcgctgctgttgctccctcttggtttcctcctcctttcacgcgtgccaccgccccacaccttcatccgtccatcatctctgcgccgccgccaccgctctgtgcaagcgaggccatcagatttgccagcgacgagcccaggctaccggatccggtgaccccgaccgcactgcggcgcacggcgacagcggtggaggtggtgggcataggcgacggcgcgtggcggcctcctccacacggtggggatggaggcacgggatccggcgggcgacggccaacccccgcacggatccgatggccggtcgccctgcccccgccccacggccgcatcgcctccccctagccctggcgctgcagtcgcccctccccctcctccccgcgacatcgcaccctagcgccacaggtgcttcacgctcccagcagccgcctcctcggcgtgtatggagaaacggaaccgtcggtgggcgcacacagcaagaaacggaaaaccgaggcatcctagcgctcctctcccgtccccttcctcctcctccggccctccaccgaagcgccccaaggcggaggcagcgcccacgttgccgacacgtcggtgcctgggagaatcaaggaggattcggcagcgaccgcgtccgccaagagcgccagctcgggcgaggatgtggcggccaagagagttgaagaaaagtggtacacaacagctggatcgatctgctcggccaacaagcagcctctccatacaagaacagtcgtccctggatctctgctccgccagcaagtagcttctcctccatataaccacatctgtagattgatcggctcttccaacaaaggggttgttccactgcttgcgtaggttcttttcccattcagctaaaactttttataatacattgattgatgctaattgagtaatcacactaatttcttcgtgattcaattatgaatttccaaccgatttcagtatcccaaattgatcccttctttttttccctgtataacagtatttgcactaacagtttaattattcccttcaatttcttcataggattaactactttgatttcgtcttgggtttattacaggattaaataatccacaaccattttatcgatgttgttggactattgtggggaaatttcttcgacagtaatacgtaacaatttaatcatttttcccctaactatacaatttctattattatgctcctttgttttccatttttattttttattttgtgattattcaggttaccttgcatctgtcaagcacctttgtattttaaggttttagtattctataatgtaacatggaaagtttagtagtacatttgcttcactgaatcactacagataattcctatcactgaatgctatttagtgattcaatgattatatatatattttgcgtacttggggtactagatgataagatgaaatataacctcagataattcccaatttatcaaaagtttggtgatccctttagtcagccttgtgagcatgattcagtgaagcaatggctcatatggagatttttttttttatcatatgcaacacggtgttttcatatagattctttttgtgtgattcttgaggctttggcaattctttctgtaaccatcagtgatgtaagtgccagctacagtttgtacaggtcccagtcttctttgattttgtttaccaaatattacctgacctgagttcacaattttaagtcataatagtatgatctcaaaattctctaattaacttaaaaataagttactgtctattttatctcaaacttacattgattcatatatcaagtttatcttcctcatgtactgagaaactgcataatttatcaacttttcatgaatcccatttcctcatatgaggtaccatcatgtctttgtatcttaggtgaatcctgtttgtttttttagatatgattatcatcttcaaacttccatctgtactacatatatatatcgagtattttcagtattgttcttcttgcccccataggtttggaagctagcgtttgataaataataaactgagttcgggaatagctagcctacagcagatgagaaaaaaaacatatacaaccattcagctcttgccactgactttaccattaaccttatcctattggttcatcgtaaataaatatactcctattttctgtcaggtactatcgtgctgttttacatgaggtctcaactctcaatgcactgaaagtgaagcattgtgcaaaaagttgccccactatcatccagaatttcagaccgcagtttgtattgcggcaatttcccttctttacatactattgtttttatctcacaaagtgtacctagatttttaaattctatttcaatacaaatatcccgcagcaacgcgcggggtatcattcagtgtt

SEQ ID NO: 24494 - DNA, 1113 bp, Oryza sativa
  ref <308>: DATABASE ACCESSION NUMBER: AK099936
  ref <309>: DATABASE ENTRY DATE: 2002-08-28
gctcctcctctccccacccagatcctcctcctcttcctcctcccgccatggccacctcgacctcctcctcctcctcccctcccccacctctccccgaatcctccacccccatacacctcctcctcctcctcctctagcgctcgtgctctcctctcgatcgccatagctggtttcgtgccagtagcttagtacatagccgtacatagtgtgtgtatagatctagagggagatgatgatgatggggaagaggggtggcaggaagaacccgatgaggcggacgacgagcatgacggagttcgcgccgccggtggacgtgctggtgggggggcgcgtggcggatgaggcggaggcggaggcggaggccgacgaggcgacggagctggaggtgagcggcgggggggaagtggaggaggaggacgccgcggtggaggaggcgtcgtacgggtggttcggcgccggcgcggatggcgccggggtgagggcggactggctcgccgcgtaccgggcgcgcgccgcgccggcgctcgccgggctccgccgcaactccgccgacttctccgccgtcgagaccgcggccttcctccgcgcctgtggcctctgcaaccgccgcctcggccccggccgcgacaccttcatgtacaagggcgacacggcgttctgcagcctggagtgcaggcaacagcacatcacgcacgaggagtggaaggagaagcgcgccctcgccatcgccacggcggcggcggcgccgccgcaaccgccgccgtccatgccggacccgacggccgccggctccgacaaccccgccggaggcacgctcgccgcggcctgacgaggccgcccacatcgacatagctgctgctgctgctataaaattgctactcgcaccaacacaacgatgacgacgtcgaacaaactgtgcagctgctgaatttaagtctccgtaatatcgatggcggatgatcgcctcatgcttgtattacgcttacttccaatctttcactcgcatgctagcttcctccatggattttgatcatctcggccttccatttcgtcttcctctttttttttcgataatggaatttaatccttcatctatgaactgagccatccttt

SEQ ID NO: 24495 - DNA, 2570 bp, Oryza sativa
  ref <308>: DATABASE ACCESSION NUMBER: AK099937
  ref <309>: DATABASE ENTRY DATE: 2002-08-28
gagcagcgcgccatggccatggcgcccctcttcgttcctcctcctcatctcctcttcctcctcccagccaccacctcatcatcccccgctgcttccctcaggcgactcctcctcccgccgctctcgtgccacgcgcgccaggtgctcgacgtaatgccccagggagaccgcgtcgccggcccgagagccgccgagggagctggcgctaaaggcgcgacggcgcaggtcggcgtggccacacgggaggccggcacggcggggcggcatgggcggggccgtcatggcggcggcgcgaggccgtggaggagaggggaggacaggcccgcgcgcggaggacaacatgccgccgacgacggggaggttcagggaacgaggaggggtggggatctcaaacaacgcagggagggcaggcgctggacgagaggcgaaacgcaagcgcgggaatctggaaaggctggaaattcggggagatgccagagtaacggtagtggtggcaatgccagcaggaaggggaagaagaaagccaagggtggtgagaacgaagtcaagctgagagtcgagctgggcatgtgctcgaagaggggagacgtgattggagccatcaacctgtatgattctgcggtgaaggaagggatcaaaatggggcagcatcactacagcgtgctcctttacctgtgttcttctgcggcgcttgggtttgtgcaaccggcgaaaagtggcaatgccggtagtgggattgctagtattgggcagttacattcatcgtctactcaaagcgtgggaaatttggagggagacgatgtacaatctgaaggccactctgaagatcaggagggaaacaagaccgatttgtttgcttcggatgatgggacggagaaaccgagtcgaattccagtgagtgatgagctgagggagtatgcaagaactcgagggtttgagatatttgagaagatgcgctcggaggaagagaaagttcccatgaatgagtctgctctgactgcagtggctcgtatggcgatgtccatgggcaacggtgacatggcctttgatgttgtgaagcaaatgaaggatcaaggtattgcgccaaagttgcggtcatatggtcctgctttgacggcattctgcaatagcggcaatgttgagaaagcatttgaggtggaagcacatatgttggagtctggtgtcagacctgaagagcctgagttggagacacttctcaaggctagtgtggccgcacaacaaggagacaaggtttattatttgttgcataagttcaggactactgtcagacaagcatcttcaaccacagctaaactacttgaggattggtttcagagcccaacagcatctaaagtggggaagagaaaatgggattcaggtgctataacaaaagctattgagaacaatggtgggggttggcatgggttaggatggttaggaagggggaaatggaccatatcacactcgcacatcgacaggaatggtgcatgccttgcttgtggagaaaaattgactattatagatcttgatccaaaagaaacagaagattttgccacattggtggcaaaattagctatcaaaagagagaggagatcaaactttgataactttcagaaatggttggaaaagcatggcccttttgatgcagttgtggatggtgccaacgttggcctttttagccataagcatatttccttgagtaagattaatattgttgctgatgttatacggcaaagatttcaatcaagaaagctccctttgatagttgtgcataaccgacatctcactggagagcgcatgcaaaagccttctaatcgtaagttggtggaaaagtggaagctttctaatgctatttatgcaacccctactggctcaaatgatgattggtactggttgtatgctgctatcagatgcaaatgcttgatggttaccaatgatgaaatgagagaccacacatttcagctcttggaaagagatttcttccccaaatggaaggaaaggcatcaggtacgcttcaattttgaggacagttgtgttacacttcaaatgcctcctccttgctcagttgtaattcaggaatctgagaatggtcagtggcatatccctgttgtctctgaggaaggttcactagagaaggaccggacctggttatgtgtcacgcggcgcaactgagagccagattacaatgaagctcaagttgatctagaaacacaatgtgaataaatcactacaacatggtttgacattactgtagggacaaagttgaccattcttttctgctcaggatcaagaactgaccgtaccttgtcaaggtgccgttacataccaacaattctttcatgcttggagttccttcttctgttaaactggcctgtttcaggtgttcagtagccagaataggtgaataacacgtgcagaaaaataggcctgactgctcaacattcagctactatatatggctatacaaatatgcatttggtcttccggtcctttgcgttatatccaatttaatcattcaataaggcattgtgtgtactgttatgtgcatgaagttagaactctgaacttgt

SEQ ID NO: 24496 - DNA, 2370 bp, Oryza sativa
  ref <308>: DATABASE ACCESSION NUMBER: AK099938
  ref <309>: DATABASE ENTRY DATE: 2002-08-28
ggcgctctctcccctctcttctagatccagccctcccctcctagggtttggctccgccgcccgccgccatggatcccgacggcgacggctcgttccaccgcaacgaggccatctccgccgtccaggacgtcgaccagtactatggcgacgacgacgactacgacgacctctacaacgacgtcaacgtcggggacggcttcctccagtcgtctcacccgccgccccagcccccgcccccgccgcagcagcagcagcagccgccgccgatttcgcagcagccgcctccgttgcaggcgccaccgccgccgccgcagcagcaacagcagcagcagcagctgcaggcgcccccttcgctcccgccgccgcctccgcagcggcagccggagaaggtgcacatcccgggcgtcgcggctgtcccccccgcccccgttcccgaccggcccaacccggtccacctcccgccgcagccgcagccaccggtggccgccgcgcctccgccgcctccgcataaccagatccagccgggaggaggcgacggcttccaccgccagggtgggggaaactacggtgggggcccgattgtggtcggcaacggcgggggtggtgatggccccggtggtacgaccctcttcgtaggggagctccactggtggaccacggacgccgatctagaggcagagctaagcaagtacgggcaggtcaaggaggtgagattcttcgacgagaaggcgagcggcaagtccaagggatactgccaggttgatttctatgaccctggcgctgctgcctcttgcaaagagggcatgaacggccacttgttcaatggacgcccctgtgtcgtggccttcgcctcgcctcacaccgtgcgccgcatgggtgaagctcaggtgaagaaccaacaatcgatggctcagcaaaactcgggtgtgcagaagggtggtagaggtggtggtgcagctggaggtccgggtggagctcaggtgggtgggaattatggtggtggtcgtggaggcggaggaggtggaccgggtggtggcggaggtggaggcggcggtggaaattggggaaggggtggcgggggtatggggggtagaggccaagctgggaatatgaggaatcggatgggtccggttggtggacgtggattaatggggaacggagggatggtagctccaccaccacctatgcttcatcctggaggcatgttagggcagggttttgatccaactggctatggtgcagcaatggggaggatgggtggtgggtttggtggcttccctggaggacctggggctgctccattcccaggcttaatgcagccattcccacctgttgttgcacctcatgtaaacccagcgttctttggaagaggaggtggtatgggtgctggtggggtcgggatgtggccagacccgagcatgggtggttggggtggggaagagcaatcaagctatggcgacgatgcagcatcagatcaacaatatggtgaaggtgggagccatggtaaggagaggccaccagagagggaatggtcaggggcatctgataggaggcgggagagggagaaagatttgcctcctccaccagactggccagagaggaggcaccgtgatgaacgggacgcaggtcgggagagggagagggagagagacagggacagggaaagggaaagagaccgagacagggaacgggaaagggaaagagatcgagacagggagagggaacggtaccgggatgatagagatcgccatggcgattatcataggcacgggaagcgtgagtcggatcgtaatgaagactgggataggggaagatcatctgggaggcgtagcagatcaagggaggttgaccactcaaagcggcggcggatgtcgcctgagtaatgtatctggatgggctatgtttagtgtaggggtatcggcaattcgcggcggcatcttttttgcacatgccttttggttagcgaatcagcttgcaactgtcaactgtttactgcttataacatcggtggattttacctgcttgtctccaaggatctgttgtagcattaattgagatgtaagttcttaatctgttctccttttttatgtaaatattctttttttttgtcgttgtatacctgtatataatttcttgttggatactagtgtatagcatcatattcatgtaacctcatcatgtataccagtttttgttgtgtatagttattcttttttccatttattcttttgtagcataaaggaattgctcaagccgagaatgtaattagttttgtatgcttaacatgtaactatagcgctgtaggaagcaaacctttttgtaatccatttgctgattatatgtattctcaaacaaaaatgtaaaggttcc

SEQ ID NO: 24497 - DNA, 2563 bp, Oryza sativa
  ref <308>: DATABASE ACCESSION NUMBER: AK099939
  ref <309>: DATABASE ENTRY DATE: 2002-08-28
ggagctcaccgcaccgcaccggtgggcggccggtgcgcgagcgcggtggggtggagtggagtacggttgctatgctgcctgcctgcccgcccaccgtggcgccgcgccgcgaaaccgaccgcgagagagagcgagggcggatcagcggagggagctgctgcatcgtcaaaccgcaggcgccgcagccgcatctggcaaatagcaacccctgtatcggtagttttgggtcgccgtccctctctctccacctcgcttatcccctcccctctcctcttttacatagacagacagcgaccaacagcggcacaagaaagctcactgcgctgcaccaccagccaacccaagatcaacaggaaccagagagagagagatgaacgccgacttcggcgcgcccaaggacctcgcggggggcctccagcagcggaggtctctctaccagcccaccctccctccctgcctccagggcgcaacggtgaaggtggagtatggcgacgccaccaccaccatcgacccaacctgcgccaacgtcgtcgcgcaggccttcccccgcacctacggccagccgcttgtcagcttcgtcgcgccgccgcccgacgccgtcgacaaggaccgcgccccgatcagggtaggggtggtgttctccggcaggcagtcgccgggaggccacaacgtgatctggggactccacgacgctctcaaggcttacaatcctcatagtgttctctatggattcgtcggtggcactgagggactgtttgcgaacaagacaatcgagatcacggatgatgttcttgcttcatacaagaaccaaggtggttttgatttgctcggtagaagtatcgatcagatccgcagcactaagcaagtcaatgctgcaatgactacatgcaacaacctcaacttggatggcctggtcatcatcggaggagtgacatccaattcagatgctgcacagcttgcagaggcccttgtccagaataactgtaagaccaaggttgtcggtgtgcctgtttcactgaatggtgatcttaagaaccaatttgttgaaacaaccgtgggatttgatacagtgtgcaaggttaactctcagcttgtgagcaatgtttgccttgatgcaatctcagctggaaagtactactattttgtccgtctgatgggtagaaaagcatctcacgtggcctttgaatgtgcacttcaatcacacccaaacatgcttatcttagcggaggaggtagcactatcaaaactcacactgatggaagttattaacaagatatgtgatggagtacaagcaagggcagaattagggaaattccatggtgtgctccttattccagaaggactaatagaaagcattccagaaatgtatgctctgcttcaggaaatcaatatcctccacaacaacaatgttcctgtggcagagatgccatcacaactgtctccttgggcagctgcgctgttccagttcttgccacccttcatcagaagagagctgctgctccatcaagaatcagacaactctgcccagctgtcccagattgatactgagcaattgttggcccacttagtagaagcagaaatgataaagagaacaaaagaaggaagatacaagggaaggaagttcagctctgtatgccatttctttggatatcaggctcgaggatccgtcccatcaaactttgactgtgactatgcttatgctcttggccgtatctccttgcatatgatagcagctggcttgactgggtacatggcaactgtggctaatctgaaggaccctgtagacaagtggcggtgtgctgctgctcctctaactgcaatgatgagtgtgaagaggcatttgcgtggtcctggggcaatcccgataggaaagcctgccattcatccttctccaattgacctgaaagggaaggcttatgagttgctgcgagagaaagcatcaagttttctccttgatgatttctacaggactccaggaggcattcaatatgaaggcccgggttgcaatgcaaaacccatcacattgaccattgagaaccaagactacatgggcgacattgagatactgaaagactgtctcagcaaggtgaggacgatggtgaagcctggatgctcgcgggaggttctgaaggcggcgataagctcgatgctgtcggtgaccgacgtgctgacggtgatgtcgcacccgctcaacgccgagctgccgctctaccatttcaactgagcgttgtagagaataaggtccagttttgtaacacaccgggagagactggcgtattgggctactggtatttggtagcttcatccactttcattttcatttctgttcgttgctgggagtgagaaccactggagttttcatgtcaataaacatcgaaaacggtagttgatcctgaagtgcagctattttcaggatctgaaatgcatgttctgtaatatggtgttttgcagccttggagctcagatccatctgatcgaatcatgtggtgttatgccaatcgaaatggaactttgtatataactccctttggtaaaaaaatatatgacgttttgcacacggtct

SEQ ID NO: 24498 - DNA, 2140 bp, Oryza sativa
  ref <308>: DATABASE ACCESSION NUMBER: AK099940
  ref <309>: DATABASE ENTRY DATE: 2002-08-28
gatccgcaccaacctctccctcctccctcccctctcctcgcctccgcctccgcctccgcctcccaagaaggcgaaccctattccgcccccgattctcccggagcggggggccggactcccgttgcgcgattgggcggtgaaacccgaatccccctgcgggcggcggcgtccgtttctcatctaccgtcggcgttgggggggacgccgccccatgggccggtcgccagcgatatatcactatcagctcatcgaccggcggaaagggcttggataaaatcttattgcaaatttccccttgtacatgtaacatcacatgtaatttctattaaaaatgacttcactcaataaagttgtttccaatggagatacaaggtcaatgttgccaaataaagtcacagcattgaatcccaacgcagcagaatttgtaccttcatgtattagaccatcttttgagagtagcgctgtctcagatgtaagtaaggcagatcttagggcttctgggaaaactatcctagataggtccgagtcatcaaagtcaaataactcggatgatgaggcacaccagttttggcgtaagcagcttcctgatgacattattccagacttcagttttgagaaaattgaacaagaacctgaagaattgtctcttgctggattatccttgaatgcaccccctttctatggaacaacagctagccgcttttcaagagagcatgatttatcttctcaagctaacaagagcctggaactggggcttaccagtttactttatgaagataattcacaagcatcgtttccaactatgggttcaagcaattgggagcaaaattttgtaggggatctccattttacgaatggaaatcagggccttcattatgattctgaaagtgctgcaggcttttctgacagttttgctagcgattatgctgcagcaacagacgatgttcttgaccccctagcgtatttagcttcacagtttcctgatttttcatcagagagccttgcagagctgtactatgctaatggatgtgacttcaaccatactattgaaatcctcacccagctagagatgcaagttgatgctacctccaatccaactctgacccccaggacaccaaactttagcacaggggacttccccgcactgccaacagttgaagaccaaaatggtttttccaaaggcaatgcagatattctaagcatcttcaatggacgcagctcaccctctgtatctactggtactggtgattttgtttcagctgttcgcaaacttgcatcgcaaaattctggccattggaagtataagaaaggtcctgaatacggtaatggtgtttcaactgtttctgtacccaagcagtacagttctacgaccaaaacatcttctggaaacaagtttcaaagtgttagcagtgcaagagctgctccatggctcgaaactggagatgcagtagcaaacatgtactcagaatcaaggggagaagcccgtgattttgcccgcatccgaaatgcatgttttgagcaggctagacaggcttacctgattggcaacaaagctctagccaaggaattgagtatgaagggacagacatataacacacaaatgaaagcatctcatgagaaagcaagagaagctatttatcgacagaggaacccatcttcgcaacgagggagcgaccgtctgatcgatctacatggtctccatgtgaacgaagcaatccatatacttaaggtcgagctcggtactcttaagagcaccgcgagggctacaggtgagaggatgcaagtcatgatatgtgtcgggacaggtcatcacaccaagggttctcgcaccgccaggctgcccatcgccgtcgagcagtttcttctggaggaaggcctccactacacgcaggcacaacctggtttgctccgtgttgtggtgttctaacatctcttaggtcagcagcacgaagaaaaaagaagcaaaacaaaaaaaggagaaagagatgtagggaaaagaaaaacctaaaaaaaatggccgctgttgcagcactgtaattttcttgtagttgtatattaaaagaggcagcaggagaatagcctgacaacagaatacagtgtaaaattatacatagcttcattcaattcacattccattccc

SEQ ID NO: 24499 - DNA, 4249 bp, Oryza sativa
  ref <308>: DATABASE ACCESSION NUMBER: AK099941
  ref <309>: DATABASE ENTRY DATE: 2002-08-28
gagtcccccgtgctaagttgtaagctgatttacactaatgttactgttcagcagctaaggacaatctctagtcgaaacagtagctgaagccaacggcttcaacatggtgtacaaagaaactgcaaatcaatcagggatccaattcacctgcggcacacaagaaccatttccagatgcttcaaaagaagaaaatgtgaaaaacaggaggaaatcttcttatggagaggcaactatttcacaacatttcactttctcttggatgaatggtcttcttgctaaaggtgccaataagcctttgaatgaggatgacataccagatgttggtgaggaggaaagtgcccaacacatctccagaatattcagtaatatcattgtgaaagggaattttcctctgacagtttcatcgatttgtaaagcagccttccttctcatttggaagaaggcggcactcaatgcaacctttggagtcctaagtgtagtcgcctcctttgtgggggcatacttaatcaaggacttcgtgggctatctaagtggagataatggatttgaaagaggctactctcttgttcttgtatttgtaggtgcgaaggctattgaaactcttgcttacagacaatggttctttggaagtctacaggtttatttgcgcctaagaacatctctgatatctcaggtataccaaaaggtcctttatttatcaagccagtcaaggcagaaacatacctcaggggagataattaactatgtgagtgttgacatcgagaggattgttaatgttgcatggtatgtgaacatggtcttcatgatgcctatacagattacactagcaacttatattctttggaaaaatcttggtctgggttctttagctggaatagcaacaacagccataataatgctttgcaatattccttttacaagaatccagaaaagattgcacgcaggaattatgaaagcaaaagatgacagaatggacatgacatctgaagttataagaagcatgaagatcttaaaacttcaagcttgggatatccaataccttaggaaattggaatatttgaggaaaggagaacatttgtggttgtgggaatttctaagactaaaagcactactagcatttatgttctggggagcacccgctgtcatatcaatcatgacatttgcttcatgcattctgatgggaatccctctaacagctggaagagtgttgtccacactagcaactgtgaatatactgaaggagcctatctttagtctaccagaattgcttactgcctttgcacaggggaagatctcagctgacagaatagtgtcatatctccaagaagaagaaataagatctgatgcaattgaggaagtagcaatagacgaaaatgaattttctgcagagattgatcagggagcattcagttggaaaactgatgcaaaaatcccaacacttcaagatatacatgtaaagatacacaaagggatgaaagtggcagtatgtggagctgttgggagtggaaaatctagcctgttgtcatgtgtacttggagagatgccaaaagtgcaaggaacggttaaggtctttggaaccaaagcatatgttccacagtcgtcatggatactttctgggactattagagaaaacattctctttgggagcccatttgaaactgataggtatgagcggacaattgaagcatgtgccttggttaaagacatcggagttttctcggatggtgatatgacagatataggagaacggggaacgactatgagtgggggacaaaagcaacggattcaaatagcaagagcagtttacaaggatgctgatgtctacctgtttgatgatcctttcagtgctgtagaccctcaaactgggaggcatctatacaagaaatgcctgatgggggtcctaagggataaaactgtgttatacgtcacgcaccaagttgaatttctagttgatgcagaccttattatggtgatgcaaaatggaaggatagcacaagcagggaaatttcaagaactccaacagaacatggcttttggagttatctttggggctcacttttgtgccgtcgaacaagtttgtaacgcaaaaggcacaagcatatatttgtcaaagcatcatgcagaatcagaaaaggtaccaagcatcaatgagtccgatgcagaaaaggaaatcagcagcaaatggcaaaacacaaatatgataaattgcagacaagaagtatttagagataacactgaagaagggaaattgctgcagggtgaagaaagagagaatggatacattagcaagcaagtgtattggtcatacctcacagctgctcgaggtggtcttttcattcctatgataattgcagcacaatgcttctttcagatatttgaagtgggaagcaactattggatggcatcagcttgccatccacgaactggaagcaaatcaaaaatggaatccacccagttcatggtatatgtatttatatcagttggcagcgccttgtgtatcttgattcgagcagttcttgtagctgtaaccggcctcctcacatcagaaaaattgttcaagagcatgatgcattgcatctttcatgctcctatgtctttctttgactcgacacctacagggcgaatcttaaacagggcttcgattgatcaaagtgtgctagatttggagacagcgtcaacattaagtgagagcacattttcagtgatgcagtttctaggaacaatactaatcatatcacatgtttcctggccagttctcattatttttattccatcaatattgatttgcatcaggtatcagagatattacagtctaacagcaacagaattagctcgcctatcaggaattcaaaaggctccaattcttcatcattttggggaaactttctatggagctgcaataattcgagcatttcgccaagaagaccggttctacagatcaaatctgagtctacttgacaatcattcaagaccatggtttcacttgatggctgcagtagaatggctctctttcagaatgaatttgttatgcaactttgtctttgggttctcgttggttttgcttgtgcgtcttccacaaggttttgttaatccaagcattggtgggctggtagtgatgtatgcatggaatttgaatacacaattatcagaagccacccggaatataagtcgtgcagaagcaaacatgatatcagttgaaagaatattacagtacacaaagcttccaagtgaagccccaaccataaccgagggtagcaagccaccaatggcatggccagagtttggcatgataagcataagcaacttagaggtcagatatgcagaacatctcccttcagtattaaaaaacataacttgtgtgattccagctgagaaaacagtaggtattgttggacgcacaggtagtgggaagtcaaccttagtacaagtactttttcggattgttgagccaagagaagggaccatcaagattgacagcatcgacatctgcaaaattggacttcatgatctgagatcgagaatatgtattctcccacaggatccggtgatgttcgatggtacaatcagaggaaatcttgatcccatgaacgagtacccagatagtaggatatgggaggtagtagacaagtgtcagcttggcaatgtggtgcgctcgactgagaaaaagctggatgaaatagtaattgaaaatggggacaactggagcatgggacagcgacaactattttgtttaggcagaattctcctgaggaagagcaagatactagtccttgatgaggcaactgcttcagttgactctgctacagaccggattattcaagagataattcgtcaagaattcaaagattgcacagtgcttgcaattgcccataggatgaacactgttattgatagtgaccttattcttgttcttggtgaaggtagtattttagaatacgacacccccaccaaactgctccagagagaggactctacattctctaagctaaccaaagagtactcacaacaatcgcaggacttcaagtcttcaacggcaatgcacaggatgggtagctactaattttcctgaagacatactacattctacatggctatattccccacgacacacctgaagtatccgcgccacagcaactcagcaaggggcagggaattgcttcgtagtccaagtaaaattttctaaatgttgcatgtaaaacctatgaatagcaaaacagcgtaaatgattaatttacagaaaaatggcact

SEQ ID NO: 24500 - DNA, 1364 bp, Oryza sativa
  ref <308>: DATABASE ACCESSION NUMBER: AK099942
  ref <309>: DATABASE ENTRY DATE: 2002-08-28
gggccttctcccgccagctctcctcctccatgcctcgcctcgcccgctccgactcttccatctccatgccccccccgtccctcgcccccaccggagccatcaccttccgctggctcgccacccgccccatgcgccgcctcgccctcctcatcgctctcaacgtcgcctactccgccaccgagctcgccatcggcctcctcactgcccgcgtaggcctagtctccgatgctttccatctcacctttggttgtggaatcctcactttctccttgtttgccatggctgcctccagaaccaaacctgatcacctctacacctacgggtgcctccctccctcaatttactcctcttttctttaatcttccactcccactgattcattgctgcctttattcagctataaaagattggaggtccttgctgcctttacaaatgccctcttcctgctcttcctgtctttctccttggctgttgaagcactacatgcatttatgcaagatgagtctgagcataagcattatctcattgtttctgctgtcacaaaccttttggttaatttacttggtgtttggttctttcggagctatgctcgtgttaacatagtttacaggaaagcagaggatatgaattatcactctgtatgtttgcatgttcttgccgattcagtacggaggtatgagatactctcatgtcactgtgcctcttcccttataatatttgctctttctgtagtcacgaagttagttatttttagttgacatgtgtaaatcctccatcagtgcaggcttgatactagcttcctggtttctttcattgggggttgaaaatgcggaagtgttgtgcctgggaattgtttcagtggcagtgttcatgcttgttttgccactctttaaggctactggtaatatccttctgcaaattgcaccaggcaatgtgccaccttcagctcttaccaagtgcttcagacagataactgcgtgcgaggatgtttctgaagtatgtcaaggtcgattttgggagcttgtacctggtcacgctgttggatctctcgacatccgggtgaagaatggtggtgattgccagtccgtgctcgactatgtgcatggattatatcaagatttgggcatacaggacctgaccatccaaaccgatgaataaggcatcatctagtgtagaaaggagtcataggggaaaaaaggatagatcaaactctcgcagtgtattgcttgggcgtgcttatttgatagtacggtatatcgctttgtactcgactgctgcagtttgtactcagatttactcagtagctactacaatttgtactcacttaagctcgtttgctatggcatcatggttgaaattcgttg

SEQ ID NO: 24501 - DNA, 1900 bp, Oryza sativa
  ref <308>: DATABASE ACCESSION NUMBER: AK099943
  ref <309>: DATABASE ENTRY DATE: 2002-08-28
gcgcggcgtaaatgaaagaagggaaatctcccgtctctttgtctcctgccaagacgagtcgcggctgaacaggggaggggccgcgatctccatctggcgggcagagcaggggacgggaggggatcctgatataataccaagataatacacctgcttgtcaaatgatgatgggtttgctagcgtttgagagcaaccaagggctctggaatagtggatattattcccagctgtttgggattggaggagttaaggtcactgtcgccattctttggttatcgacaggctactttggaggaattggtgctccttttgccccatatttttggccatatctaggacaacttccaaagaagaaggaacggaaaaggcctgtgagagtgtacatggatggatgctttgacctcatgcactatggccatgcaaatgcattacggcaggccaagttgttgggagatcaacttgtagtgggagttgttagtgatgaggagattgtggcgaacaagggtccacctgtgctttcaatggaagagaggttgacacttgttagtggattgaagtgggtggacgaggtcattcccaacgcgccctatgagatcacggaagaatttatgaataccctcttcaataaatataacattgattacattatacatggagatgatccttgtcttctacctgatggaacggatgcttatgcgttggcaaagaaggttggacgctacaagcaaatcaaacgcactgaaggtgtctcaagcactgatatagtcgggaggatactactgacattcaagcagaaagaggctggcagtatggaaactaccacagatgcaaatcagaacactggagcaacatgtgataaagtgaaaagtcagctatccaattttcttccaacatctcgccggataatgcagttttcaaatggacaggctccttcgccaggtgctcgcgttgtgtatatagatggtgcttttgacctttttcatgccggccatgttgagatcctcagaagtgctaggcaacttggtgacttccttcttgttggtgtccatgatgaccaggcaatcagggatagaagagggtatcgtcctatcatgcacctccatgagcgtactatcagtgtacttgcatgtcgctatgttgatgaagttataataggtgccccatgggaggtttcaagggatatgattaccacatttaacatttcattggttgtgcatgggacagtaaccgagggtagttctgtggtcggtattgattcatacgctgttccaaagagcatgggtatcttccaaacaatcacaagcaccaaacctataacaacagtttcagtggctaccagaataatcgataaccatgaagcttacaagaaaaggaacttgaaaaagaaggcaagcgaagatagatactacacacaaaagaaatttgtctctggagattaatggctcagaaatatcgtggcacttatttttgcactaaaacagaggggggacggcatgctgccacatttattcaagataattctacaacagagatttcaacagttactcggctatagaaaggtcatagtcagttataattgatggccattcagcatgggaaccagctcaaggaactaaattaaaaatctgccgtcgcccttttggcaggaaaatccacttaacagccagaattcacatacatgattctttttttctttttacttttgttgtccctggaggggacaatattcatagctgaacaggtgctcagcaaaccattgttgtatacttgtatgttattacttaacagtgtgtggagtgattagagttgcatactccctaattgtaccaaacgacacttatgagacaatgagctgtgcgatgaccgtggtctatttcatttatttcatttgccctgtctg

SEQ ID NO: 24502 - DNA, 1621 bp, Oryza sativa
  ref <308>: DATABASE ACCESSION NUMBER: AK099944
  ref <309>: DATABASE ENTRY DATE: 2002-08-28
gggggcggtggctgcgggcggcgagggggatgggggggaggaggaggagggggtggtcggaggcgccggcgttcgcggcggagcagcgggcgacgctggtgaacgtgaagctgaagtgggtgaaggaccgggcgctcgacggggcggtgtcgcgggagcgcgacctgcgcgccgcccaccacctgctcgacgtcgtgtccgcccggccaggccaccgggtatcgcgcccggagctcctcgccgatagctctgtgcgcagggcgttcgggggcgtggacggggtggacgcgtttctagccaggtaccacacgctcttcgcgctgcgccgcggcggcggcgtgtccctcacggacgcggcgctcgacctccggcggcgggaggtggactgcctcgtcgaatccgagcccgacctcgtgtcccgcctccgccgcctcctcatgctcacgctgccgcggtcgctccccctccacaccgtcgacctcctccgctgggacctcggcctgccccgcgactaccgcgcctccatcctccgccgctaccccgaccatttcgccctcgaccagcccgagggcgatgagcgcgtctggctccgcctcctctggtgggacgacggtcttgccgtctccgagctcgagaagagcaccgctggcggcggcggcggtgacaccacttgcctccccttcccggtgagcttcacgaaagggtttggtctcagaagcaagtgcatcaactggctgaaggaatggcaggcgcttccgtacaccagcccctatgccgatccctcaggcctcgatcgccgcaccgatgtgtcggagaagaggaatgtaggagtgttccatgagctgctgcacctcacggtggcgaagaggacggagcgccgcaatgtgagcaacatgaggaagctgctcggcatgccgcagaagttcaccaaggtgttcgagcgccatccaggcattttttacctctctagagtgcttggcacgcagacagttgtgctcagggaagcttacggtggtggaagcctgctgctcgcgaagcatgcacatccacttgctactatcagggaggagtattcggcagtgatgagggcggcattgccaccaaggaggaggaggagtagggaaagtgactcgtgcagcgagcaggatgaggaatgtgtaggaggagaagaatttgaactcactgaatgaatgcttctgtgcagtgaatcaattttgagtgcactaaaatgaagaagatttagttggatcacacaatgacttgttaggcccaaaaggacttggtgaacctcatcagatggatgccctacgatgtcaatggctcagcagtaatttgatgaagagtggctttgggacgagcagactgtatgcacattagaacttgcaaagtttgaagcatgcacatttgctgcttgggccatgtgagaattggacctcatttgtgttgctggacttgagccaagcggcaacattgcctaccagaaatgctccagtggcaccaccagcaggatttcatcatatgttacatgaaaaaatctatagcatctatctggttatttgtgttcttgttaactgtactatgtgcatatatgttcatctagtaatgaacttgtacttttatt

SEQ ID NO: 24503 - DNA, 2797 bp, Oryza sativa
  ref <308>: DATABASE ACCESSION NUMBER: AK099945
  ref <309>: DATABASE ENTRY DATE: 2002-08-28
gggtttcgggcgcgcgtctcctccctcttgcttgttagtttcctcgtagctagtggggtgagggtgtgtgtttggttggtgagcaatggcggcggctcgcggtggaagacgacgacgaccgtggtcgtcgtcctcctcctgcggctctccgtttctgatgatgctgatcagctgtttgctgtggctgcaccgggaagcagctccgtcgctcgccgccgataccgtgaccgtcggccggccgctctccggccggcaggtgctcgtgtccagaggtggcaagttcgcgctcggattcttccagccagataactcgtcgcagcgttggtacatgggcatctggtacaacaaaatcccggatcacaccaaggtgtgggtcgctaacaggcgggccccactctccgacccggacacgtcacgcctcgccatctcggccgacggcaacatggtcctcctcgaccgtgccaggccaccggtctggtccaccaacgtcaccaccggcgtcgccgccaactccaccgtcggcgtcatcctcgacaccggcaacctcgtcctcgccgacgcgtcgaacacctccgtcgtgctgtggcagagcttcgaccacttcggcgacacgtggctccccggcggcaggctcggccggaacaagctcaccggcgaggtgacgcgcctggtggggtggaaaggctacgacgacccgacgccggggatgttctccctcgagctcgaccccggcggcgccagccagtacgtgatgagctggaacggcagcagccggctgtactggagcagcggcaactggaccggcggcatgttcagctccgtgccggagatgatggcgagcaacgccgacccgctgtcgctgtacacgttcaactacgtcgacggcgagaacgagagctacttcttctacgacgtcaagggcgaggtggtgctgacgcggttcgtcgtcgatgtcaccggccagatcaagttcatgacgtgggtggactccgccgcgcagtgggtgctcttctggtcggagcccaaggcgcagtgcgacgtctactcgatctgcggggcgttcggcgtctgcgccgaggacgcgctgccggcgtgcagctgcctccggggcttccacgcgcggcagccgcggcggtggctgcagggcgaccacaccgccggctgcgccaggagcaccgccctgcaatgcggcggcggcggcggcgcgcagccggcggcgcagaagacgaagagcgacaggttcttcgtgatgcccaacgtgaacctgcccaccgacggcgtgaccgcggcgagcgcgagcgctcgcgactgcgagctcgcgtgcctcggcaactgctcctgcaccgcgtactcctacaacggcagctgctcgctctggcacggcgacctcatcagcctccgggacacgaccggcgccggcaatggcggcggccgcagcatttcgatccgcctggccgcgtccgaattctctggcaacgggaacaccaagaagctgatcatcgggctcgtcgtcgccggagtcgccgccgcggtgatcctcgccgtcgtggtcacggtcctcgtccggagaagcagaaggctgaaggcgttgcggcgagtggagggctccctgacggcgttcacgtaccgtgacctgcaggtcgcgaccaagagcttctcggagaagctcggcggcggcgcgttcgggtcggtgttcaaggggtcgctgccggcggacgggacgccggtggcggtgaagaagctggaaggtgttcgtcagggggagaagcagttccgtgcggaggtgagcaccatcggcacgatccagcacgtcaacctgatcaggctgctcggcttctgcaccgagcgaacacggcggctgctggtgtacgagcacatgccgaacgggtcgctggacaggcacctgttcggccatggcggcggcgtcctgagctgggaggcgaggtaccagatcgcgctgggcgtggcgagggggctcgactacctgcacgagaagtgcagggactgcatcatccactgcgacatcaagccggagaacatcctcctggacgacgcgttcgccgccaaggtcgccgacttcgggctcgccaagctgatggggcgcgacttcagccgcgtgctgacgacgatgcgcgggaccgtgggctacctggcgccggagtggatcaccggcacggcgatcacgaccaaggccgacgtgttcagctacgggatgatgctgttcgagatcatctccgggaggaggaacgtggagcaggggcaggacggcgcggtggacttcttcccggcgacggcggcgcgcctcctgtttgacggcgacctcaagggcgccgtggacggccgcctcgccggcaacgccgacatgggcgaggtggagagggcgtgcaaggtggcgtgctggtgcgtgcaggactcggaggcgacgaggccgtccatggggatggtggtgcaggtgctcgaggggctcgtcgacgtcaacgcgccgccgatgccgaggtcgttcaaggtgctcggcgatccgtccaactacgtcaagttcttctcggcgttgccgtcgatctcatgatcacaccgaccggattaatcagcaggggatctgggattattattacctgcatatacatatagcagaaatgtatacaagttgttaattagctttcgagatgtattcaagagctagctaccgataatattttttcctccaaattattggcagtagcctagctagtagctaccgctatatggttttgcaagaaatatgtaatggtagtgagcttactaatcctcaaattcttgc

SEQ ID NO: 24504 - DNA, 796 bp, Oryza sativa
  ref <308>: DATABASE ACCESSION NUMBER: AK099946
  ref <309>: DATABASE ENTRY DATE: 2002-08-28
gacacatcgatcgatatatcctaagaggcagtttaagctagctagctacgacttcgagagatcgatatattcaacaatggcgtcagctccggccgcctctcccgcagtgctcgtcgtcgtggtcctggtggcgaccctcgccgccggcggcgccaacgcggcgaccttcaccatcaccaaccggtgctcgttcacggtgtggccggcggcgacgccggtgggcggcggcacgcagctgagcccggggcagacgtggaccatcaacgtgcccgccgggaccagctccggcagggtgtggggccggacaggctgcaacttcgacggcgccggcaggggcggctgcgccaccggcgactgcggcggcgcgctgtcgtgcagcctctccgggcggccgccgatgacgctggcggagttcaccctcggcggcagccaggacttctacgacctgtcggtgatcgacgggtacaacgtcgccatgagcttctcctgcagctccggcgtggggctgacctgcagggacagcagatgccccgacgcttacctgttccccagcgacaacagcaagacgcacgcgtgcaggggaaacagcaactaccaagtcgtcttctgcccatagatcttctcacctaattaaattaacttgatcatggtcatggatgatctatggctaatattgcagcatgcgtgcacgcattagctggctgctatagatattgatatatatgtccgtgacgtatgcatgcatgtgtaatatatacttgttacgtggaaataataagataataatcgtccatgg

SEQ ID NO: 24505 - DNA, 3339 bp, Oryza sativa
  ref <308>: DATABASE ACCESSION NUMBER: AK099947
  ref <309>: DATABASE ENTRY DATE: 2002-08-28
gtgtggtactagtagccttcacgactaaatccaccaccactacgcctccacctccacacctcacctcctccacctccccgcgtctccgcctcctccatcctctctctctcctcctcgcggggggttgggctgctcctcgtcggcgtcgcggaacctaatcctgcctcgatctgcggcgagccggagccggcggcgcggaggcgagtgggtgggtggtggtccagtgcggtggtgcggtgggggccagcctggtggtccccgtctcggcggcggtgcggcgcggcggaaggaggaggggtggtggattcgtagggggggtggtgaggtggaggaggatgggctgcggccgggggcgtcgcccgaggggcgggtgaatggaagcggcgaggggggctggggctgcgggcggccgtacatggaggacagggcgtcgcccggcggaggcgtgtgcgggagggtgcttcggctcgcgagcgtccagattattttgattctgttcttgactcaaggagcctgctcgagttcccgtgacggcaaaacatcgcctcctcaaggcctggatgctggggagaaggacatttaccttagccattcttgcattcatgatgaaatacttcatcagcggcgacgagcctggcggaaggagtactctgtcatgcctcaagtctaccatgaacgcagagagaacatggaacggctaagaggaagacacttgctgggggtgtcatcttggcatgcttcacagaagaatgtcaaaaagccaatacggatttatctcaactatgacgctgttgggcattcacctgacagggactgtaaaactgttggtgacattgttaagctcggggaacctcctgttccatcaataccaggaacacctgtctgtgatcctcatggagacccaccattggtgggagattgctggtacaattgcaccgttgaggatatagccggggaggacaagaagcaaaggcttcgaaaggcactgggacagacagtagagtggttcagaaaagccttagctgttgaacctgtcaaagggaaccttcggctcagtgggtactctgcttgtggtcaggatggaggtgtacagctcccccatgcatatattgaagatggcgttgccaatgctgatttagtactcctggtaacaactagaccaacaacaggtaacacccttgcatgggctgtggcctgtgaacgtgaccaatggggccgtgcaattgcaggacatgttaatgtagccccccgtcatttgaccgctgaagcagaaacgttactttcagccaccttgatacatgaggtcatgcatgttctaggctttgatcctcatgccttcacacattttcgtgatgaaaggaaacggaggcgtagtcaggtaacttctcaaattttggatgaaaagcttggaagaatggtcacacgtgttgtccttccacgggttgtcatgcactctaggcatcattatggagcgttttcccaaaacttcactgggttggaactggaagatggtggaggcaggggtacatcaggttcacattgggagaaaaggctcttaatgaatgagatcatgactgggtcagtggatacaagatcagtggtgtcaaagatgactttagcattactggaggacagcgggtggtatcaagctaattatagcatggctgagcatttagattggggtcgcaatcagggaacagagttcgttatctctccctgcaatttatggaaaggggcataccgctgcaacacaactcagttatcaggatgcacatataatagggaggcagaaggttactgccctatagtaagctatagtggggacctgcccaaatgggctcaatatttccctcaagctaataaaggtggccagtcttcgttagcagattactgtacatattatgttgcttattcagatggttcgtgcactgatgtaaatagtgcacgagcacctgacagaatgttaggtgaagtgcggggaagcaactcaaggtgtatggcctcaactctagtgcgaactgggtttgttcgcggatctatgacacaaggaaatggctgttatcagcatcgctgcacaaataactccttagaggttgccgttgatgggatctggaagtcatgtccgcaaactggtggacctgttcagttcccagggttcaatggggagttgatttgcccggcatatcacgagttgtgtaacaccgtgccagttccagtaagtggccagtgtcccaagtcttgcagttttaatggtgattgcattgatggaacctgccattgcttccctggatttcatggccacgactgtagcagaagatcttgcccagccaagtgcacaggtcatggtatatgcaaagccaatgggatctgtgaatgtgaaagtggatggactgggattgactgctcaacagcggtttgtgatgagcaatgtagtttgcacggaggagtctgtgataatggtaaatgtgaattccgctgttcagattatgcaggctacacttgtcagaaaggttctgcaatattgcccagcttgtcaatgtgccatgatgtactggttagggatgctgacgggcagcattgtgcaccaagtgaactcagtattctacaacagcttgaagcagtggttcttgtgccaaattacaataggttgatgccaagtgggcggaccttccttaacttctttaacaatgccaactgtgcagcagctgcaaagcggttagcctgctggatctcgattcaaaggtgcgacgaagatggggataaccgacttcgggtatgctactctgcatgtgagttgtacaatacagcatgtggggcgggtcttgattgctcggaccagaccctgtttagcaagagggaagaagaggaaaagggtgttccgtgcacaggatatggcgagaagaagtctttctggctaatgactataacttccccgggcgtttcttccctctgatatctccatctgcggctcggagattgtgtaaagtataattggcgatgtcctatccatattcattttctcttttctttttggccaccactttccaattgtaggatacgggaagtagtggcccatttcacctgggcacctgaagatgggtgcctggtgtataagcagtgttggagcgggctctgtgtgtttaggaagttagtctgactggaaggagggtggagtgagaagctggaggcgggcggtagatttattttttaccttttttttttgtcgcgtcagagttagcggaggaatgtaaagtgtaatgtgtgttgtaatcccatgacccatctaacaaacagagcatctcaatgagagccccctatgttgtcttgtgtgttcagccg

SEQ ID NO: 24506 - DNA, 1956 bp, Oryza sativa
  ref <308>: DATABASE ACCESSION NUMBER: AK099948
  ref <309>: DATABASE ENTRY DATE: 2002-08-28
gattggagtataccactgagcaattgcaaccattccattccattcgatccattctagctagcttatctcctccagcattttggagagagctctatctttctgctacttcgcttgagagaatttccatgttttcatctgcagccatgcagcagctcaaagacgatgggtcgtccgcgaggcagctacagctgctcgtcgccgcgctgtcgacggccggagctgtggcggccgccgccgtcgtgcgacgcaggcacgggaggaaggccgccgcagccgcagccgcagccgccgcggcgccgccgccggtggtgatgagggaaatgccgaggctggtgatggcggagtccggccgcgtcgagcacatcgagaagttctctcactacgtcgctaggcagatggggtttcaggacataaatgagtgcccacagctgtgcaaattagcaaataactacctcaagaggaccaagaattgcatggatgacatcgatgacttcttcgcaaatatcctggattcggagtccctttatgtcaagttcatagaagagttggataaatgcattcttggatattttgcgttccattgggaccatgctaccgctcttatcagccaggccttgaccgtagactgtggcaccgccagcaagaagaagctaaggaacctcgtgttggaagctacaaggaagcagaggtttgagcgggtgacgagggacctgaaggtgacgagggtgttctcgacgctggtggaggagatgaaggcgatcggcgtcccgacggcggcgatgaacggcgacggcgaggaggagccgcactgcaccgacgtgatggcgccggtggcgcacgacgagcggagccccgtgctgctgctcatgggcggtgggatgggcgccggcaagagcaccgtgctcaaggagattctccaggagccactgtggtccaaggacgaggcgaatgcggtggtggttgaggcggatgcgttcaaggagacggacgtgatctaccgtgccattagctccatgggccaccacaacgacatgctccagactgctgagctggtgcaccagtcgtcgacggacgcggcgtcgtcgctgctggtgacggcgctgaacgagggtcgtgacgtcatcctcgacggtaccctctcctgggagccgttcgtccagcagaccatcgccatggcgcgcgacgtccaccgccgccgctaccgcatgggccccggctacaaggtcgaccccgacaccggcgacatcaccgagaactactgggagcccgccgacgccgacgccgcctcgccgccgccgaccaggaagccttaccggatcgaggtcgccggcgtggtctgcgacgcgtacctcgccgtggcgagggggatccggcgcgccatcgtgacggggcgggcggtgcgggtgcggtcgcagctggtgtcgcacaggcggttcgccgccgcgttccggcggtacgccggcgccgtggacggcgcgcggctgtacagcaccaacaccatgggcgcggcgcggctgatcgcgcgcaaggacggcgtcgccggcagcctgctggtggagccggcggagttcgcgtgcctcgacgcggtgggcggcctcaacgagaacgccaccggggtgcacgacctctaccgcggcggcgccaccgcctgcggcgcccgctccatctgggacgacatgatcgcctcgccggcgcgcgccgacatccagagggagctccgggaggccttccgctccgtggagcacgcgccgccgaacaccaatggcgcctagatatggtgtgtgtgtgttcaatatgtttccccagaaattaatcatgtggggaactaaatttgttgttgatgtgtaaagggagtgtattaatttgtggtaaatggatgtgcttattatatgaactagtagggtggcccgcgcaattgcgcggctagcatccataaaaaaatatttaattttctct

SEQ ID NO: 24507 - DNA, 1431 bp, Oryza sativa
  ref <308>: DATABASE ACCESSION NUMBER: AK099949
  ref <309>: DATABASE ENTRY DATE: 2002-08-28
ggctcccgcctcccgcgcccgcgcattgaacaactcgtcgatctgtccggcgagggtgagtgcttcttggcgtgttcttttcggcgacttcttgttgggggggggggggggggggggtcgaattcagttgcgttgcggtggctgagcttctttgcgtgttcttgtttgggttttggggttggggggtgcagtgttggatcgtgagtttgggggtttcttggcggcgtggtttgagatgggcatcttgtcgctcatcaccgggaaggccggcgcgagcgggttcggctccgggtccacggcggagcaggtcaccgccggcgtcgacgccaccggcctcaccgtcatcgtcacaggaggagcgagtggcattggtctggagacctcgcgagtctttgcgatgagaggagcccatgtcatcatcgcagcaaggaacacagaggctgcatctgtagtgaggaagaaaatcattgaggaaaacccaaaagctcacatcgatgttctgaagcttgacctcagctcccttaagtctgttagagcttttgcagatcagttcaactcgatgaaccttcctctgaacatcctgataaataatgccggtgtgatgttctgtccgtttggattgtctgaagatggtgttgagatgcagttcgcgaccaatcatcttggtcactttctgttgaccaacctccttcttgataatatgaaagcaaccgcgaagtccacaggtattgaaggtcgtattgtgaacttgtcatcggttgctcacctccatacatatccgaagggaattgagtttgataaactcaacgatgagaaaacatacgatgacaagatggcttatggacaatctaagctggcaaacatacttcacgcgaaagagctctctagacggctgaaggaagaaggagcgaacatcactattaactgtgttcatcctggattgatcatgaccaatttgatgaggcactcctttttccttatgagggtgcttcaatttgccacctacatcttgtggaagagcgtaccccagggagcagctaccacttgctatgtaggactgaaccctcagctcaagggagtgaccggacaatactttgctgactgcaatgtggagaaaactagcagatttgcgaggaatgacgcgctggcgaagcaactctgggaattcagcgaaaagctgatcaagtcttcttcaaaatgagagcccaaagcaggatcatcagcagaaaaaagaagtgttctgatactgtttggtttaatggcatactagtatgtgatgattgataaatatgtgtagcagcagtagtattaggaacctgaagtattctgaacccttttctaatgtttccttcggtcatggctgagaatgagatcaacctgtgtactcttgttaatatatttgccaaatacatgagttgttcagcagttgtg

SEQ ID NO: 24508 - DNA, 2272 bp, Oryza sativa
  ref <308>: DATABASE ACCESSION NUMBER: AK099950
  ref <309>: DATABASE ENTRY DATE: 2002-08-28
gacttctctctttctctttcttctccagtcctctcgagctctcctctttctctcttctccagtcctctcttctccagcggcggagcaacgcgagcggaggggcgaggggcgccgccagcggtcgggggtggagggcggtgggtacgaaaggcggtgggggcggagggcggcgcgggctgcggggcggtgcgagccgccgcgcggaggagaggcgagcagcgcaagcggctggccgacggcgggagcggaggggcggcgcgagcagcggagcgacaggagcggctggatctggccggagcgcggttcgccggcgacgacggcatggcgtgcagcgctgcgcatattctctaccttcgctcctccatgccttgatccggattggggcgggagaaccagatggatgcggcggttacgggatggcgttaggagagagaaactccaaatctgccgattctttctccggaatagcgcatgcgttatctttggaggctcggatggcgcatctactggagcctgattttctcctcccatgtgctatatttaagatggaagattggatagagcatctgctggggatgctcttagtctgtaactaggccttgctttattgggtttcttctctctctgtgtgtctgcctgttgaagtgtgtatactacactattggtgatggcaggaggatttggtctgcccgcgcacgctgctgcagaatgtggtgtggacttcgctctacaagtgggtggagccggtgctaggcagcaggccgatgaacaagctgagggagtgagctttggatagactcatggagcatatccattacgaagatgaaaactcacagtacctctgcctatgtcctgtcaacaaggctcttaacatggtctgctgctgggtggaagatccaaattcagattcattcaagcggcatcttgcaaggatacctgatttcctgtggctttcagaagatggcatgaaggcacagatatatgatggttgccagagctgggaaacagcatttataattcaagcgttttgtgctactgatcttgtaaatgagtatggttcaactgttaggagagcccacgagttcatgaaaaattcacagattatgaggaatcatcctggtgaccaaagttactggcatcgccatagatcaaagggttcatggactctttcgtcagcagacaatggatgggctgtgtctgacactacagcagaagcgctgaaggctgtactgttactggaaaagatctctagcaacgtggtcggggatccaattgaaatagaaaggctgcatgatgctgttgattgcctcctatctttcgtgaacaaagatggtaccctttctacatatgaatgtaaaagaacttatacttggatagaggttctcagtccttgtgagagttttccaaacatagtggttgattatccatttccagaatgcacctcctctgtgcttcaagctctggtgctgttcaaacaactacaccctagttgccgtattaaagagatagaaaaatgtgtcagaaacgcagcgatgtttattgagagcacacaaggcgaagatggttcatggctaggcacttggggtgtgtgtttcacctatggggcctttctttcagtaaaagggttaattgctgctggaagaacatatgagaatagttcttccatcaggaaagcatgcgactttatattatcaaagcagctcgatactggtgggtggggagaaagttatgtctctaatattactaaggtttacgtaaacattaaagatgatcaagctcatgcagtgaatactgcctgggcaatgttagctttaatttgtgcaggacagatggagcgggatccagcaccactgcatcgtgctgcaaaagaattaatcaatatgcagttggaaacaggagagttcccccaacaagaacatgttggagccttcaatgcatgcctcttctttaattaccccaactaccgcaacttattccctatctgggctcttggagagtactgtcgtcatcttcactccacgaggcgtgcatgagcatggcatatggtgataaatgaaggggtcgatgggcgatggcatggctggaatatcttatatagtgtgtgtatgtaatccagcctgatgttgtattgtcaagactggcaatcataattccttagggaaagtatatgaagagagtgtaacttaaacatgttattgttattgtatttgtgtccatgaagatgaactctcttaaataaatttatcggggaaaaaaaaggagatatgccttc

SEQ ID NO: 24509 - DNA, 1700 bp, Oryza sativa
  ref <308>: DATABASE ACCESSION NUMBER: AK099951
  ref <309>: DATABASE ENTRY DATE: 2002-08-28
gaagggtaccagcagcaacgccaagccaacaatggaggagacctggctcttcctcctcttctccatctcgctcgtcgccgtcttgctcgccaccgctcgccgccgccgctctagcagcatcaaggcgcgcctccctcccgggccgtcgccgctgctcttcctcgccaagttcctccgcctccgccgctccatcttcgacctcggcccgctcctccgcgacctgcacgcgcgccacggccccgtcatctccatccgcctcttcggcaccaccctcgtcttcgtcgccgaccgccgcctcgcccaccgcgcactcgtccagggcggctccaccttcgccgaccgcccgccgctcccggagctcggccgcctcttcacctccgacacccgcgacatcaactcctccccgtacggcccctactggcgcctcgtccgccgcaacctcgcctccgaggcgctcagcccggcccgcgtcgcgctcttcgcgccggcgaggcggcgcgcgcgcgacgtgctcgtccgcggcctccgcgaccgcggcggcgacggctcccggcccgtcgagctgaggccgttgctccggcgcgccatgttcgagctgctcctgtacatgagcctcggcgccaggcttgccccggaggcgctcgaggaggtcgagcggctggagctatggatgctccgcgccttcaccagcttccccgtcttctccttcttcccggcgatcaccaagaggctcttccgcaaccagtgggccgctcacgtggccgttcgccggagggtgggcgagatatacgtcccgctgatcaacgccaggcgcgccggagacggagacggcgacgacccaccctgctacacggactccctcctccagctgcgcgtggccgaggaaggcgaccggccgctgacggacgacgagatcatcgcgctctgctccgagttcctcaacgccggcaccgacacgacggtgacgttggtggagtggatcatggccgagcttgtgaaccgccccgacatccaggccaaggtccacgacgaggtgagacgccggccggagctaaccgaggcagacctgcaggcgatgccgtacctcaaggccgtggtgctggagggcctccggctgcacccgccggcgcagttcctgctgccgcacggcgtgcagagcgacgcggaggtcggcggctacgtggtgcccaggggcgcggagctgaacgtgtgggtggcggagttggggcgggacgaggtggtgtggacggcggcgagggagttcatgccggagaggttcatggacggcggcgaggtggaggtggacgtgacggggagcagggagataacgatgatgccgttcggcgtggggcggcggatgtgccccgggtacacggtggggacgctgcacgcggagtacctggtggggagcctggtgagggagctggagtggctgccggagacggagggggaggcggcggacatggcggaggagctggatttcaccaccgtcatgaagcacccgctccgtgctcgcgtcctcccaaggccctcctccctctactaatcgtgcttccatggatgaatcatgcatgaagaataacatgccaatcgatagttttgtgatggttgtaaaagcatgtgtagttttatgatacgtactttatgtttaaatatgtgtaatactgttgatttttgaaataatatttcatcattgtctt

SEQ ID NO: 24510 - DNA, 4240 bp, Oryza sativa
  ref <308>: DATABASE ACCESSION NUMBER: AK099952
  ref <309>: DATABASE ENTRY DATE: 2002-08-28
gtccccacaatcgaatcgaatcgaatcctcctcctccaggctccaagccgaaaccaaaccctagccccgtcgatctccctctcctcgcatggcggctcccaagcccatctgggtgcgccaggccgaggaggccaagctcaagtccgaggccgagaccgccgccgccgccaaggccgccttcgacgccaccttcaaggccctctccgcatccgccgccgacgaccccgaccaggacgacgacctccaccgcccctcttccccggcccaagcctctcgggacgcctactccgacgcagacgacgacgacgacgaccgcccccatgcccctcccggtccagtcgacccctccaagtcctccgccgccggccccggcatcgctggtggttccgctggtgcccccgccaccttcaccgtcgtctccaaggaccgggactcgcgcagggtcccaaccggcggcgcgcgcgtccgcgtccgcgtctccccggcagctggcgtcggcggcgacgacctcgaaggtgcagtcaaggacaacggcgatggctcctacgccgtcacctacgtcgtccctaagcgcggtaactacatggtccacgtcgacctcgacgggtcgcccgtcatggggagccccttccccgtcttcttcagcgcatccaacactgccgccaccgtcgtcacctccaccttcccgcccacgcttccggctgtctcctccgcctaccccaacatggtcaaccagaccatgcccaacatgccaaactacgctggcgccctctcggctgccttccccagccttctcggcctcctccctgctgcgtctactggtgcctctggtggggttgtgctgcctggtgttggtgcctcgcttggggagatttgccgggagcacatcaacggcaagtgcaccaaggccacagactgtagcaagctcaaccacccgccacagcagctgctcatgtccgtgctggctgccactacatctgtcggtgcgctcagccaggcgcccatggcaccatctgctgctgccatggctgctgctcaggccatcatggctgcacaggcactgcaggcacatgctgcgcagatgcaggctgattccaaggctgcaggaggggaggcttcaggttcaacagataaaactgataaaggtgatgttctgaagaaaatggttcagattagcaacctaagcccacttcttacggtggatcatattaagcagctatttggatactgtggcaaagtggttgattgcaccatcacagactcaaaacatattgcctatgtagaatactccaaacaagaagaagcaactgcagcgctggcactcaacaacatggatgttggtggtcgccccttgaatgttgagatggccaaatccctccctcccaaaactaatttggcaaatagcaatctgcccatgatgatgcagcaagctgttcagttgcaacagatgcaattccagcaggctctgataatgcagcagacaatagcagctcaacaggctgctgcgcgcgcagccaccatgaaatccgccactgaagcagcagctgcaagggctgctgagataagcaggaagttgaaagcggagggctttggtggggaaactgtcgaagagaaggatgccagagggaagtcaaggtcgccatcaccttctgcccgtagatcgaaatctcggtcaagatcacctatcaagtaccgccggagcaggcggtctagatcatactctccgccggttagacacacacgagggcgtagatcacgatcaccatcaagatcttaccactcaaagtatggtagtgatcgatcttatcgggatgatagagacaagtatggcaggtctgggagaagagagagcgaccgatctcgtgaccactattcatctagctcaagaagaaacagaagtagaagtataagtccaaggcataagaagtcctccagatctgattctcggtcacccaagcgacacagagaagaaagtttaagcccttcgaaatcacggaggtcagctcgagctggttcaaggtcaccaggacagcacaaaggaagcaaattgtcgccaactcgtgaccatcattcttctcgccgtagtaggcgttctagatccagatctcaagagaagaatcgcaacagtgataaaaaggacagcaaaaaatctgagatggaggataaaaaaaggagatctgatagaggcaatagaggtgacaaagatgaaaagtatctaaaggatccaatggaagataagaaactagatgtgtcttctgttgctcataaaaggagttcatccgcatcagaagatgaaatgctgaatagtaattccaagagatctaaacatgatgctgctttggagtgtcatgagaggaaggatgaggatcatattgaggaggacagaagggatttggattctgtgggatcaaaatctgagaagagaagcctaggaaatggtgatcatgaaaaacaaaatcatgatacaaataggaaaacagacaagagtcatgacagggatgattcttctcgtaaggacagaaaatacagagaggatgaatcaagacattctagagatagatgttcccgtcattcatcttcaagatcccatagaagttcaaggcattcaagggaaaagtatcatggagataccactgatcagcataaatcaaagaaatcagaagagggttccaagtctaggaaggatgattgtctccttgatgataccttgtcttcagatagaaggaaagttcagagcgaggactctcctcgtaggaagcataaccagttagcagctagttcagatgttcatggcatcaaccatgatactggagttaaggtgccaaatgatttctcagaagctgatcagggtatccaggaagccaagcaggtcgttcatgaaactgatatgtcctctgcaccacgccttgaggacccatttcttgcacaagacaaacaagataaacctattgttgctggccttaatgggctacatgaacctggagttgatggtgcatttgtgggcactgaagagtctgctatatgatattaaccagagtgtttacttgatggttgctatatcattgagttggctgatcacaggatctacttgatcagtggatgcagatagatgaattggtgtttgttatcttcctttctgatttaggagttttatttgcaggatatgaagaacatggagaacttgagtgctgatcgaagtgttcatctgatctataaaaatgctttccatgaagagttggagctcattctggggtgtcaattgaagatacaagggaggtcacacttttccgtactcaagtaaagtccattatacaaggctatataaaccacttctcttgtaggctgtgatacatttcaattggcatgctttggctagtgcaatgatccaaagatgtttctacatgtaaacatcctttgattaagttgacatgctccctgtatttgttatgcgtatgatttgcattatgtctgcatcagtaatggttgaaaagatctatagcttaatacgtatttaaatcttagaacacgtaaccagtccattttactttgtattttgattaatgcagagacttgccctgtggttcttgtttactatcttccctgctgcttaattctgatcagtccatctaaaattaatgtgtatttctaaacaaagatagtatatgtgtgtgtaattgagtatatatcctggtattcattgtttttctttcccttctgttttctttttgttccttttttccttttttttttctgagaaacagggtccatccgagaggccaatgtaagtgactggtgaggaaattgttgataaagtccgagcaaccttttacccttgatagttccagagataagaagcatatctttgaaaagtagcattccttgtgtctttcttttgtgactttgaatttgtgttggtttagttactaagcactgcctctgcaaagagatattggtgctttacttgctgtgattggtggtgtcattggaaaacctgtgcaggtttttcataggcggtcgctgttggagtatatctgaggggaggtttttcagttaagtctaagagctgcctgcctgtagaagaggtaagggtttatgatgtgctcttgataagatttaaacacccacagattattgcctctgttcggttttgatcttgatttggggttgtgcttctgtggatgtaatacactcgtccactgtattgggttattgttagaatcttgatattagtttttacagc

SEQ ID NO: 24511 - DNA, 2686 bp, Oryza sativa
  ref <308>: DATABASE ACCESSION NUMBER: AK099953
  ref <309>: DATABASE ENTRY DATE: 2002-08-28
gtgtctcgcatagtcgcatcgttcctttttctctccccggtggaggaagcgaggtgtgcgccggcaccgagcggagcggtagccgcgcggcgccggcgacgagcggggctccacccatcctcctcctccgaccggcggctagcgggagcccgacagggcggatctggcgtgacgcggccctccccccccccccttccccgggggggcgccggcgtggcctcccgggacctccgccgctcctctcccctcctccggccgccatgcctctcctcctcgtcctccgaccgccgcggtgaggcggggtggcgcggtccggcgtcgagcggtgtaggggcttcccggcgccggcggggcggcacgagcggcaccctgagctgcgacgagaaggcagcggagaggaggggttcgagatggcggcggcggcggacgcgacgacggcgatgacaatcgacttcctccgcgcgcgcctcctctccgagcgctccgtctcccgcgccgccaaggagcgcgccgaccagctcaccaagcgggtggcggagctggaggagcaggtgcgggcggtgacggcgcagcgccggaaggcggagcgtgccgcgggggaggtgctcgccatcctcgagtcccagggcctcgcccgcttctccgatgtggcggattccggttcaggttccgacgatgaggacggcctcgagtccgccgagagcggcagcaaggctcgtggggacgcggaggatgcgctgtcggggtcagagtttggaggcactgctactgcggcggcggccggggggctgtcgtggaagggccgcgccgcgagccacgagtcgcagaggcggcggcagcagcagcagcagcaactgaaaggcaggcatcttaggccgaggcatagccataggagaggctacttttacttggtggccgcggattcgtcgcccaagtaccacccagggcaatcgtgccggaaggtcaagaggaaggagctgaggcttcacactgaaggagacgaggggaaggacaatgccatggaaagtactgaggaggggcacgagagatcagattgtactgtctgtactgatgagcagcctgatattgatggtgaggtgagccaagatgggcagggttcctgtggcaatggaagagatggagatgatgacaatccatatactgttgagtatgagaaggatggggagatggagagagttcttgaaaagcaggcagagttaattgagcaatacgaggaagaagaatatgctcagagggagtgggaaaggaaattcaacaattcccgtgattcaactgcgggtgatgttgagctatgcaataagctaaatcaaattgaaaaggcttgtgagcagagggacaaagctgctcagatcaaggataaagaagtttctgaagtgggagggccaagtgacaaaaatctctttgccaatgacagtccctctgaatgtttgtcaactgattctgtttccggagtgccccaaaatgcaccggaagaaaatgctattaagcattgcaaagttactgagtgtgatcatgattttggggaagctacttcaacagttgtttctgttgatagtggcccacagattaggaaggatgagttggtagacaaaagtttcactgaaattattgaaggaagtgggaataatatagagaagttgtcctcttcactacaaagaaactacgaaagtgtccaaaatgcaagacataatgaagatggagtagatgaaagctcagacggtggtccaggctaccatgtaaatgcttgctcttatgagcactacatcaacacaccatcagttgctagccgatcaagtgacacccctaaaagcaaagtctctgaatggagctcatcatgctttcacaaccacactgataaccagattgacacacagatgcatcaaccttcaagtgatggtgtgggaggtgttttggaggcccttcaacgtgccaagatgtcccttagagaaaagctgagcaaaccaagtccacctagcctggaaatgttagcacttccagcaccagagtatcactacgcaacggatgattcgccagtcagagacacagagctttcactttgcatgtcaacgtttcctagccaggaaatattggcgctaccagaaccagcagagtatcgcagcaggatcataccacgggatgacgtgaaagtgccggtgggccttgctggtttgttccggttgccaacagactcttttgctcaaaatgagttgtgttcagctgatggctatcattcaaggttcagtttgacagcaacaagtcgggaaaacctctcaaatcatttcagggcaaatctgtcactttcacgatatggctccgagttctcaccggatccttgtttcagtgctcgtaattctatgttgctgtcgacaccaacttttggtggatgtagcaacccagtgtcagatttcagagtaggcgacgcttatttcccctctgaagttccaaggtctagcaatagaagagggatgccttctggagatcaagggatgctgttccattttgctggcgattactgctcgaataagtggacgttatagctatgcattcttagaaatcatagtatagtctgagtaggatgctttttgtagtatcaattctgcctacggattgacagtgatgtatcacatctagtattccaatctgtgaataattggtgcttataagc

SEQ ID NO: 24512 - DNA, 782 bp, Oryza sativa
  ref <308>: DATABASE ACCESSION NUMBER: AK099954
  ref <309>: DATABASE ENTRY DATE: 2002-08-28
gaccgacagccgcatcgtgtcgctcggttctcttctcctctcccctcccctcgccggtttctcccctcccctctccggcgcgaggtcgacggcggggagcagcggtggcgacgggtctggcggcggcgaggagcagcagtggaggcggatctggcggcgaggagctcgccggctgctcccctcccctccggcgcgggctcgccggctgctcccctcccctctcgagcgcgagctcgccggctgctcccctcctctctccggcacgagctcggcggcggggagtagcggtggcgccggatctggcggcggggagctcgccgactgctcccctcccctctccggggcgagctcggtggcagggagcaccggtggcgccggatctggcgacgacgacgaccacgacgacgaccatggcggctgcgttgatctggcagcgacgacgaccatggcggtggcagcagatttggtggcgacgacgaccatgacgagatggggatttggggcagttgcacgggggtccggacgaggcgacgaccggggctccgactcctccaacgcgaggcttcggctcgtggcttcacggctcccgagcgcaggcgcggtgcttctttcggtttttctacaagctcgctgcgcgcctgcgagaccacgagcgggcgtgccagctcagctcggctccgacgtagagccgtgagaccacaagctaaggtcatgcgttgtacatggcattagggaatggttgttctaacccaactaataatatatatgcatgtattgcacct

SEQ ID NO: 24513 - DNA, 2107 bp, Oryza sativa
  ref <308>: DATABASE ACCESSION NUMBER: AK099955
  ref <309>: DATABASE ENTRY DATE: 2002-08-28
gaatatgatgaagggacaataatgataaaaattggtcgtgaagttcctgttgctagcatggacagcagtggaaaaatcatatggtcaaaacataatgaaatccaaactgttaatatcaagactattggtgcagacaatgagattgcagatggtgagcgcttacccttagctgtgaaggagttgggaacctgtgatctttatccacaaagcttaaggcacaatccgaatgggagatttgttgttgtatgtggagatggagaatacataatctacactgcattagcatggagaaatagatcattcgggtctgcacttgaatttgtttggtcagttgatggagaatatgctgtcagagaagcacgtcgaggataaagatatacagtaaaaatttccaggagagaaagagtataagaccaccattttctgcagaacgtatatttggtggagtattgttggctatgtgtacaaatgattttatttgcttccatgactgggcagagggcaggatgatacgcagaattgatgtcaatgtgaaaaatctctattgggccgatagtggtgatttagtgacaattgcaagtgacacctcattctacattttgaagtacaatagggatgtagtttcttctcatttggatggagggggttcagttggcgaggaaggtgtggaagatgcctttgaactacttcatgagatcaatgaacgcatccgaactggcctatgggttggtgattgttttatctacaacaattcttcgtcacggcttaattactgtgtaggaggagaggtcacaaccttatttcacttggatcggcaaatgtatttactgggatatcttgctaaccaaagccgtgtctatcttattgacaagcaatttaatgttgtggggtatactttactccttaccatgattgagtataaaacacttgtaatgcgtggagacttcgatcgtgcaaacgctcttttaccatctataccaaaagaacaacatgacagtgtggcacgtttcttggaatcacagggcatgttggaagaagcccttgagatagcaacagactctaattacagatttgacttggccgtgcagcttggtcggcttgaagttgcaaaggcaattgccattgaggcacaaagtgagtccaagtggaggcagttaggagagttagctatgtcaaccggaaagcttgatatggcagaggagtgtcttctacatgctatggacctcagtggtttattacttctgtattcatcccttggtgatgctgaagggctaacaaaattaacatctatggctaaagaacaagggaagaacaatgttgctttcctttgtttcttcatgctaggaaaacttgaagaatgccttcagttgttaatcgaaagtaatcgtataccagaagcagcattgatgtcgagatcttatcttccgagcaaagtccctgagattgtaacattatggaaaaaggatctccaaaaggtaaaccccaaagcagcagaatcattggcagatcctgacgagtacccaaacttgtttgaggactggcaaattgctctcaatgtagaagctaatgtcgcgcccaaaaggggtatttatccaccagctgaggagtacattatccatgctgagaggcccaatgagactctggtggaagctttcaaaagtatgcatatacatctagaggaggtgctgccagatgaaaatggagatgacactcacgaggctattgaggaaaatggagtagaagagagccaagaagatgctgttgaggttgatgttgaagctgatggttcgactgatggtgctgtccttgtgaacggaaatgataccgaggaacagtggggtacgaacaacgaagaatcatcagcataaaagctgtagttgagcaagttattgactcctactgaaactatgtgaaggccgttttcctccacttgtataatcattgggcgtgctttaagatcggcatatccgacgataaaacccacagaaattagtcatcgctttgtccttgtttgagatagaaaattttgtacctttttacacacataggtccttactgtgggttctcaggatgctttatatatacgagggatgttcccttcttgttg

SEQ ID NO: 24514 - DNA, 1014 bp, Oryza sativa
  ref <308>: DATABASE ACCESSION NUMBER: AK099956
  ref <309>: DATABASE ENTRY DATE: 2002-08-28
ggtccctgcccatttcgccctccccggccgtccccgtcgatatcacccgagccctaactcccgactccttcctcgccgcgccgccatggcgccccctcggcccgcttcaccacagagcttgccgcccgtggctgccacccgatcccgcggtcgcccgtacgagggctggactctcaaggagctgattggggaggtgcgccgtctacgacgagccgcctcctcggcgccgccccggccggcgggcgtcctcgacctcgaccagggggacgcgcgcgcctcggacacggtcgccccctcgccgccctcaccgtgtgaatcccaggagcaaccccaccatcttggcaagaggctggaggatgtgcttatttccctacgggatgtcgccttccagttcatcaagatcggtcgacaagacgaggtgcgtaaaatcgtgaatgtagcacacgatattgtggttaacttctgcaatgccattagagcgcccgaagcgttcaaattagtggctgctgctgagaatgtgaaaccacatctgttgaagatagatcatgatgacaaccttctgtttctacaatttaaggctgcactggagcaggttcacaatgttaaccatgagattgctatatctcttgacaagtacaccaattgcccactgtccgggacggagattgcagagttaactcagccattgagaaggttgtcctggtgctgtgtcaaacgacctggtatttgaggatgcagagcttaggcacgacataaagtactgccactgacagagagaatgtgcaagaggtttggtttggttacaggtcgaacaggcttcaattctgcaacgcgaggcaaacgtctgctgtgttttgtttctctgggcacctgtcatttacctttggcttaaacaaggcattcagcggttgatcgctgtgccatgcccttgtacatagaaacaaatattattctgtacatggaatggaagagttccaacacctgcaaatgaatgagcactgtcagcgttgggcg

SEQ ID NO: 24515 - DNA, 1037 bp, Oryza sativa
  ref <308>: DATABASE ACCESSION NUMBER: AK099957
  ref <309>: DATABASE ENTRY DATE: 2002-08-28
gatctctcctcctccctcatcctcctctcctctctgtgtttctctcgttcctcgcttccttcgcttcgccccccttctggcatccttcctcgcgcggcctctccctcccatggtcctcatggccgccgtcgacgaccacgaccgccaccgagccggcaattcctcgtctccttcggaggattccccggctccggctccggctccggctcccgctcccgctccgccgcagccgtcgcgcacgcggctccacagcttctcgttccccaccctcagctggggcacccaccgcctcctccgctgctccaagaaccccgcctcgtcgccccctcccgcggcgccggacaccccgtcgccggacaaggagaaggcggcccaccgctccaccgacggcgtgggcggcggctgttcgcctcagcggggtccgcagcggccgtggaacctccgcacccgccgctccgccacggccgcgccgcgtccggagggatcggacgacgcggccgatgccgcgccggatcgagcgccatcgccgctggcggcgaccaagaagcgggtgttctccatcgtgctgtccaaggaggagatcggccaggacttcaaggcgatccgcgggactcgccccccgcgccggcccaagaagcgcccccgcaccgtgcaacgccagctcgacttgctgtaccctggattgtgcctagcggacctgacgccggagacatacaagattgaagagaggtgattggtgttatttgtgaaagctccaatgggaggggattttcagattttctgatatcttttctcttcagatgttctgatcgttttccttttgttatgtgatcatgggctaacaaggttgcttcagaaccgtaatgttctggacgggttaggggaagtttagttgggaatctcctctaattatgtattggatgtggttgttgaggagtttaggttgtggaaattgattattgggcttgtaggattgttaattgtataaagtgtaatcatctgtacattgtactattaatctatgaagaattttcgtt

SEQ ID NO: 24516 - DNA, 1225 bp, Oryza sativa
  ref <308>: DATABASE ACCESSION NUMBER: AK099958
  ref <309>: DATABASE ENTRY DATE: 2002-08-28
gatccctcctcctccctccctcgtggcctcctctctccagatccacatcctctcctcctcccaagctgttcggtggcacggccgcgacgaagggaggcggacgtcggggggcgcgacgatggcgactgcgacgggatggcgacgggggccgcggcgaagggaggcggtcgtcgtggggcgcgacgatggcgactgcgacggggggcgccgccgcctagtcccagctcctctccctctctctctctctctctctctctctctctctctctctctctctccattcggccgccgccaccaccccctctccctctctcagatctggcgcgcggggagcgatggcagtggcgtcgtcgaggcggaggctgcggcggggctcggtagcggcggcgtcaaggcggatccggcggtggtggttctcaccggccacttcaaggacgacgacggcaacctccgcagctggttgggttcagcagctgctgttcttgcgatgaggcaatgggtgatgctgggaacatttttttttctgcaggatcgacaatatcgttggccctcttaagaacgcgcttgcgaaaattggttttcgccaggcggttttatgaccgcttgtgaaaagcaatgattttctctggcctttacttattggcgggctgctcagccgccagcacataccactttttgccgccggcgtaaattttttcgtagtagtgtaccttttcttttctgaaaaaaacattacattatttgaatgacttgaaaaagatgagtgtacgtgcacgcacttaggtcgtaaagagattgtctccattttaaactcggtcactcggaagtatttatgatgttggctgtttgttgttcattccatgagtgcactttcagggaacgtgcagtttttttttcttctgaacatttcaaactgtgctatagtcaaatacaaagattttttttcccgttttattcatccttcaagagtacacaacagatcatgctcaggatttaaataggtttacattatcccgccaagaaaaaaaaaaggaaggtttacattacattggttttcgatcttgacgagtacaatctctgaaatttctctcattgcaacagtcgtagtcatacataacaataatgtgtactcgctccatcccataaaaaccaatctaatagtttcatccaatactagattggtttttatgacatgaagaaaatactatgttattttacgattgcc

SEQ ID NO: 24517 - DNA, 1984 bp, Oryza sativa
  ref <308>: DATABASE ACCESSION NUMBER: AK099959
  ref <309>: DATABASE ENTRY DATE: 2002-08-28
ggttggcttgggattctttggattcctcttcagcttcggcttcgtctacctttatccggacgcgttgtggtctccttcgcatccacgtagaggagagggtgaaagctggatctggtgccggccggacggtcggtctacgctgacccggctggcgttggctgggtggaagcagagggcattgcacgcaagagcggagccggctgcacgaccgccgcccatcggagccaacgcaaaggggcctgcggccaagcctacgtgaccggcgtaggtgttcccctcccctggctacgtctgggccggtggcggcttcggaaccggcgccagtgtcccctcacgacggtgttgtggttgcagtcggtgcctgtgtccccctcccctcctcttcttcggtgaagaagagccgcggaagaactcgatgcgggaggtgactccaacacagcccacaggattggatggccagatcctggtgcacaccagggttgcgtggagggtgaaggggatcattcaggtgagagttcgatgagaaaatacttctctttacttaattaatttgatgcatgtatgccaggatttggtggtaaaaattgttgcttctggatataacttatccacagctttgtgtggtagagtgaattcgtgcattttgcaacttctcatatgatgtatcagagcttcataaggattgaattcagaaatcctgaacttactgtccaaggagttaaaataaattgcccctttctgtcaattactcaacctttgttgcatagcttgattggtgcagttcatcatatgtgttagactaattgagtaattgttagtcttaaagttcttgctttgaagatttcacaacttaaaagtcgttttacacgtttccaggacttggaccagttcagcaggcagtgctttaagaagatgctgtgagcttgtgactactatttgtcattgttttaaaacgagcaaaaatgaccaagttttagtatttttgttttcacagtttgtactgccaactgtgcatagtatgacagctactcttgcttatccaggaaaactaatgaaaaacgatgagttatattgttttcatagtttacttttcacaatttatagtgccaagtgtgaaagtatgacagctacttttattatatcttaccagagtaatgaacttggtcacttggacatggtttgatattttgatcaggctttatctctcggttcacttacctaattatcttaagataccataagatttttatgtcaaatactagagacatgggctaaaattttactcttctactgtcaggtatcgagaaccattggtgatgtttacttgaaggaacaagagtatagcatggatcccgtgtttcgtagcattggtccccctattcctctaaagcagctagctcttagtgcagaaccatcaattcaagttcgcaagctgaaaccaaatgatatgttcctgatatttgcttcagatggtccctaggagcatcttagcgatgacgctgcggtgcagattgtcttcaagaatccaagaacggatgtagcaaacagagtggtaaaggccgctttgaaggaagccacgaggaagagggaggtcaacttccatctgaagacgatagagaagtgaggcgccgtttccacgacgacatcagcatcatcgtcgtctaccttgaccgccaccgtggtcgccgtcacaccagggtcgtcgactcaagcatcaactgcaccaatggccccgtcgacatctactactcaactccggcaaatccgtggagactcttcaagctcatcggggctccggctggtagaagactgggatgcctccctgcaaagatcaatacggtttcttgttaattagtaaaaacatgtagagctgctgatcagtaacactagctgcagtggcatcatcggaagaaatgcgggaatgtacataaatagtagcggcccgttgcattttgatgtgggaagatcatttaattttttttcc

SEQ ID NO: 24518 - DNA, 2358 bp, Oryza sativa
  ref <308>: DATABASE ACCESSION NUMBER: AK099960
  ref <309>: DATABASE ENTRY DATE: 2002-08-28
gagaagcggaaaaggaaaaaaaaaacttatctcccgtcgccgcctcccggagccgctcgccgcctcctcgcgagcgcccgccggaccgccgggtgccgccgccagctccgagcgctcacccgccggagccgcgccccctaccccgccacctcctcacgcgcgcccgacgctcgccctaccccgctgctgccgcctcctcgcagccgccggtgagccgggtttgccgtctgctggggccttctccaccgccgccgccgcctcctcgcgcgcagcctctggagatctggggtcgccgtcggccagctcctcctcgcgtgcgcccgcccgggatctgtggtgggttacggcactacgtagtatagactccaggttaaggcacagggaggcaacaatccaatctaggagagatgggatgggatcccagctcaagggagccctggcggcagctacgattgggaggacctaagccctacagccaagctctataatcaacccccttttgcttactggcgataagtcaaccaacttccaatgatgcaggtactgatcccctcctccctccctctccctccctctttatcaccacattagccgattgatcaccagctttttattctgattgctccagtgaactttgttcacaaaatagtgtttttttcatttctgatgcttgtgcctatcatgtgactcctccgctgacatgtacattgatatctgcccaactaattgatgaaatgatcgtttacattttttttgtccagtcaatagtttctgatcagtttggagtagtctgtgccatgttgctgtgataatgctacaggttaatcctcctggctctctgtactgaaacaatttctctggatctctttcccttttgttttggaccttatacaacctgctgatggctaataatgacattcatgaataatagatcatattaaagctgtttgcatgatctgctcttgtcaaatagttttatgcagtgacaactcttattaactgatcaggttgacttcaagcattgggctaaaaactaagattatgtaagttaaataacatatatgccgtcattttcaatttaagtgatattgtgtcaatcttctgatcaactgtttacatcttcggattatatagattcatgtcacctgtgtatgtcttcggaattatctatgtttatgttactgtgtatgtcttcagatttatatatatttaggtcacctgtgtatatcttgagatattccgtaattgcatattattacagatggcaaagatgcttaattctatttttttactggatatccttcagcgatatgcccctgcccggccttgtcagctgatatggcatacattcctccaggctgcactcacttacacttttactgtagattgatagattaatgttcctttgtcaaggtgaaccaatcagctaatgatggttcatatagttctgatttgagtgcaactatgtatccactatgatgtagaattgtgggtatttacagatgcaatttaaaaggtatgccacttaggaatcgacactcaggtacatgcacctaggcttgatgggtaagtctggccaatttacatatggggaacacaaattaatttaatcagttattccaatttattcttctttgtttctatgcattgcaataccaatttgagtgcctatcttgtcatgctattcagcataatgtcttggcaggctatgcatatgttcatgcttatatatgtagcattcatataagtaactattaattggattgcttgctttgtctaatgcagcctcaccatttcatttgtggcgagtaccttaattccatcttgccattatcgagggagtatatcatctgcacctaattctgtatatagagtatttattgactagggtcttggaaatttttgaattgctgtcagatgcaagttcctcagattgatgatttgattagtttcacagctaataccattgatcacagctaaacaccacttatagaagtttaatggatttttatctaaaaaggggaaaaagggaagttaataactgaaactgcatagtagtactatggtctctgaacaaagaaatttgttgagtttcctagcaactgctgggtgcattttcctcttgttatgtgtgcctaaccttccatccattaaatttcaaaagtgcaaattctttgtataggtattactgggactcaaatgtacacctttcagttcactctcaattttgtttctgaattgtgtgtctgctgatgcttgcttctgaattttgtatctgaaggcgaatcattgcttctgttttatgtagtcctcagcttgagtaagccaggaaattatgcactgtgttgtcaaaaagct

SEQ ID NO: 24519 - DNA, 903 bp, Oryza sativa
  ref <308>: DATABASE ACCESSION NUMBER: AK099961
  ref <309>: DATABASE ENTRY DATE: 2002-08-28
ggcacggctgcaagttccgtgtcgtgctgggtgtctcgccgtcgccgccggggcgagcatggagtccgtcgcgatcgccaccacctcccgctctctcctccctcccccccccttctcctccaatcgccgatgccgccgccgcgcatccttcctccccgtcgccgcctccaaccgccgccaccacgacgacgacgacgaggaggtcgccaaggcgcacgagcccaccagcctcgcctcgtacggcctctccatctcgccgctctccaaggatgcggccatggggctggtggtgagcgccgccacggggaggggctggacgacggggtcggggatggagggcccgcccaaggccgccggtgggggagaccggccggaggtgtccacgctgccatggtcgctcttcacaaagtccccacggcggcggatgcgcgtggccttcacctgcaatgtgtgcgggcagcgaaccacgcgcgccatcaacccgcacgcctacactgacggcactgtctttgttcagtgctgcgggtgcaacatattccataagctggtggacaacctgaacctgttccatgagatgaaatgctatgttggtccagacttccgctacgaaggagatgcaccgttcaactatctcgaccgtggcgaggatggtgacaacatatttccaattctgtgaagaaaacctgacatggtgcttcagtgtgtgatggttgatgccagtatgtaataagcatgcatatgttgatcaatctggagggtgccttgagttgttataccctggaacttgtagtaaatttcagatgtatatataattaattgtactcctagtgcacacgctacggtgcaaacattatacagatatagtggataatagtaatagatatatgaagaaccttgttatgc

SEQ ID NO: 24520 - DNA, 961 bp, Oryza sativa
  ref <308>: DATABASE ACCESSION NUMBER: AK099962
  ref <309>: DATABASE ENTRY DATE: 2002-08-28
gatcgatccaccagatcgcaatccgaaattcagagatccaaattcgcccacaagaattcacctctgcttgttgatcggagaggaggaggtgttcgtcgagatgggcaaggtgagggcgttcttctcgcgcaagggcagggggaacagcagcggcaggtccaggtcgatgcgggaggcggcgatgaacgtggactggtcgccgaggccgtcggatctcgccgccgccgccgccgcgaagccccgcccgcccgcggcggaggacgagacggagcgggtgttcaggaagttcgacgcgaacggcgacgggcggatctcgcgggccgagctggcggcgctgttccgcagcgtgggccacgccgtcaccgacgacgaggtggcgcggatgatgcaggaggccgactccgacggcgacggctacatctcgctcggcgagttcgccgccatcagcgccccgccgcccggcgacgccgccgccgccgaggaggacctgcgccacgccttcggcgtgttcgacgccgacggcaacggcgtcatcacccccgccgagctggcccgcgtcctccgcggcatcggcgaggccgccaccgtcgcccagtgccgccgcatgatcgacggcgtcgaccgcaacggcgacggcctcatcaacttcgaggagttcaagctcatgatggccgccggcgccggcttcggcaggatcgcttcttgattccaaattcaatccctcctccgccatggatgatggacacctcaccgctcatgttctttcattctttaattattattaattgtaaatatagataaatcacgcggaatgattaattaccgcgtagtaatttctactaattagttgcagataccacacgaacataatcccgtttggttttgtacagagtgtacacactggaatcgtaataacgatcccccaaaaaaaatatatatcaaatttcagtcttattatgcc

SEQ ID NO: 24521 - DNA, 798 bp, Oryza sativa
  ref <308>: DATABASE ACCESSION NUMBER: AK099963
  ref <309>: DATABASE ENTRY DATE: 2002-08-28
ggtcgtccttggactgcttgaagcttacacgagcgctagctaacgaaggcacagcgcgcttcgcgcgaaagatcggaagaaatgtcgaggccggccaggagcgacgcgcacctgtccccggagggggaggcggcgatggaggccgaggtgcgggagtactacgacgaggcggcgcccaagcgccactccaagccctcccgcagcgagccctccgccgtctacaccgacgcgctcgtccccgacgactcccaccccgagctcgacaggttccagcagctcgaagcccacaccgagaaattggtgtgcgagggtggcaaggcaggggatgagttcgtggagacggagtactacaaggatctcggctgcgtcggcaagcagcaccacacgactggaacagggttcatcaagatggacaagccctcggcggacgcctcgtttcatctgtctgatgacccagatgcatcggagcgccatgcctcctgcaagggaaatcctgctacaaacgagtggatcccatcagctgacacggtgtatccggcgtcagacaagcccaacagaagtgacagctgagcaacgcgcgctctacatgactacacgtacagccagatgtatgcattccaccagcatataaagaagccacacttggttattcacataggacacatgcatctttactgttctgcaaggagtttcttgtggtgttaaccgtgttgtactcccaagaacttgtgcttcgatcacagatttgtgtttgggggcagcaagtattacaggaaataaaaacagcattattatgtt

SEQ ID NO: 24522 - DNA, 1777 bp, Oryza sativa
  ref <308>: DATABASE ACCESSION NUMBER: AK099964
  ref <309>: DATABASE ENTRY DATE: 2002-08-28
agacggcttggctttgcctactactgctgctgctgctctgctctctcctctctctcgtgagcaagcgtagtagcctcgctctctctcgcagccgcgcgcttggtgggagggggggattggggatgatggggagcgagtcggggagggcggtggcggcgatggtgtcgctgcagctgctcttctcggcgctgcaggtcttcatcaagctggcgctcaacgacggcatggacgcccgcgtcctcgtcgcctaccgcttcatgttcgccgccaccttcctctgccccatcgccttcctccgagagaggaagaaacgaccgcctctaaccatgaaggtggtgctgcaactattcttgtgcgggttgtttgggttgtcatgaagatggtaattgctggacacactcatcaatttaggggcatcatactacaacttgtgctctactaacactagatttcagcaaagattttctataaaccagaatctctatgtgcttgctataaagttgacttcagcaacatttattactgctatcagcaacctgacaccagcaaccaccttccttcttgctatattgaccaggttacggatttaccacttatagcttatatgtttaatttcaaggcatacagagatactccagcttatatctctgactatttctgtctaatattatcacctttgaatatatattacttcaagaactggctaaaagtatgttgaatttcaactacaacagttatgtaggagtattctttcagcagccagaacagtttatattttccgtcttatttgtaaaaaaaatatggatataacaaagccataatttttaagggttaacattagtttccatactgaacaaaacaacaggctcgagaccttaaaacttaagaaacctgctggacaagcaaaacttctaggaacacttgtaggcatgggtggtgcaatgttgcttacattctacaagggaccaaagatcatggtactcgaccaacttccccatcccaaatttgcccacctcactgaaaatccccagtcgcacccaatatcgacgggcaatcaaattataggatcgttccttggtataatcagctgtttcacctacgcgacatggctagtcatccaggcgaaagtgagcaaggtttacccgtgccactactcgatcgctgcaatggtgtgcctcttcggcgcacttcagtccacggtaatggcactttgtgttcacagggacatggagcattggaggttaggacttaacatcaggctctactcatcggcttacgcgggactcatagcatcaggctccgcgttccctctgctgtcgtggtgcctgcggaagaaaggccccctgttcatctccgtgttcagcccgctgatgctcatcttcgtcgcgctgatgagctcgatcattctcaatgaggcgttgcacctcggaagtgtgcttggttctgtcctgattgtgggtggcttgtacatggtgctgtggggcaaagcgaaagaggcggctgatctgtctgaagatgaaaatcagggcaaggaatccatccctgtgaccactggcggtgagaatgaaatgaagtgaagagagcattgggcctacaggttgctatttgacagaaatgacagaaagatatgattctgaaattctgatagaaatatagaatgttcggtttggatcaggcattgatgtttctacatcgattcatctcgtgtattgtggacgctatcatttgtctgaatagtctgatactgttaatctgttattgccgtggatttgctgcc

SEQ ID NO: 24523 - DNA, 1718 bp, Oryza sativa
  ref <308>: DATABASE ACCESSION NUMBER: AK099965
  ref <309>: DATABASE ENTRY DATE: 2002-08-28
ggtgtttgttgagagaccccagtgtaacccgagctagagtggaatggcggccactcttctccccaccttatcgccgccggcctcccgcgccgccgccgccctcctcctccggcgagccccaccgttcccctcaccccttcccgctcccctcctccgactcctcctcgcccccgccccctcccctccgctacggtcctctcctaccttccgctccctcgccacaatgccctccgccgccgccgccgcagacctcctcatgctcggcatcgagaccagctgcgacgacaccgccgccgccgtggtacgcgcggctcactcccctatttcagaccgcttgtagcagtggtggagtcggtgtgtaggatttgtttgtgcttagtgcctggctctttgttgtttttgttggttggttggttgcaggttagaggcgatggcgagatcctaagccaggtggtatcttcccaagaagatttactcgtgaggtggggaggcgtcgctccgaagatggccgaggaagctcattctcttgcgattgatcaggttgttcagaaagcacttgatgatgcaaatgtgtcagaaaatgatctttcagcagtggctgtcaccgtaggaccaggacttagtttatgcctcagagttggtgttcacaaagctcgaaaaatagcgaaatcatttcgcctgcctattgttggagttcatcatatggaggcacatgcattagtttccagatgatgcaattggtgaggcttatgacaagtcagcgagatggttaggtcttgatatgcggaaaggtggcggtcctgctcttgaacagcttgccctagaaggttccaatgcgacaacacaaagattgcaatttctcttatgctggtctgaagactcaagttcgattggctattgaatccagaaacatatcaacagatgatattcctatttcatccgcgacaaaagatgacagacaaataagggcgaacattgctgcctcttttcagcgagttgctgttttacatttggaagaaagatgccagcgagcagttgaatgggcattgaagatggagccttctattaaatactttgttgtttcaggaggtgttgcatcaaaccagtatgtcagaactcatttgaatcagatcgctgagaagaatggcctacagctcgtatgccctcccccaaagctttgcactgacaatggtgtcatgattgcttggactggtattgagcatttcattgcaggcagatttgatgatcctcctgctgttgatgagcctgatgatatgcagtatgacctgcgtccaaggtggcctcttggtgaggaatattcagaaggaagaagtgcttctcggtcaatgaaaactgctcgagtccatccatcactcacatcgatgatacagggttctgttcattagtagtttagtggaaattgcaggagcatttgcccattgaagctagtgctttcatgtgccatgtggtttatcagtttcagttttagtgattactgaggcgcggcttgtttcgagtgaataactcgcaattttcagtcgcagtttagttgaaaaccatggggcctgtgagcagtacaatttgtgtgaaacttcgatgatggttttggggctttgggcttgtgcaactgatgttagtgcttaatgcctgaaattcaaaatgctttgtatacttcaaacagaggctgtgtttagttctacaccaaaattaaaagtttg

SEQ ID NO: 24524 - DNA, 1614 bp, Oryza sativa
  ref <308>: DATABASE ACCESSION NUMBER: AK099966
  ref <309>: DATABASE ENTRY DATE: 2002-08-28
tggcggagaatcttctttcttcccgaccgttcgacgcggctgcgccaaccgaaagcgtctcgccgcgccgccacgtctcgccggagcgcgcgcgcgcacacccacccgaacgccgccgccatgtcctgctgcccctgcaccaccaccacctcgtctcctctctccctgccacgccccgcttgcagaggcaggtggtccggcggcggcggcagcagcgccaacgccgccgcttggagggcgcgtggaggaggagcgaagcggagtttggtagtcgcggcgagcggcagcaaggatgagacggcggaggggaaaaagcaggaggaggagtcggagttcaacccgttcgggttcgtgacggacaacccgtcgagccgcggcgccatccagctgccggagtcgcccgcccaggacggcaatgtcggccagatgctctacaggatcgaggacaaggggagggagttcggctcaagagtgaaatcaggaaagctgcggtggtttgtgagggaaacaggttccgctggtgcacgacgtgggactgtcgtgtttattcacggtgctccatctcagtcatttagctatcgtatggttatgtctcagatggcagatgctggctaccactgctttgctcctgattggataggatttgggttcagtgatatgccacagcccggatatggattcgactacacagaagaggagttccacaagtcactcgatgagcttcttagtactttaaatatcactgagccattcttcttagttgtccagggatttcttgtaggttcatatgggctaacatgggcactaaagaactcaagcaaagttctgaaggtagcaattcttaacagtccactcactgtttcttctccagtgcctggattgtttaaccagctaaggttgccactttttggtgaatttacctgccaaaatgctgttttggctgagagattcattgaagcaggtagcccctatgtgctaaagtcggagaaggctgatgtatacagattaccatatctatcaagtggtgcacctggatttgcattgcttgaagctgccaggaaagctaacttccgagatgtattaagtagaatttcagccgggtttgcatccaacagctgggaaaaaccaatattgcttgcatgggggatttctgataagtacttgccactccccatagctgaggagttccagaaaggtaatcctgcagccataaaattggagccaatagaaggagctggtcatatgcctcaagaggactggccagagaaggttgtgacggccctaagatccttcttgtagagtttggcactatactttttttcctgtacaagtcacaggtaaaagtttgactataagttacaagatatgcctaaatatgcctctaacatgcaaacagccgacggcaaaatcaatatcaggaagggatgggtaagttcaagaaattatagaactgttcttagttgagtttcctcttggttttacatattcacaagatctggtcgtttaggatgttacgttcctgtataaatgcagtgtgtatatatgcacttggtcacttggatataaatatcatgggtaaatatgtataaatgtatgtacaaccgcattttcatt

SEQ ID NO: 24525 - DNA, 887 bp, Oryza sativa
  ref <308>: DATABASE ACCESSION NUMBER: AK099967
  ref <309>: DATABASE ENTRY DATE: 2002-08-28
gactcctcgcgccttcaattaattcgctctcctcctcctcgtcgtcgtcgtcgtcgtcgccatcgtcgtcgcgatctccatagctagctctagcgatgggttgcgcgttctcgtcggcgggggcgctgaggccgttcgagggggtgagggtgatccacatcaacggctacgtggaggacttcgacgcgccggtgacggtggggcaggtcaccggcaagccggcggcgggggaggggcaggggcaggggaggtacgtgctgtgctcgtcggcgcacctgctgcagccggggcgggggccgttcagggcggacgacccactggaggccggcacggtgtacttcctcctcccgcagtccatcttccagtccgagtcctccgccgtcgacctcgcctgcctcatgaaccgcctcacctccctcgcccgcaagggcgccgccgccgcctccagccccgtcgaggccctcttcaccgccggaattcaccacccgccgcagccctcctcctcctgcagcagctccaagccggcggcggcggcggcgagctcggggtcgccggaacggtgctacctcgcggcggcggcgcggccggcggcgtggaagccgcggctggatcgcatcgacgagtccttcggccgcgcatccatgcggagctcctccgctcgcagcaccgaggcctgaacattttttttcttcctcttttttaatcttttttctctttattattttattttcttgttacttttcttagtagtagtagtagtagtagtagtagaagatgataatttctggatttttttttctttacaaagttagttttctgttgtttgtatatccaaaaggtgtaaatataatctaatttgtaatgttggtttggattggattcggagc

SEQ ID NO: 24526 - DNA, 3370 bp, Oryza sativa
  ref <308>: DATABASE ACCESSION NUMBER: AK099968
  ref <309>: DATABASE ENTRY DATE: 2002-08-28
gacggcccgtcaccatgcaaaccacaacgaacagtgatgtgccactagcagcagagacctgtcatccacacgcccccgccggcgacaatggcgccgccgccgtcgtcattgcttcgcgacctcctcgccgctgatggcttcagaaaccgtcgcaagccgcctgacagtaaccctccggccgccccaaggaccacgagcatgcccctccagcaccggcggccgagtaggccagcacggtcgcagtccgacgtcctcacccgcagccgcctcagagaaacaaacaacgtcggtactagcgatggcgacggagtcgacgccggcgaggagcagcggaccgccacacggaggtcatcggcgtcgctgatgagcgcgaggagctacaacaacaacaaggacagcggcggcggcgccatgaggggcggctcagctgccgcggtaccggctctcgacgagtccgtgctcaccgcgttgatctccctggtcgcgggagccgtgaagcggttcgtcagggacgagggcttccgcgcgtcgctccgcggcgggtgcatgtcgtgcctcggcggcgagtccaaccaccgggcggtcctggacctccgcgtgatcgtgcacaccgtcgagagggccgcgagcgaggggctcgacgacccgcgcgacctgaagcgcgcgtcgctcaggctgcacgccatggcgtccctcgacgcgaaggaagcggacgcggtgagcgcggccggcgtgccctaccagcgcctcgccgcgtgcgcgcacctgtacatgtccgtcatctccaagctccaggagaaggaccactcctccgcggtgcacgtgctggaggccttctgcttggcgccgcacgaggcccgcacatccctgcttcccgcgctctgggacaggctcttccgctcgggcctctcgcacctcaaagcgtggcgtgaccgcgagtcggcgaccgcggcgagttcggatacgagggtgaaggacgtggagaagatgttcgtagaggcagtggacgatggcacacgcgcgctcgcatgctactacagagattggcttctggggcgcagccaagccatgtctctcccggttgttcctgctcctcccagcaccgttcttgccagcgcgctgaggttctcgacgtcgacgtcctatgacattggctcggatgtcgcttgtagctccgggagttacagtccagctgtaaagtttgcgctcgacgagactccatcacaatatgatcgagagatcgaagaggaagaagaagcagaggtggacgagaagacagcagatgcagaaagcgtgttccatgagtgcgatggcactgaaccgaagagctacactcactcacttcagacagaagaaaacgagctaatgcctgacaagctagccaacgaggcatctgaacgaaagagtgaagatgaacggagcagacaaccagatgagtcaacgagttatgtgccaatttctgatatcacggctattgaccttcctacactcgagttctgtgaagggcctgatctccagagtgacacagatggcagtcaaatatccatttttgccaccattcctagtgatttcctctgtccactgacgaggcagatcttcaaccgtccggtgacaatcgagacaggtcagacgttcgagcggcatgctatagttcagtggttcgataaaggcatcagaatgtgcccaattacaggtcaagaacttgaaagcctgtcgattccagacataaaccgtgtgttaaaacgcttgatcgataactggaagtccgaacactgcaaaactctgaactctgaaagtacatgtcctgaaaaggagttaactgcaacattcgtagagaatgtcctttcttctgaatgcgagacgtctgaaaaacttgagaaggcaaggcgtcttatggcaatcggtggcatagactttcttctgcataaatttcatggaggaggagaagatgagaaggcacaagcagctgagctccttttgctctgcatcagggcagaaggaagctgcagaaactacatggccataaggatttgtaactcaagtgttgttcagcttctccacagtgaggtgatttcagcaaggagttctgcagttcgtctgcttgttgaactgctctgcctgaaaaggttctgtctcctgttcgtaacaccaaatgcatccaaatatgtcttgtatgtacatgcgcttccatctcacaaaatatttcaattgtcacagaagggaaatagttgaattgttcctacgtggattgcgcacagagttgacaatggagactatgaatctactactcgagcatctccgacgctcgccaaacgaagaacaagctctgggtgctgttctactcctgcattttgatcatgcattggtggagccacacagagatagcgtatacagagaagaggctgccaagatcatcacacattctctgagatgctccctgtctgaagaaaatgtcgttgccaacatcaggaaagcactgctgctgctgggagggcatttctccttctcgggcgacctccttgcagaggaccggatgctgaaacaagccggcttcgtcgacggctcacgtgtcacgcgtgccgattctgacgctgccgtacaggacaagggaagagacgaagacgaggtgtggctgagggatgtgaccgcggcgctactcggcagcgggaggaggccgttcctggaggcgctgtccatgtgcatgagctctcccaaccacgacctggcggccgtgtgcctgacgacggctgcgtggctgagccggtcgctcgcgtcgatcgacgccgccgacgtgcagctcgccgcgttctcggccctcatcccgcggctgaagcagcgcctcgccggcgaccggtcgcaggctcagcatcgggtcctcgcgtccgtgacactgtacaacttcagcaagatcccagactgcagggccttgctgatgctgctggctgacggccttcgcgatcacctggtcgagctcgcggagctgacatggacggccggtcaactgatcaccgagctccaagagtgacgttaacctccgccacgacgcccagcgtacgctacatgcaagtcgccggagcgcctctcgtgttcgtggaagattcagcggatggagcccgctgattttcttgcccccttcagagttcagaatcgtctcagctccaaacagttatcggacagagacggcacgctatgtaaatgttgatgcgtacggtagattatactataccttgtttagtcgttttctctcttcttgggtaacatattcgacgagccggccgctgtgaatataatttgattatgcctgacggagtccttgacgtttgtacttctgaatatttttggggggcaaaatccagtctttcaattggtt

SEQ ID NO: 24527 - DNA, 1111 bp, Oryza sativa
  ref <308>: DATABASE ACCESSION NUMBER: AK099969
  ref <309>: DATABASE ENTRY DATE: 2002-08-28
ggtagtccagttgagaggagatctgagagctagaagcagaggatggcgacggcggcggcgacggagaaggcgaaggtggtgatgaggaaggcgaagtggatggcccagctgcgcttgaacttggccaggtagctctcgggcggctcctggtacggcacctccacgtcggcggccgccaccacgtcgccgccggacttgagcatccgcagcctgtccgccgccagcgccagggtcagcttgtggcaacgccgctggtacctagtatattcattcgcgcgccattaattgctgctaagtaagtaagcaagtaattaagtagtagcaagcaaattaagcaagaggcaattagagcgacctgaatccgttgaggcatcggaggtggtgtgcgacggcggcgtagaaggcgaggtgggcgagggagaggaggccggcgggggcccagaggtggcggcactggaggcgggacggcggggactgggcgacggcggagaggaggatggcgaggaagaggaagaaggcgaggaagaggcgccacagctcctgcttctgcgcgtccgccgcccgcttcttctccagcgtcttgtcgaagtgcagctgcaccaccgcccccagcgcctgcgccgccgcctcccgcgccaccacctctcctcccccgacgtacgcctcgcccatcgccatccccatccgcatctccaccatccgctgctgctgctgctcgtggtgctggtgatgatccatctctctctctctctctctcttagatttctctcttctcttaccactactagtatagtgctcgctcactccctcacctgcacaagcagcagtccattgctttttactgatgaatatactgagatgagagaggctattagcgttagcagcaaaagctgatggccagtacagtaataatgagaagagttgctactaacactagacgccatccatgccacgacgaccaccaccatgcttcctttctgttccattcgctgctgttttacctcttcatttcgcccatggagtacttttctagtgtctgtaactgtaagcaagcaagtactcgatcgccttgtagaaagaaataagacaagatgataattaatttacgacc

SEQ ID NO: 24528 - DNA, 1439 bp, Oryza sativa
  ref <308>: DATABASE ACCESSION NUMBER: AK099970
  ref <309>: DATABASE ENTRY DATE: 2002-08-28
gaccccgtgccacgccacggccacggccacggtcggccactcggttggcgcctccccgacgcacgacgacccgcggttccctcccgtccccggccgcctcctgcctccacgcgcggctccacctccacctcccctcccctcctcgccgcgccgcgccgcccagcaatccaactccgaatcatcctcctcaccccgcgcggcgccgctccgaccgaccaaccaaccaaccgcagcggacgccacgcgaggggaatcgaagcggagacgtaggggcggggggaattcggccgaggggaagcatgagcttggcctcccacgcgcctagccgtcgagctcgaatcgcgtgagataaggggccgcgagcaccgtggtgggagagggagatggcctcgcgggaggacgaccgcgccggccgcggtggcggcggagggcggacggagcaggagcggcggccgtccaaggcgtgggggatcctcatcttcggcctcatcggcgccaccaccgccaccttcgcggttgctcaagttcgcagaagtgttgattgggtctacagtcagttcaataagatgcagacaacatcttggaggaatgcaagtaacagctctaaccgtggaagtttcagtgaggatgctaggagaagatattaccaacgtatgcaacaggaatatgaggaggaacaagagagagttcaaagaataagacacatgcaaagtgttttcaacagagagaggaacaagtttaggagaagttatgaagcttggagggagaatggccctccaggtggatataattatgtcccacgggacgactggtactggcagacagatacatcacactcggaacataaaaataggcggacatatactcctgcaggacctagggtgtattctatgtcacatcactatacagtccttggtctcaataggtcacggacaacaccatacaccgacgcagaagtcaagaatgcttttagaacaaaagcaatggaggttcaccctgatcaaaatcaagataatagagaggctgcagaagagaggtttaaggaggttgtcaaatcatacgaagcaataaaactggagagaaaaaatgatgcaagttgaatgtgaatatgtagcttcactggagctcattgggaagattgaaaggatcaatgaagacagtatcagcaggccttgcaatcaagtggatgatctgttaggttcggctgtatctgttgatagcctgtaagcacaagtttttatttgcgagttttttttttttgggagcacacggccctgatgtagactaggatattgtcgacaaaggtgcaaaaggaaattgctcatttgtgcttagccactaatttggggtgcaaaatctggactgcgggtgagcatttttgttgtgtacacctgctggtttattttttattagtagaaagtagagtgaagatctgatgg

SEQ ID NO: 24529 - DNA, 2934 bp, Oryza sativa
  ref <308>: DATABASE ACCESSION NUMBER: AK099971
  ref <309>: DATABASE ENTRY DATE: 2002-08-28
gcttgccaacagtacagaggcctcgcttgttcatcttcgtctcggctctgcctgaaccttagcgccatggacggcagtggtgtgcgccggatttaagctttgtttaggctgatgggtcttcatgcttcggttcatcttcgtctcggctctggagttcttgtaagtggacgaaacgatgaaacttgaagtgaagaactgaagatcctgttgagttggtggttggtacatttcaagtgaagaactgaagaatcgtagagggaacaatgtcggagatggaaggagctctgagatcctgcatggagcagctgctcatcgccagggaggagcgggagcagatcatcgtggaggcggccagcgagatctcctcggagaagaagaaagcgcgggagctccagcggaagctcgacgccgcgacaaagaaggccgcgaagctcgccgccgagaacagcagcctcgccaaggccctcgacgccaaggacgcggcgatcggcgagctgagggagtccaagtcggcctccgacggcgagctcgccggcgcgagggcgaggctggacgcggcgcagaagcaggcggcgtcgctgcagtacgaggtgcggatgctgcagaaggagctggagatcaggggccaggagcgggagtacgacctccagtccgtcgacgcgtcgcgccggcagcaggcggagagccagaagaagatcgcgctgctggagggcgagtgccagcggctgcgcgccatggtgcggaagcgcctcccgggccccgccgccatcgccaagatgagggacgaggtggaccagccggcgacacccagaaggtcgcgctccgtggcgccgatgtcgccgcggtccgtggcgccggcggcgccgatgacacccatgtcgacgtcggcgcggccgatgactcccaccatgtcagcgcggccaatgacgcccatgtcggcgcggccgatgacgccgcgccgtgccgccgcggcggagcacgagacgcccgcggcggcggccaagctgcgcgccgtcgaggacgagaacaaggcgctgaagcagacgctggcgaagagggacgccgagctgcagttcgtgcagatgaagtacgccgacgaggcgtgcaagctctccgtgctgcagcggcagctcagcgagctgaccgaggagaacaagcagctgagcgacgcccatggccagacggagtcgtgggcctccgcgctgatctccgagctggagcagttcagggccgcgaagctgcagggagcagcagcatctgagatgagcttgctcgacgatttcgccgagatcgagaggttggagatggcttcaggtggccaaggattgagatcgcccaagaatgcgcattcggaagcgatttcttcagagaagaatgataaagacactgtcctagaaaatggtatctctatctccaatggccagcctgaatgggttcaggatatgtgcaagcttgtgatgcagaagcatgaaaccagtggggaaaacattgacacaattcttgaggagataactcgtgcattggatcagagtgctaataatcagaaaggagatgatttgaatggatcatatgactggagcataatgaaggaaatggtgttcagcctgactgaaaagatcacctctgttattggcatatctgaagaaggcaatgttgcaagttctcaaaaattgctgcttgacaggtctgaattttgtgctcgccttgagcatttggtccatgtctgtcatgatctactgcatggtaaaactgaccttgaaaagtttgtgcatgaggtttgtttggttctagagtatataatcaaccagtacaagaatatatcattccaagaacaaccagacactgtgaataataatacagagaatttggatggagaggaatcatttggtaacatgaatggtggatgtgacataaaaagtccgaaatcatcatctgctccagacatacaaactgaagcactggaagaatcaattcagtcggtagaaggccgaaaaacagatcatattttggttaaccaagaagagagtcaacttgatgaagaactcacaagagttatactagaccaggacgagaaaatcagtcaggagaactcagcatcctgtgagatagaaagcccccatgatcatccaagtgctgaaaccctggcagagaaagaggaaaagcatttagcatcaagttcagagatatcagcagcggctgagaagcttgcagagtgtcaggaaaccatcacaaatctaagcaggcagctgcgagctctcaagagtccggcggtttcaggcaatctagacagcccaatgtccaactccagaccaagctcatatgactacaagccccagtcacttgcatgcattcttgctgaaggggaggactccagcactgaggatgccatttctcctgcaaccaaagaggtgcactccaagaaagagcctgatgctgcatcacggaaaagcgtagcacaagatggtagtgttaatgctgccctcaaagctgtcgaagaggaattaacacaaaccgttgttcatccgatcttcccagagccatcccaagagattatttctgctgatctcaagaagaagagacggagccccagcttgctgggcaggataatgttcagaaagaaagtggaaggcagctaggtcatgctgctgatctggtggatgcactgtgctggtaaaagcttgcaaaatctagtagcgctccaccactatgctgtcactggagatttcgactttgaacgaacgagcttgttctgtttgttgagcattcctgttccttagggtgcaacctttttggacacgtattctgtcacagagactgatgacttgtggtaagagactctgagcacatgatctgtatcggttttccttgacatggacaaattttctttttgtatttatggcctccatggttgtgtaaatgttaatttaataagtt

SEQ ID NO: 24530 - DNA, 2114 bp, Oryza sativa
  ref <308>: DATABASE ACCESSION NUMBER: AK099972
  ref <309>: DATABASE ENTRY DATE: 2002-08-28
gagtgtgttagaactgaactgtgaggagcttcagagactatggagcaaggtgtagctggagaaaacgtgtacaacacagagagactgcacagctacggaagtggtaaacaccagtgctagtatatgtatggattgaaggtaacgtagcatttgccttcaccacaactctgcaagtcaccagcatggctatcaagcttacaaaatatcagttcttttcttctcgtgccactgcactgcacctaaggaggagagagctgaagttgcttccattcccatcttttccctgcagctctagttcagctcctaacacttgttcacagcaaagtcatctcctgttagtttcatctgcaggacctagagaacaaacattacttccggctgattcccgttcttctctccctcatggcatcactgataacggtacaagaaaggaaggaaggaggaggaggagggggagaaagaggaaggagacagcaaaagatgaaggggagtgtgttccatctgcggaggaagtgtccattagggtaaatactctttatgagagtggcgaccccattgggaagaaggagttgggccggtgcgtggtacaatggctaaagcagggtatgcactcaatggctataaaatatgcttccacagaaatgcagaacgatggagcaacattcttactggatggtggatcatctgaagacaacctcggatttgtgatgcttgcacagccttatctatcagcaattcccatgcccaagggacaggaggcgctctgcctcaaggcctctactcactatcctaccctctttgaccactttcaaagggaactccgtgatgttctgttgaaacaacagaaccagggtcttatttctgattggcgcaccactcaatcttggatgcttctgaaagaattggctaactcagctcagcatcgagcagctgcccgcaaacctaaagctcctactacgcacagtactcttggcataagtcttgataagacaaggttgatgcagaccaaaattgaagactttgtcaagaaaatgtcagaccttctacatatagaacgagatgcggagctggagtttacacaagaagaactgaatgccacccctgtgatggatgggaactcaaagaagccactcaaaccagtagagtacttagtcactcatgggcagtcacagcaagagcagtgcgataccatttgcaatttgaatgttatcagcagttcaactgggttggatggccagcatctggtcctatttagagtgaaagataaccatagattgcctccaaccacactctctcctggggatatggtttgtatcaggacatgtgataaccggggggaaattaccacatcttgcatgcaaggctttatatataatcttggtgaggatggttgcagcattaccgtgacactgaaatcccgccgtggtgatcctacgttctccaagctttttgggaaaaatgtgcggattgacaggattcaggcattggctgacgcacttacatatgagcgaaattgtgaagcactgatgcttcttcaaaggaaaggtttacagaaaaagaattcttccattggagtagtagccactctgtttggggacaaggaagacatgatgatgatggagcagaataatctggctgattggggagaatcaacaatacatgatgatgagctattgaaaaagaacaaatatgactttgatgcctcccagttaaaagctatcacactaggcttgaacaacaaaaggcctgtcctaataatccaaggacctcctggcacgggcaagactggtttgcttagttatctcattgcatgtgctgtccgaaagggtgaacgcgttctcgtaactgctccaagcaatgcagcagttgataacatggtggagaagttgtcagatactggactggacacagtacgagttggaaatcctgctaggatatctccatctgttgcttcaaggtccttgggagagcttgtgaacagaagacttcagaagttcacagaagagttcgagaggaaaaaatccgacttgagaaaggacttgaagcattgcatacaggatgatacattagccgcaggtatacgtcaactgttgaagcagcttgggaagaacttt

SEQ ID NO: 24531 - DNA, 1059 bp, Oryza sativa
  ref <308>: DATABASE ACCESSION NUMBER: AK099973
  ref <309>: DATABASE ENTRY DATE: 2002-08-28
gatcgaccatcacctctcccacacggggcgtacgtgctaagctgcagcacaacccaaagccatatatctccgataatggcgaactcaccgacgctgacaatgctggtgttcctagctattgggctatctctcgtcctctccgcagccggcgtgtctgtggagagcgtggtcaccgaggcgttcttcaacgggatcaagaaccaggccccgaacggctgcgccggtaagagcttctacacacggcaatcgttcctgaacgccgcccgctcctactcgggcttcgccaatgaccgcaccaacgacgactccaagcgcgagatcgctgccttcttcgcgcatgtcacacacgagactggacatatgtgctacatcaatgagataaatggggcaaacatggactattgtgacaagagcaacaaacagtggccgtgccagccgggcaagaagtactacggacgcgggccgctgcagatctcatggaacttcaactacgggccggcgggaaagaacatcgggttcgacgggctaagggacccagacaaggtggcgcaggacccgacaatctctttcaagacggcgctctggttctggatgaacaacgtgcaccaggtgatgtcgcaggggtttggcgccaccatccgggccatcaacggtgcgctcgagtgcaacgggaagaaccccggtgccgtcaacgcaagggtaaactactacaaggactactgccgccagttcggcgtcagcccggggggcaacctctactgttgagttgcatgcacacgctgctcggctcatcgtgatcgactgaataatgaacagagtaataataatgaataaaacgtttggtgcgtacgtacattgcatacgtgcacggtacgtacatgctggaagctaagtgacgtcaaagagtttagtactaaaaagtgatctttctattcgatgttactctatcttagggcggagtaagtataaatgtgtaataagaaataaaatgttaggatcgcgggatcgaaagatgagtaaacatgtgtaccggtggaccacttaaataattatttctcc

SEQ ID NO: 24532 - DNA, 2633 bp, Oryza sativa
  ref <308>: DATABASE ACCESSION NUMBER: AK099974
  ref <309>: DATABASE ENTRY DATE: 2002-08-28
gagtctcgcttctcgccgccgccgccgcgcacacgcggcgcgcccaaaccctagtccctccctcgccgccgccctcgcgatgtcggccgcggccggggcggccaccctcgtcgcctcctccgcctcgctctccgtgcccgaccacctccgcctccgccgcttccgcctccacctccacccgcgcccgccgccgccgcatccccagctccggtcccgctccctccggcagcgccgccgcttcgtgctcgccgtgctgcaggaggaccggtccccctccgcgccggatgaggaggcgaggaggtacgggctcaacgggagcgccccgagcagcggggtcgggtacgacgatgccgccgtggaggcctacctcgggaccaacggcaacgggagggggaacggtgcggcggcggtggtgaagcccgccgcggagtcacggagcagcgccgccttggtgtccgcggggcctgggccgggggatgatgagaggaggaggaaggagcgggtggaggagatcggcagggaggacgcctggttcaagcagagcggcggggattccaagcccgaggtgtctgtcgctcctggaggtcgctggaatcggtttaaaacctattcgacgattcaaaggacgttggaaatatggggctttgtttttaaatttatattcagatcttggctcaataatcagaagttcacttatcgaggagggatgacggaggagaaaagggtaatgaggaggaaagttcttgccaagtggcttaaggagagtattttgagactaggtcccacatttatcaaaattgggcagcagttctccaccagagtggacattcttccacaggaatatgtcgaccagttatctgaattacaggaccaagttcctccatttccttcagagacagcggtgtcaattattgaggaagagctaggggcatctgtgaataagatttttgatcgatttgactttgaaccaatagctgctgctagcctcggccaggttcatcgggcatgcttgaatggcaaagaagttgtcatcaaagtgcaaaggcctggtctgaaggagctatttgatattgatctgaaaaacttaagggtaatagcagaataccttcagaaagtggaccctaagtcagatggtgccaagagagactgggttgctatctatgatgagtgcgcatctgttttgtatcaggaaatagactatacaaaggaagcatttaatgctgaaaaattttctgaaaacttcaaaaatatggattatgtgaaggttccagagattttgtgggagtatactacacctcaggtcttaacaatggaatacgtcccaggaatcaagataaataggataaagcagctagataagttaggagttgatcggaaaaggttaggtcggtatgctgttgagtcgtacctggagcagatcttatctcatggatttttccatgcagatccgcatccaggaaatattgctgttgatgatgtcaacggtgggaggcttatcttctacgactttggaatgatgggaagcattagtccaaatatccgggaagggttgctcgaagcattctatggagtttatgaaaaagatcctgataaagtgcttcaatcaatgattcaaatgggtgtccttgttcctactggagatatgacggctgtcagaagaacagctcaatttttccttgatagcttcgaagagcgtttagcagcacaaaggaaagaaagagagatggcgactgaggaacttggatttaagaagcaattaactaaggaggagaagtttgaaaagaagaagcaaaggcttgctgctatcggagaggatcttttgtcaattgctgctgatcaaccatttcgatttcctgccacctttacttttgtggtcagagcattctcagtactagatggtatcgggaagggccttgatcctagatttgatatcacagagattgctaaaccatatgctatggagttgcttagatttaatgaagctggagttgaagttattgtaaaagatgcgaggaagagatgggaaaggcagtcccgtgcattctacaatttatttcgccagcccgacagagttgaaaagcttgcgcaaatcattgagcgtttggagcaaggtgatctcaagcttcgcgtcagaacattggagtcagaaagagcattccaaagagttgcagctgtacagaaaacaattggatatggagttgccgcaggtagtttggtaaacctcgccaccgttctctacctcaattcaatccggttgccagcgaccatagcatactctctctgcgcgttcttcggcctacaagtccttgtcggccttttgaaggtcaagaagttggatcaacaggagagactgataaccggcactgcttgagtccgggcataaactggtgagagctgacccgtgatttttttggtgtcatccacagcggctatatatcttccccgttttttgtttctttctgtccaaattttagatcccctacacgttgtagcatagccatcggtgtacgataactgtatatgtagatgcggtgaatagatgaaaatgtacatagtgtacaatagacattcactgaggtgttaaggtgcttttgtggttgcaattcaatcttaaatctctcagatgaaatgag

SEQ ID NO: 24533 - DNA, 1281 bp, Oryza sativa
  ref <308>: DATABASE ACCESSION NUMBER: AK099975
  ref <309>: DATABASE ENTRY DATE: 2002-08-28
gattccattccactcgccaacccgacacgtctctcaccttcacgcaacgaacagcagcagcagctcaagctaagctaagctaaagtactacgtgttctttcgtcttcgtcggcgccggagtttgattcgtcggagctagctagcaagaggaagaagaaaatgttggccatattccagaagcaggtggcgcacgcgccggcggagctgaacagcccgcggagcagcgcggcgaagcccaagaaccccgacgagatcctcagggacttccacgccctccaccccatcgaggccttctccacctccttcggcggcggcgccgccctcgcctgcgtcgccggccacgcccgcaatggcctctctggctacgagaggatgttctgtgggctggatgacatctactgcgtgttcatggggaggctggacaacctgagcagcctgatccggcagtacgggctgtgcagccgctccaccaacgaggcgctgctcgtcatcgaggcctaccgcaccctccgcgaccgcggcccctaccccgccgaccaggtcgtcaaggatctctccggctccttcgccttcgtcgtcttcgacaacaagtccggcgccgtcttcgccgccctgagtacggatggggaggtgccgttgtattgggggatcgcggcggatgggtcggtggtgatctgcgacgagagggagatcgtgaagggagggtgcggcaagtcgtacgcgccgttcccggtggggtgcatgttccacagcgagggggggctcaagagcttcgagcacccgatgaaccggctgaaggcgatgccgcgggtggacagcgagggcgtcatgtgcggcgccaccttcaaggtcgacaccttcaccaagatcaactccatgccccgcgtcggcagcgccaccaactgggccgccacctgggacgacgctgccgcctgatgatggcgctccgtacgccgtcgtctcgtcgccgtgcgcctgccctcgccgccggcctcctcgccgtttgccgccgccgctcatctcttcctcctcttcttcctcctctctatatccgatgtgcttctcagtccgaagcatgcagattattagagcgatatttgcagctagcgtggaagcgcgccaatctatttttctgcggtgtttttacttaattttcacctcttctttttaaatttttatgtccatctttgggctctcgcctctcggcaatgtatattctcggtcgcgggtggcatgtcatggtacatactatgaatgatgaataagaaagagtttgcttcg

SEQ ID NO: 24534 - DNA, 3153 bp, Oryza sativa
  ref <308>: DATABASE ACCESSION NUMBER: AK099976
  ref <309>: DATABASE ENTRY DATE: 2002-08-28
gaattgccacaggcaccgtctcgtcgtctccgtggcgacagcgccgccgctgctctgtcgccggcggccagcgcaaccgccgcctcttcggctcgccggcggcgcgcggggactcgaggaaggcctctgcgtcgccgtcactactacccatagctcgaacgatggggattctcaaactatacatactagttctgatagagacaaatttgcacatgattttcacgaatttgagtagtgaccatcattcagaatgctcaatctgcacacctgagttgtggcagctagattcttgtcttcaactctgttcatagagttggaaaattaatatgccttgaagagatcttagcctttttagtaccatctgatctaatagcacaccataagcaaagaacaggccaaatgtgatgccaaagataaccttgtcaccgaattgatctgtggatgaagtagggctaggaagtgctcttgctgaattacagtggtgactgagcataccaccacatagctttggattaccagtgaagcttgagttgtcaaatgtatcaaactggcctccagttggaatagccccttccaggtcgttgttgtaaacattgaatgcagaaaggaagtttagcttgttcagttctaaagggattgtgcctgttagattgttgttagacaagtctagcatgaccagcttggtgaggttgcagattgcttgtggggtctccccagagaagctattgaagctcaagttgagcgtatcgagtgccttcagctgactaatctctggcgggatcgcacctgtaaaaccatttttggctatgtttattgttgtgtggatatattggtattgtcggtttttgatgaatggaatgccgtaaaatctcatgtttgggacacttacatccagattggttctcttgtctgacttcagcattggaatctgcgttaatattgttggaaattcacctgtaaggttgttattggatatgtctagatagaagaggaagttgaggctgttgatccaggcaggcactgatccgcttaattgattattggataactgcagcaccttcaattttgtgagctttgatagccaaagagaaatttttccatgtaaagaagaaccacttatttctaggtactgaagattttcaaaaccatccattgtttcatctgctagcaatgtctcatggttgaagttccctccaagaagtagagtttttaagttgctaaagctcttgaggatgtaaagtgccttcgtgatattcgtaaaatcattccaaccaactgacaggcaggaaagagacctcagtctgtccattctgtgtgagaactcaccatggaatttgttccacgaaagtctcagtgcaatcaaatttgtgcaatcataaatgctttctggaattgtaccattgaagttgttcacgagaagatcaattatcattagattagataggctggaaaagttgatcttgccaaggtctccactgaggtagttgatcttgaggtcgaggattttgagatttgtgcagttgcctaaagttgatggcagctccccatacaagtagttctcacccaaatggagctccttcaatctcttgagctgacctatggacttgggtatgtttccactgaatatattctgttggagatcaaggatagacaatttgctgagctttataatgttggcatcatcaagtactccatttagatcattgtttgggaaagaaaggtgctccaatgatgaagcattgaatagttcatctgggagtggacccttgaagttgttgcggccacccttgagcactctaagcatggagcagttgcctatgtctgagggtatgctgccaccaaattgattggaagagaggtcaagtaccccgaaggatggtgagttgatgcacaaagaacttggtatctgtcctataaagctgttgttgctggcattaagagccaccggattgttcatcaccttacatgtggttgttggaaatttccctgtaaataagttgcttgagatgttcagtacctgaagaggccagatagttgattgaatgaagagctcttgcaaagctccactgaagtgattgaagctaacatcaagaacgacgatgctgctcgatgacaccaacccctccaatggaagttcaccagacagcgaattgtgtgaaagattgagctgcagcaggccggtgaggctgccaagagacggtgagatctgcccttcaagggccttagaagcgagcaaaatatcagcgatcctcatgtctgcattacaggtgatgccttcccatgtgcagcaatttgtgccgttccgccatgatgcggagaggccaccgtctcctgagaggccagcaaggaactggaggaggacactcttctcctggtctatgcaggagtcggtggaagaagctaaacacagcaccgtcagcagagcaaacccaagtaaatctgtgggtaatttgctgctgattctgctgcatggaaagtggaaaggcctcatggtgggttttctttttcagattgagtatgagttggatatttactgttcattactcttatattgagtaggaatgaaagcaggaacaaatttcatctttgttgattgcagttgctagctgatcgagtggctagtcaatggtcatcacaaagaataagtggtcaaggtcatcaggaattcaggatcaaaagatgaattgagagttgaatgagagtgacaacctgcagtgcttgcttgctaccgatagtacagtcattgattgggcaggcagtaacatcatgaattgtgtcgatcacaactttattcagcagtgaaggaaatatcctggaacatatggtgtagtaagtgtgctcagccctggttgatgctggagctggaggccaggacacaggtccagcgcccgtgatcctgccttgcagagcccttggaaaattgcaggtgaaactagcatgcatgcaggtatgaggtaaccaggcttgctaagatttgctcaaatctgttgcagatatagtaggcactataatcccataaatatcaagtctctcgaaataaaatgatgatttttttaaggattttgtctttgttttcttgtacaatgcaaatcgtggcaagtactgtttatttcttcttgtgtactcatatatcgatgttgttattcagcgatc

SEQ ID NO: 24535 - DNA, 2282 bp, Oryza sativa
  ref <308>: DATABASE ACCESSION NUMBER: AK099977
  ref <309>: DATABASE ENTRY DATE: 2002-08-28
gggcggggcggggcgccgacatggacggcggcggcgggggcgatccgggcggccgggtcggagaggccaaggcggatgccacacgcgctgcgaacaagcgaagggccccatcgccagccgggggtgggggagtcgaggccaagaggaggaggaaggacgccatgggctcgtcggtctccggcagcagatctggtggcggtgggggcaggaggctgcgacatggtcgaggtagaagagctcgtgccttcagacgcaagcttgaggaggaaaataagaattcaaataatagaccccgtgcctcaaatgtggttattgcttatacgcctaacctcattcggcggtatgggactctcttgagaaacatctcatttctgcttccttatgatggtcaaggaaaggcatatgcttgtccttcggacaaaatcaatgtgtttcttaaatggagcagatgcaacttttgtctcttctttgagtgggcagaaggtgatcagatgatgatttgtcatatgttcaatacattgaaagagattcacatatcgtttcttataaatccagcattcctagatgaaagtatggaagtgaaagtaacaaatcctttactttcattttcatccaattttgttgaagatgaaacttgggctcttgtgaaggagatgctaatgatgatgttttctccagttcaagaagatgagcgtgcagcttcagatctatatgtcttcacaaagagtagagattctgtttacttcaggattttcaagatcactagtatccctgcaggcgagagtgaaaattcactggttcttgatgaggttgggctaaatttttgcctcaagcttttagatgtccacggtgcttttgttggctcagactgtgatcaagctctggatggtcttcaaagtcagacaagaaatgagttgaaattatccccagatatatattactgtgtgccaaatgataaacttggatgctgcactctccactcagttgctttgaataatcagaactatttattttttttggagaatggcttggatttatcacattttgaaggtttctgtttgactttggaagaatttctcgagaggaattcttttctgaagataaagcatattgttgggtcaaggaatgatgaggaatgtaattttgttcgaaatattgctaaggcaattattcgttccatgctgtcacaccttgttaacttgttctctttggggaaatgtttgaggatgggaacagaccttctgagaaggaggaaaattcttttaaaaggatctgatgtcaagttctttcaacttgaagtgattgcatatgaggaggatgaagcaataaataatgtgctgcaggttgttgagttggttaaaagttgttttgttggggaaatgataccggctgatctgcaaggtgatctacatgatttaaaggaaaatcctttgaagagacttgaatcagtgatagacagcagctcattaatgtcagctaaagagaagaaaggattattggtcaatttgcacactgaatataaaaccaatattagtccagctattagcgaagatgatcgtgatagtttatttaagcacatcccgtatttggactgctggatgaacagaacggaagacaatgagtatctaaagctcgttgctaatttggattcaaaaaaagtggctttgaaagttaacaaggttggaacggataagagaaaaccatctaaaaatggtatcttacagtttgattttatgaggaattccgatgttcatatacctgaaaaggcattaaaggatggtatcaccccctttcgtttgtcatggacagattatattttaacttcccgctacccaacgtacttgcgtgccattcaaaaaagtttggaaccatacatgaagtcaagaaagaagttaaaatgatgttacctcacacacaaagagggcgggctggattttcattggaacacaatgtggttgatttgatggagaaactggggttggctatacatccgctgggagtaggaccgattgattttctcatacatctgctattcatgacaacttggattggctgaatagcatttttgttgagcatgcctgaaaatctgtgcagacatctgttaatgtttttatttgtttgaactcgtggtagctttgtgcggaatcacgttttggttgaacttgcctgacaatatgtgttcagaacagccgcacagcacaggtgtagtttgctcgatgtgttcggaatatgtggtttatctcagttcgtgacagcttcgtgctaatcacgtttagttgagt

SEQ ID NO: 24536 - DNA, 4105 bp, Oryza sativa
  ref <308>: DATABASE ACCESSION NUMBER: AK099978
  ref <309>: DATABASE ENTRY DATE: 2002-08-28
gctctctctctctctcgcctccgcttcgaaacccccgacgcgaaggaagcgagacgaaaccctcgcgcgagccgcctccgccaccgccgcctccttccgaccagccgccgccgccgccgccgcgtcgccgaatccgggcgggggctaggcgcgggctccccgctccccgccgatcgaatccttcgagggagcaatggccggcgtggtgtggatgaggacgtgaggtgggagcgatggtggggatggaagggaagggggatgcatcggtgacaccagtgaggactagtgaccggctgcgtaagcggcccaagtacttcggtcgcaattatatgtactacaatccagccatacgcaagaagatgaagtctaagaagagagcggctgcatcacagattgccaagaagctgcttcgcaagtcagctgccagggcaccgcctgctgattctattgcagcaaatctacgtcgttcaacacgaaagcgaagaatgtctgtaaatctggaggactatgacaccgatagttctagtatggaagatgatgatcttatgaggcccagatatcgatcttcaaagaataaagtggatgacgaagtgtcagctaggccaaagcgcaagaagctgtccaactctagctccattcctcgccgtgagggtttacggcctagaagatctatccgaggacaaagacttcatccataccaagaatctgaggatgaccaggaaagctctgaagaacagcctgcacaagataggagggaaaatggtaatgatatcgaagaggatggcaatgaggaggaagttgatggaggtgatgaagctgaagcggatggagatgatgaagatggtgaggaagaacaagaagggaggaggagatatgatctcagggatcgttcagaagttcgtagaccctccccacggaaggaagggaagcacagaacacaatcaccccgtagagtactagtacatggaattggtccaaagaacagcaaatatttgaaaaagggtggttcacgcatgcataagcgccctcgattctcattgccagatgattcagatgattctcttcttgtggatgagccagatgaaggtccatccatgccatggatgcgtggtgggagaggaggtatgccgtggtttttaggtggattggatatgcattgtccaggagcatggggtctgaatgttggagcatccggttggggtcatcagggtgacaacacagtgagtacttcttcacttatgccagggatccaaactgctggaccaagttccaagggaggagctgatattcagcctctccaggttgacgggagtgtgagttttaatgatataggggggctgtccgattacattgatgcattgaaggaaatggttttcttccctttgctttatccagatttttttgcaaactatcacattactcctcctaggggtgttcttctctgtggccctcctggtacagggaagacattgattgctcgtgccttagcgtgtgctgcctctaaagctggtcagaaggttagcttttatatgagaaaaggagctgatgttcttagtaagtgggttggagaggctgaaaggcagctcaagctactgtttgaggaagctcagaagaatcagccatcaatcatattttttgacgaaatagatggtttggcacctgtgaggtctagcaagcaagagcagattcacaattcaattgtttctacattgcttgctttgatggatggtctggattcacgtggacaagttgttttgattggagcaacaaaccgaattgatgccattgatggagcattgcgtaggcctggccgatttgatcgtgagttcttttttcctctacctggttatgaggcaagggctgaaatactggacattcatacacggaaatggaaggaccctccaccaaaggaattaaagacggagcttgctgcaagctgtgtggggtattgtggagctgatttgaaagccttatgtacagaagctgctattcgagcatttagggagaagtatcctcaggtctacacgagtgacgataagtttgtcattgatgttgattcagtcagggttgagaagtaccacttcttggaagctatgtctacaataactccagctgcacatagggggtcgattgtgcattcaaggccgctgtcaccagttatcgctccttgtctaaaaaggcatcatgaaaaaataatggaaagaattgctgatattttccctttcctatcatcagtagatgttagcaagttctctgccctttcctatggatcatccatccctcttgtttatagacctcgacttttgatgtgcggtggtgtgagtgttggactggatcatgttgggccagctgttttgcacgaacttgagaaattttctgttcactccttggggttgccgtctcttctgtctgatccaagtgcaaagacacctgaagaagctcttgtgcacatttttggggaagctaggagaacaaccccgtcaatactgtacttgcctcagtttcatctttggtgggatacggcacatgaacagcttagggctgtgctattgactttgttgaatgagctgccatccaaccttccagttttgttgctaggaacctcgtcagtggccttcggtgaccttgaagaagagtgtgcttccatattttcttctcgtaatgtatatgaagtggatcaaccaagtgatgatgatagaatgagatacctgcatgcactgtttgagtcattgctctcatttcaaatggaagagtctaggagtaagtctaaagaccagaagtcttctgttgatcttcccaaagcaccaaaggaagtggatggtcccaaactttcagagctaaaagcgaaggcagaagccgaacaacatgctgttcgacggatgagaatgtgtcttcgagatatttgtaaccgcattctgtacaacaaaaggttcaatgtgtttcacttcccagtatccgaagaggaggtacctgactatagatctgtagttcacaatcctatggatatggctactgtcttacagcaggtggactctgggcagtaccttactcgggcctcatttatgtaggacattgatcttatagtctcaaatgcaaagacatataatgggagtgactacaatggatctcgtattgtcagtagagcatgtgaactacgagatgtggtgcaaggaatgttgtcacagatggacccatctttggtgtccttttgtgataaaattgctgaacaggggggaccactacaggttacggatgatggagatagctctattcttcaagcagcgcctgttgctcagctggtatctggtactaggatgagcgcaaggcttcgtaatgtacaaccagaagtaaatctatcacgaagttatgaggcgttgaagcggcaaaagaaaagcaccgaaactgaacaaggcatggttaaagaatcgacaacaagagatgacaagtctcttggtgatgttgatttgtcaaagccaatctccccagaagaagctccaaaagaaccagattcaaatggtgttctgaaagaaactgacaatccaccaactgaattaccagaattaccggaactaaatcctgaacccatggtgactgacaacggtgaaaacgcggccatgcctgctagcgacgacatacctgaacaactggaagtcgtgaagcgacgcttcatggaactcaccacaggctatggcgtgccacagctcgaaaggctttgcacccgggtaatgaaaggcatgatagaattgagcggtaaagaaagcaacgaggatcataggcggttagtcgttaggtatttgttgacatttgttgagaacagcgacaatttttaactcggaacggtaataagatattaagattcttgttccccaatgtacattctctttgccacaaagaatagtagtggaacgccccctatgagagtcaccaccctgcttccatgatgtaagaaagtaacaaactaccagatgctcagtgtgtcagtgacacagttttgccatggatgtttgtagccagccttgtagattaaatcctgatcaatttcagcatcttgtaatgtgatggatgatgtacctctctttgcacaaatatattagcaaggtttctc

SEQ ID NO: 24537 - DNA, 2063 bp, Oryza sativa
  ref <308>: DATABASE ACCESSION NUMBER: AK099979
  ref <309>: DATABASE ENTRY DATE: 2002-08-28
ggcttggccgctctctctcacttcgcgcgcgcgcgcgaacccgcacctatcgccgcccatgccctcgcgctcgcggctctgatccggtcgccatgcagcagcgctcgcccgacggccgcgtcggcctcggcctcggcctcctcggtggcggcggcggcgggcgtgggcggggtggagccggccgtgacgctcgaccaggtgccgcggtggagcgacgccgaccagcgcctctccccctcctcatcccccaccgccgccggatccgacgagacccccgcctcgtcgttcctctcgttcgccgacccgctcatcggcgacggcgcggccgctggggccgggggccgtggcgcgtcgcggttccccgtcgaccacgagatcaactcgaagatctgtctctggcgcggccacccgtggaaccttgaggtcgatgccgttgtcaattcgacaaatgagaacttggacgaggcgcatagtagtccagggctgcatgcagcggctgggccagggctcgccgaggagtgcaccaccctgggtggttgccggactgggatggctaagatgaccaatgcatatgatctgcctgctcggaaggtaattcatactgtgggccctaaatatgctgtcaagtatcacacagctgcagagaatgcacttagccactgctacaggtcttgtttggaacttctcattgagaatggtctgggaagcattgcaatgggttgcatatatacagaagccaaaaattaccctcgtgaaccggctgctcatgttgcaataagaactgttagacgttttctggagaagcagaaaggcaaaataactgctgttgtcttttgtactactacatcatctgatacagagatatataagcgattgcttcccctatatttccctcgggacaagaaagaggaagagattgcttcattgaaacttccagctgatgttggggatgagaatggtggaacaataatagatgaacggaaaatacgaataaaacctttgcctgctgggtctgctattaacaaatctgcagctcctgcgccagtagatattcctctttctgattctggattgacacgtagtaggaattctttcaagttagattcatatttggatcctgcctttatgtcactaattaaagatccagatctccgacgcaaggagcagttggaaaagtctgttcaggcaaacaagggatttaattgggctaaattggttggatttggcgaccttggtggtcctccattatctgctgctgaagattattcacttcattcatgacaccttgctaaagcaaattctctcagtctctcagagattgctgagatgaaaataatttaccgcggtggagttgatagtgaagggcgtcctgttatggtggttgttggtgctcactttctacttcgctgtttggatcttgagcgatttattctatatgtagtaaaggagtttgaaccattgattcaaaagccttactcaattgtctatttccactcagcagcatctttacaagtgcgaccagatttaggattcatgaagcggttgcaacaaatattaggtcggaagcatcagcgcaatcttcatgctatatatgtacttcacccaactttgggattgagaacagctatattggctttgcagcttttcgttgatggggaggtctggaagaaagttatctatgtcgacagacttgtgcagctgttcagatacgtaccacgtgaacaactgacaattcctgattttgtcttccagcatgatctcgaagtgaatggtggaaagggcataataattgaccctagaacaaagcatgtctaccaaagaccatcaggttgataaatatagcctgctatatgcagagatcctccaataccacactgtacaatctctttgccctctatagaagattttccttcttgatctgtgcattttgtatctagttgagttggcagtgttttgtagccttctagtcttttctttctgttctgtcagggaagcgtagattattatgtatatgtatcgctctatataataataaaaaatgctgtggccgtctcaaattctcc

SEQ ID NO: 24538 - DNA, 4559 bp, Oryza sativa
  ref <308>: DATABASE ACCESSION NUMBER: AK099980
  ref <309>: DATABASE ENTRY DATE: 2002-08-28
gaatttacaggaattggctggtgtttatgtttataatgttacagagagagaaccacttgataggcctgatgcaagattgattaaggaattttcttgtatagaagattcttttatgagtaatattggaagtcggtacggaataacttctggatctcgagagaataccttgtacaatgctctttgggttgcacaggcattgctgcgtaaaggatctgtgaagactgtgagtaagcggattgttatattcaccaacgaagatgatccttttggtggtcttacaggagcagtaaagactgatatgataaggacaacaatccaacgtgcaagagatgcacaagatcttggcctgtccattgaacttcttcctttgagtaggcccgatgaggagttcaacatgtccctgttttatgcagatttaattggtctggagggagatgaaatagtggattatctgccatcttctggtgaaaatattgtcttctttgaaggctggaggatatgactaatcagctgaaaaaacgaatgatgaagaaacgcaaagtcaaaactcttgcatttgcaattaccaatgatgtttgcatagaggtgaatacatatgcgctaatccgttcaactactccaggggcaattacatggcttgattctatcagcaacctgccattgaaggctgaaaggtctttcatatgcaatgacactggggcccttattcaggatccacaaaagcgcttccaggtgtacaatgacaaaattgttaaattctctactcgtgaattgtctgatgtgaagagggtttcaagtcatcatctacgccttttaggattcaagccactggactaccttaaagattatcacaacttaagaccgtcaacatttatttaccccagtgatgagcaaatatttggaagcactcgtgttttcgttgctttacatagctcaatgcggcgtcttggaaggtttgcacttgcattttacgggaatccaactcgcccacaacttgtagcccttattgcacaagaagaggttacttctgctggtggtcaaattgaaccacctggaatacacatgatctatcttccatactcggatgatgttagatatcctgaggaggttcatctgacttctgatgatgcacctcgtgccacagatgaacaaattaagaaagcttcaaatctattgagacgtattgatttgaagaacttctcagtatgccaattttctaacccagcattgcaaagacactatgggatcttggaggccttagctttaggtgaagatgagatgccagatgtcaaggatgaaacccttcctgatgaagagggcttggctaggccagtagtagttaaagctgtcgaggaatttaaggcttcagtctatggtgaaaattatgatcaagaggaagccgaggcagcagcagcgaaggctggggcttcaaagaagaggaaagcacttactgatgcagctgcagagaaaagtgcagcacataattgggcagaacttgcggatactggaaagctgaaggacatgacggtggtggacttgaattcttacctgagtgcacatggcctcccagtttctggaaagaaagaggcactcgtcagcagaatcttgactcatctaggcaagtgaaatggtccacttcgacggcctactcagttttagctaactctgtaagctatctaaatttctctgaacatcttgaagtgcctatcaaaaaccctctccctgcttaggctgtgccaaattttgtagcaatatgacaacagctgaccccagttcatttggtatcatgtgcttttgtgacatgtaccactgggatttctcttaaatgtcactccagtctgcagagatcaggtcattgttggtagaggaaagtgatccattagagaaagcaacaccaaacaagattattaagacattttttaagtgaagcagttgcaaccataatattcattttgagagaaataggtatgaaactaggaaggatcaaaggaccaaaagtgagagaaagcaagaagattggtacatgaattcacatcaatctgacgtctatttgttgtttttgccagcaaagcatatgcattaccagcaagatctcatataaacataaataaaatataaataactcttaaccttcacatagcaaatatttctatgtatgtacagacaaataatctggaaaaacaaattgcccactttacgcattctactactcctaccaagttcacctaagaaagtcttgtcaaatcaaatcaacaaattttataaccacagacaacttgagcaccgaagcttcagtttgtcagtcaccaaatggctaaacaaataaacaatgatattataacataaaaaaattgtcaaagccggtgcagtaatatttattgcagcctgcatagcgcacccaacaagaagaaagagttcttgtcgaggaaataattaatttaatcaataagatctcaaggaagatgttactactaggcaataggcatggtgagattttccttgttcaatgttcgtggttttacttttaggttagaatagtagatgcctttccgtcgtccaatgcacgtgcacgaagtcagattattctcaccttattccctttccacttcattttattttttacttgaactgggctccttacaagtgctggtctgttttagatttatcctaacttaaaacttctttttaaagtctgattaagtttataaaaaatgtgacatcatccacaataccaaattatttaatggaactaattttgtgttgtagatgctgcagtattttttaaatataaatttgatcaaatgtattaaagtttgtcttgactgagaacaaacataaaactgagatagtttctaagcaagggcataatgatctttgcactagaccatgtaatactatcttacgttaaaaaagaaattaacttgacaactttgaacgtaactgttttttataaatcccaaaagaagttacacaagaataatattacgtctgcttttgttatgacatactacttggttgcatcgtttttatatgtacaaacctatactgtaaacaataatcatggtcaaatttaacttgtatttacagtacaaatgctaacacagcattcttctgtacatgaattggtcataacaccaaccctagcaatctgcttttcgaagggattgacgaattcttatgagaaatccaacaccaaaatccctacttttgtactaaaaaaaagagatcatccagaacatgcagttgctgtagttgtttagctacacaatcattgaacatatgcagaagagtccagaccaacaaaaagtgtgaaattaggcaccgaaacttgcatttctgcaatgtaatgcctccaagatgccaacctgccatacagagaacctcactgcgtcctattcccccaaaccagtgttctctttgctacagggccatgattattgtgagaaaaattcaattatttcagtcagaatggaaagcatgcatatgcctttccaatcctaccacccatggtagtaggttcagctttgatgcttatctgaaaactatacaagccaaccattgcacaaagttgctcttaattgcctaatcattcagatcagtggacctctgtaactctcactaagtcattttcaattcttttcttttctcaaattaaaacctttaatgaaaccataattattggtctctgatgtagctgtgttagaggtgcattcagacttgtgcaaattgcaaatattgcattacttacatggtatacatagtttacatgattaaagtagaattatttgtataacacatgataagacatatgtcaacatctaaggaatgagagagaggatattgaccagatggggacttgagaggacaggtgagcaatacgtgtacatatattatatatataaattttataacttattttggtgcaaataatgcatgcaaattgctgtatccgtgtgtgttcatgcattgcattggaccatacaagatcaccgacttgtcaccataaagtatccttggatggagacccctttctcctctacttctagatgccccatgaatgatggtaagctggcaaatctcatggtatgggccatttcaatcatttatcagaatctagcacataaaacaagtaaattaaacattttgaactaatttgcagggacgattaaaaaacaaacgatgcaataataatcttcgcttcctcaaagaataattcctaggttgatcaatacttgatcaaagttgcccacattaaaacaaaaggataaataaattagtatatccctttgtgcatcatggagctcccaattgaaaatgttatgaaagcagcaatggatgcctccctgcaatagctggcaatgtgcaagtttgcatgttcatgtgttagatctattgtgtaccagagcttgacatggatgtccttatcagagacagactcacaactccaaacttggacttgtgttttgtagctttggacaccactatagtctcaatgcctttttttcctgcctaatcaaacacaaagaattaaacactgatcaccaacttgttatctttct

SEQ ID NO: 24539 - DNA, 2859 bp, Oryza sativa
  ref <308>: DATABASE ACCESSION NUMBER: AK099981
  ref <309>: DATABASE ENTRY DATE: 2002-08-28
gaccgtgcaccatgctcccctccggcctcgcagtcgctccgcctcccataagcctccacgccgccgcctcccgcacgggccgacagcggtatgcacccgtcgaccggcgtgcttcgatgggccggagcaatccgccgcggcccacccgcgccgcgtggtggcggacccgacgccgcgaaggcgtccctcccctcccctccccgccgactggtacgacaccgccgcagtcatcgtcgccggcggccggagcagctaggttcggtggtagagagaggaggaagggagagaagaggggaaagagcctgaggaggaggaggcctcggtaggcatccctaacgccaaagggggaggaggcgacgaggccttccgccaagtgaagtcatccgaggagccatccgccgcccggaaaagtccggtggcgaagaagccgagccggccgcatggggggagtggggggccccaaccggcgtgttccccgccgacatctccccgcccgcggccgcgaatcatgttgctctctccctgtcacttcacaacacgcggaggcagcagcggccggtggtgcggggctgcgggcttcgtctcggcgggacggacggcagcggctgggtagcgtcgcgagcttggaccccccggcggcggcggcgtggggagggcggtgagatcgagtcctgcgacgtcggggtcgggctgtggctgggaaagtgcgacgagaacgagcacgcccggtggcggttactggaggagcacgtcgaggtcgggcccttggcggcggcaaggtcaagccttggcttcctgtaatcaaaggtgcctcattgtacttgataatgtgtggactgtatcaacatggaatgttgttagacatgctttacaagaggattgctgtagtagaatagtagtaacaacagaaattaacgatgtggctcaggcatggagtttttacaagtctcaacataatgcatctcacgtgatcaagaagcatattttgaagatggaaccgcttaatgacgatttctcaagagatttacttgttagtagagtttttggtgataaagacaaatgtcctgaagaactcaatgaagtttcatatgagatagcacgaaaatgtggcggtttgccactagcaactatcgctgcagccagtcttttattgagtcggccagacaaaccagatgaatggatctatgtacagaagtcgttgattccagatttgaggatacaacctacttccgaaggaatggcacaactactgaacaatagcttcaacaatcttcctcatcatttgaaagcatgcatgctgtatctgagtatatataaagaggatcacataatcaatccggacgatctggttaagcaatgggtagctgaagattttgtaagtgcgacggaagggaaaagtttggatgaagctgcaaggaatcatttttatgagcttgtccataggggaatacttgaaaccgaacatatcagctgtagtgatgaggttgtatcttgcacagtgcatgacatggttcttaactttatcaaacgcaaggcaatggaagagaattttgtcactgcaattgatcattctcagtctggtataagactagcagacaaagttcgacgactctctctccatttcggatattcaaaagatgcaaaggcaccagcatgtattagattgtcacaactacgatcacttgtgttttctggattttggaagtgcgggccttccatttcggagtttcatcttcttcgagttctattccttcatggtaaacatggcgaatttcttgacctcactagaattcgtgaactgtttctactgacttatttgcagattgaaggtaatgtttgcatagacttaccatcagagctccaaggactgaagtatctcaggactctgcatattggtgcaatggtgacctttttgagatcagaagttgttcatcttccgccgttgctgcacttcagacttccacccaatctagggtactttgttgacgcagggagtgtacagagtattgaagaactgaccaatttgcaggatcttcaactcgcatgtcctcagatagccacttctgaccatattaagcacaacatgaaactgttgggttcaattattgggatacttaagagcctcaaatctctaacagttgttcctgtctgcttctctgaagattctaatgataacgaaaattcaagcattgccattttcttggatttcttagataaagttccccccccttgtagccttctgcagaggcttgagttgtttccacgtgtttgcgtcttccatagacttcccagttggatcataactattgagaaactctgtattttgaaagtagcagtcatggaactcctgaggaaagacattgagactctctcaatgctgaatgccctcactgttttctcactgtatgtccggacaacccctgcagaacctatcatatttgacaagtcaggattccatgttttgaagtacttcaaattcaagtgtagtactgtatcaagtctgagatttgatgaaggagctatgcccaacctccaaaggttaaagatggaattcaatggtagcacagtggagcaatacaaccttgaaaatgtgggcttcaagcacttgtcaggtgtcaaggtcagcgcaaaaatttgcattgccggtactagtgaagctaacagaatggctatagcctctgtactgaacaatgccatcaggcaaaatacaagaatatcaagtgtaatcatacggttcatcaacagggttataaaaggtacgaatttacataccctactgtaacaataaacatgccctcttttctgtgtttatttgcgcaagatacactccttgccttaacattggaatttggacgagat

SEQ ID NO: 24540 - DNA, 2838 bp, Oryza sativa
  ref <308>: DATABASE ACCESSION NUMBER: AK099982
  ref <309>: DATABASE ENTRY DATE: 2002-08-28
gcccttttccacttcctcctcccccactcccccccctcctccacacaagcacggagacctcccgcctcggcggaggaggagcagcagccgccgcaggcgctcgcggtcggggtcggggaggagggagaatctcgcgctgtctcccgattcattccggggggttgtgtggttttgagttcttggaccgggaaaagggggcgttcttggattgatcagtggaggaggtgggaggaggggggttggggagagagaggagaggaggcggcggggatggggagctgcggcgcgggagcggcggacagcgagtggcccgacggcgtgacggggcgggacgcggaggtcggggcgctcgtgtgggtgcgccgccgcaacggatcctggtggcccggccaggtcctcagcgccgacgagctcccggagaactgcgtcgtcccgccgcgctcctccggcacgcccatcaagctcctcggccgccccgacggcagcattgactggtataatcttgagaagtctaagcgtgtgaagccatttcgatgtggagagtatgaggaatgtatagaaaaagcaaaggctcaagctcgccagcataagagggcctacaatgaaggaaagtatgtccgcagggaagatgctatcatgcatgctcttgaacttgaaagggctcgctttccaaatgaagatgatactgatgaacatgatactagtggcctattatttgaatcccaaaacagctattgtgcaaagtccaaaaacataaatgagctcaataaaaaaatcgtctcgcactgcaagggatctgtatgatattgaagaggagtcagctaaaggtttgtctcaggccttaacattatataaacagccacagaatgtgtcctcttcaagcactaggtatgcttcatcatcaaggaagaaacataaggcatcaaatgattttgaggatgacacagttcaaggatcccaacgtatgagagaccttacggagattggatcaaagaaacacagttcatacgtcctaaatgggcaccgggatctaccacttcttgagagtgcaagctttggttatagcttgtctggtaccaatgggataaaaggtgatccgcagtctcattcggcaacgaaaaggaagcgttccaatattggccaagcttatgaaaattcaaggaagaaagacagacgtcgccctttatcgaagttatgtaaagattcagctgtggcagttccagcatatagccactgggatccttcagggcattcttctgcccagtactcaggaggcaaaatgtccaatgcatttgaaccaagtagggggaaatttggtttcccattggatgtaaataattattcatacagctcagggacctcaagtgtggaaactttattagatgcatcatgcgcaaatcatgatggtgttgccaaggtaattccagtaaaggaagcggaggtctcatgcatgcctgggtttctcaataatgactgctctgatggcgatgaatattttgataccccccttgttatggaggaagatgccctcgaagaagatcatctgcataaatatgaatcatgtgcatcagtcaagggccagatctcaaaacccaggaagcaaactgctgaatatactgaactggtcataccttcacctcatggtcacagaagttctaagaagaaaagcatgagctttgttagtcaaagaacacaagaaaaccacaaggataggactttgttggcacaacatggaagaacagtaaaagggcaagcattagacactgatgctgttgaggtggatgccagggtgagcagtgctttctgtaagccccctgcacttaagaacaatatgcaacttgcaatagttcctgctgatggttgtgccagtactttggagcaacagtattatggaagtggacctgagcatgatgaatcatctgaaactataagcaaccgctcacaatcagaaaagggcgcaccatcttccccgtattatgagccacttcaagtgataccacctgaacagaaatctggtctagaaccttccagtccccatgtggtaaagccaatcaagaatgcacggacagactataaggtatatgatgtagaattggctgctcaaggaagctacaagggccatcgtgtgcctcttgtttctctcatgagtaaatggaatggtaagcccattgtcggttaccctataactgtggaggttttaaaagatagtagttctgcggcgagccgaaatgatctgcgcccagcaactagcagtcttaacaacttgctaaagaggagcgaacctgcggaaccaaggcaagcaagatcgtcacattcatcgagacctgcatcaagaccaaagcccagcggtaagaaaaagatctcagagcatgatacggacaagtcacggcggccacacacaaagaaatcagcaacttcaccgaggaaaatgcgtaggctctcatctttcgccagcagtcgtagagatggtgcaagcaggaagcccgtagttggcaagattagtgggcctacaatcgcgtgcatccagctccgacttgttttcagtaggatcaacgaagctttaagttttccagtgagatcagagaaccctacatgaggtgtgggctgccaagcctgcgcttggagatagcctgtgaacagagagacatattgctagttttgcatgtacattagcagccttataatttttataaaaaaaatattaatgcctgccatgttcatatcagctatgtgcttgtaaccgtgtaattgcgattatccgccttggtttcagttgaagcatcccacagtgggaggaaaataagcaccttgaatatactgattgcatccgatcgtggt

SEQ ID NO: 24541 - DNA, 1323 bp, Oryza sativa
  ref <308>: DATABASE ACCESSION NUMBER: AK099983
  ref <309>: DATABASE ENTRY DATE: 2002-08-28
gtctggtctcggtggaatcgcagcggcctgcagatctctcttctccgactcaatcattcgccctgcgctgcacaaggtgagaggaaggaagggaaaaccaattggatctctcaattaatcggggtgtgggagcaagccgcttcaacgcaattacgcaacgccggaggtagtcaggcatgattcatgcaatacactgactgaaaaaataatatggcttcaaaagccattaaaaggaagccttacactgctgatattgatagaagcgaaaaacagatggagacgatcataccagattctgtaagagaacctcttctaggaaacagaactcatgaaagcaaatccgagagacatgagcctaatatgcagccaaatttatgggatggaaaaggacaagagcgccttggttggatgcatattatatcgacttttattgctcaatctgtaagaaagataggaaatgcgctctctcagtttggaccattgctagcaaagttctttagtaggtcttgtgcttcccatggttcacatgatgaacaggcagttctacttgatctcagtccactacaggaagagagactgaggttcttgagacaaagattaaatgtgccatttgacagttcctctgtcaagcatcaggatgctctgaaagaactttggagattagcttatcccagccgacaacttcctcctctgaaatcagatctatggaaggagatgggctggcagaattctgatccagcaactgattttagagcaggggggttcatgtccttggaaaatttaatatattttgctagaaattacccagattcctttcacagtttattacacaaggcggatggtaagagatctgaatgggaatatccctttgcagtagctggcgtgaacatatcttatatgttagtgcaaatgttggatctgcaatcaggaaaaatgggcacaaaagtcagttctcaatttgttcaactacttagagaagacgagatggcttttgataaccttttctgtatggcctttcagatgcttgacgctcagtggctcacaaggcaagctagttatatggaattcaatgaggttctaaagtccatgcgtattcagttagaacaagaacttactatcggaagcatttcttgtgttcaggagatgccatcatttaggttgctaaaaaggtagccatgtttgttgtttacagaaaggagtgtatcttacttgtcagtaggatcttgtgcatacttccgattctttcattggttgtacaacatgacacactgtaagattatttatcatagaataataaacccagtatatatctggtactttggt

SEQ ID NO: 24542 - DNA, 1114 bp, Oryza sativa
  ref <308>: DATABASE ACCESSION NUMBER: AK099984
  ref <309>: DATABASE ENTRY DATE: 2002-08-28
ggcccggaaaatttccccaatccgacgccctcctcctcctcccccctcccccctgctggatctcctccactccccatggtagcctcccccgccccgcgctgctgacccctgggccccaccgccgcttccgccgccgctcccgtttcccccggctctcgctctcgcgcgagccgtagccattgctggggaggaggaggaggggaaagctcgaggtatttggatgcgcgcgagccgatggcgacgccggccgccgagaagcccgacggggtggagatccgcgaggtgtgggaggacaacctcgaggccgagttcgcggtgattcgggagatcgttgacgacttcccgtacgtcgcgatggacacggagttcccgggcgtcgtctgcaggccgctcgggacgttcaagtccaacgccgatttcaactacgcaacgctcaaagccaacgtcgacatgctgaagcttatccagcttggtttaaccttctcgaatgagcatggtgggctcccgtcgcttggccccgagggtcgaccttgtgtttggcagttcaactttcgtggcttcgatccccggaccgacgtcgctgctgcagattccattgacttgctccggcgcagcggtattgacttcacccgtcactcggctgacggcgctgatgctcgccgcttcgctgagcttctcatgtcgtcgggcgttgtgatgaactctgaggttcgctgggttacgttccatagcggatacgactttggctacttgctcaagttgctcaccggcacatacctgccagacacgataaccggattcttcgacctcatcaggatatatttccccgtcgtgtatgacatcaagcacttgatgcggttctgcaacagcctccatggtgggctgaacaagcttgccgagctgcttgatgttgagcgcgttggaatttgtcatcaggctggttccgactcgctgttgaccgcgctgtcattcaaaaagctcaaggaagcatacttcaatgggttaaccgagaagtatgccggtgtgttgtatggtcttggcacagaaggtggggagacctcctctgctgctcactaagtaatggatagttaaataaaggatgaactatgtttgc

SEQ ID NO: 24543 - DNA, 1889 bp, Oryza sativa
  ref <308>: DATABASE ACCESSION NUMBER: AK099985
  ref <309>: DATABASE ENTRY DATE: 2002-08-28
gagagtggtgaagcgttggaagggatgctgatgtcgcggcggctcgtgcccgccgccgccgcggcgaggatggcgtcgtcgtcgtcgtcggcggcggcggcggcggtgtctggtggtgcggaaggtggaggtggggaggggaggggaggggacacgctggggaggaggctgctgaagctgatctacccgaagcggagcgcggcggtggtgctgcgccggtgggcggaggaggggcgcaccgtgcagaagtaccagctcaaccgcgtcgtccgcgagctccgcaagtaccgccgcttcaagcacgccctcgagatatgcgagtggatgaggacgcagccggagatgaggctgcttcccggggaccacgccgtgcacctcgacctcgtggccaaggtccgggggctccccagcgccgagaagttcttcgaggacatgccggagcgcgccaaggggccgtccacctgcaacgcgctgctccacgcctacgtgcagcacggccggcgtgacaaggcggaggcaatgctggaggagatggccaaggctgggtacctcacctgcgcgctgccgttcaaccacatgatgtcgctctacatgtcgagcggcgagcttgagaaggtcccggagatgatcaaggagctcaggaggtacaccatccctgacctggtcacctacaacatatggctgacatactgctcgaagaagaacagcgtgaaagccgcggagaaggtctacgatctgatgaaggatgagagggtggttcctgactggatgacattcagcttgctgggaagcatttacatcaatgccgggcttcatgtcaaaggccgggacgcgctggtggagatggagaagagggcctctcggaaggagagagccgcgtactcctcattgctcaccctgtatgcaagcttgtcggatagaggtaacttggacagggtgtggaggaagatgagagaaaccttcagaaagttcagtgacaccgagtacaagtgcatgctcacttcgctcacaaggtttggcgatatcgcagaagcagagagcttttacagcgaatgggagtccgcctcaggaacacgcgattcgaggatcccgaacacgatcctcgcattttacatcaagaacggcatgatggaaaaggctgagggtttcctcgatcacattgtgcagaagggtgtcaagccaagctatagcacttgggaactgtttgtctggggctatctcagcgatggcagaatggacaaagttcttgagtgcctgaagaaagccctgtcatgtctggagaaatgggatccaaaccctcaactcgcgacggcgatatactctcagattgaggagaaaggcgacatcgaagctgcagagaagctcctggtcatgttcagagaagcaggatatgtcacgaccgagatctataactcggtcttgcgcacttatgcgaaggctgagctgatgccgctgatagttgatgaacgcatggatcaggataaggtctcaatggacgatgaaacaaggagtttgctgagattgacaagcaaatacccgattggtgaagtttcgacattgatgtcttgagatgttgcaagttcgggcaatgaattttcagtcctacaggatgcaatgtgctgttaattgatttccaatcacaagttattgctcccctgtatttgcagttttgaactcgaaagcaaagtagcgaggatagactgatacaaggttagtgggctggaatttgtgaatattagcaagttcggtcatgagtctgtataagcactacctgctcccttgccttctgactatctggcgcggctagatagcacaattcgcaacaagttactgctctttgtttttgaaaacagatacagataacaaatcgtgcgtaaatttgcattgtg

SEQ ID NO: 24544 - DNA, 1964 bp, Oryza sativa
  ref <308>: DATABASE ACCESSION NUMBER: AK099986
  ref <309>: DATABASE ENTRY DATE: 2002-08-28
gacctgtcattcactcacccacccaccccccacaatatcttcccctcctcctcacccacgcccacgcgacctcgtcgaacaccttgtcgccgtcgccgtcgccgtcgcctcaccggcgccccaccaacccccaaccccccgcgcgggcggcggcggcgcctatgaccggagcctgcgaggcggcgccggcgcggcggcgggggctgacggtgctccccctcgtcgcgctcatcttctacgacgtgtcggggggccccttcggcatcgaggactcggtccgcgccggcggcggcgcgctcctcccgatcctggggttcctcgtcctccccgtgctctggtccctccccgaggcgctcgtcaccgccgagctcgcctccgcgttccccaccaacgccggctacgtcgcctgggtctccgccgcgttcggccccgccgcggcgttcctcgtcgggttctccaagtgggcgtcggggacgctcgacaaggcgctctacccggtgctcttcctcgactacctccgctccggcggggggctcgtgctctccccgccggcccgctccctcgccgtgctcgcgctcaccgccgcgctcacctacctcaacttccgggggctccacctcgtcggcctctccgcgctggcgctcaccgcgttctcgctctccccgttcgtcgcgctcgccgtgctcgccgcccccaagatccgcccgtcgcggtggctcgccgtgaacgtggccgccgttgagccgcgcgcctacttcaactccatgttctggaacctcaactactgggacaaggcgagcacgcttgccggcgaggtggaggagccgaggaagacgttcccgaaggcggtgttcggcgcggtggggctcgtcgtgggcgcgtacctcatcccgctcctcgccgggacgggcgcgctgccgtcggagacggcgggggagtggacggacgggttcttctccgtggtcggcgaccggatcggcgggccgtggctgcgcgtgtggatccaggccgccgcggccatgtccaacatggggctcttcgaggccgagatgagcggcgactcgttccagctcctcggcatggcggagatgggcatgatcccggcgatcttcgcgcgcaggtcgcgccacggcacgccgacgtacagcatcctctgctcggccaccggcgtcgtcatcctctccttcatgagcttccaggagatcgtcgagttcctcaacttcctctacggcctcgggatgctcgccgtgttcgccgccttcgtcaagctccgcgtcaaggaccccgacctcccccgcccgtaccggatccccgtcggcgccgcgggcgccgccgccatgtgcgtcccgcccgtcgtcctcatcaccaccgtcatgtgcctcgcctccgccaggacgctcgtcgtcagcgccgccgtggccgtcgccggcgtcgccatgtactacggcgtcgagcacatgaaggccaccggctgcgtcgagttcttgacgccggtgccgcctgacagcctccgtggatcatcatcatcatcatcctcatcggcagcgtccgacaacggcggcgacgacgacgtcgaggacgtctgcgccctcctcctcgccgccggcgagcacgccggagaaggcgtcagtgtcagcaaggagaattattagtgtacagtgattggaatttattacagtggcttctcttcagtttgagtaaatatctacagaaaatgcagaagaatacagtttagttttctgaactcctgatgagcttttgtcaggaaaaaaaaactgttgtcttatgtgatctgaatcctgaaaacatgggagcaaatcttgcacatgtcaaagattaatttgcccccaaagtgataaatacagtttagtttattaagtacagagatattcctgtttgtgtgatgcagaattgcagagtagcagatcaatcagaaatgaattgagagacatgggttttgttgc

SEQ ID NO: 24545 - DNA, 1592 bp, Oryza sativa
  ref <308>: DATABASE ACCESSION NUMBER: AK099987
  ref <309>: DATABASE ENTRY DATE: 2002-08-28
gcccgcgaagtggaagacgacgaagcgggcggcaccgcaccgcaccgaggaggaggaggaagcgcggcgaagctttcggtgggatagctgcgtcgcgtcgccatcgaggagcagctatggtggtggcgagctagctcaaggtacgcacgcgcggtggaggaggaggaggaggaggaggaaggagaagaggggaggaggaggaggaggaggcagtgatggtcctgtgctccatgcgcaaatcgttcaaggactcgctcaaggtgctcgaggctgacatccagcatgccaacaccctgtgagtgtgtgctctctgtttttttgtttttttttcatcgtattctgttcaactttccccaaattttcgttctcgcagtgttcgccgtttggttttcgttctagactcgtaccgtgcgtgctgatagatccgatgtgcgcgatgatgatgatgaagaagtaggagacagttagttaggaattcatgctttgtgtatgaatggtggttagtagtagcagtaatccggtgggggtgagttgatgcacaccattcacagtgaaagtggttggattcgacagggcctcggatttctcgagggattatgacggggcttgcctccagatgcggatgtcgtacagccccgccgcgcagttcttcctcttcctggtgcagtggacggattgtagccttgccggtgctcttggcctcctcaggattctcatttataaggttgcgtgtatgcgtgcgtggtgcgagttcagaattcaagtttgcatattgtcagtgacttttttttaatctaacgatttttttgttcggcttcgtttgttcatcaggtttatgtagatggaacgaccaccttgtcaactcatgaaaggaaagcgagcattagggaattctatgctgttatatttccctcactcatgcaactccacaagggtatcagcgatgtcgatgaccggaggcagaaggcaatctgtactgagagatacagaagaagagatgaggatgagagcaagaggcatgtttctgagattgatgtcgagagagaggaagagtgcgggatttgcatggagatgaataacaaggttgtcttgcccaactgcagccatgctatgtgcatgaagtgttaccgtcaatggcgctcaagatcccagtcctgccccttctgccgtgacagcctcaaaagagtaaattctggtgatctgtggatgctcacagatgaccgagatgtcattgacatggcaacgattactagagagaaccttaggcgcctgtttatgtacattgagaagctgcctcttgttgctccggacaacatcttctatgcctatgattctcatgtaaataaccagagctactcataatgacctactcataattgttttcggagagtgacgcatgtcttattcattcatgcagaggatgttccttgtcgtaggatgtggctaaccccaggagcagactgaactttgacaagagaacttgtgaattctgactagatccaatgctgtggtcagatgttgtaaatgcttgtacagatttgtaatttgcagtgtaaaaaaattagtgaggaaaaaccttgtgttccacattg

SEQ ID NO: 24546 - DNA, 2209 bp, Oryza sativa
  ref <308>: DATABASE ACCESSION NUMBER: AK099988
  ref <309>: DATABASE ENTRY DATE: 2002-08-28
gagtagcagccacgctcaatcagctgcacatcttcagtatactcgtggcatcaattatcttctcgactagcgtcgcccaaatctgctccgcgtcgatcgaggagtagtacaccgtggtcttgatcacttgcactacaggagatgcatctgtttcctgcccctgcatctgtcgtgctctgcttagccatgctactgctcactctcccaatagctagctccactgttgatgccataaacacgaccaacaccacatcgccgttctgcgagccggcgaggtgtgggaaccttaccatcggctatccgttctggctcgccggcaagcatccgccggagtgtggctaccgagcttttcaggtcacgtgcgaccacagaaatgcttccctcaagaacgggttctggacgtaccaaatccagcacatcttctaccacaacagctccttcatggtcacaaacgagcagttgacggacggccagtgcgtcatcgagagctttgtcaacgcctcctccgacctcggcctcacgccgttcaagattagccccataaaccgggagctcatcttcctctacaactgcaaccagagtcggttgcagcagcttccaccttcttgggcgcccgtgagttgtgcggaaaatgaatcgcccaactcgtatgcctggcttgcggggaggtacaagcctgacgacgatttgagacaacagccggggaactgcacggtgtcgatgatcccggtgctggggtacgacggtgcagcggccaaggactacgagcggctcatcaagggtgggtttcttctcgactacacggcagggccggacgactgcgaagattgctcgaggagcggccgctggtgtcgggtgaatgtcacctacgatgggctagactgccaatgccccgaaggcataacgtcctccgggttcatgtgcgggccatattcatttcttacccagcaccagcagcggctttcttggttccaaattgcatactgcccattcagacgacataaagcccatggccataacctatcataaggctgcatctggaacacaagataagtttcacttcaaaacaaaatagaggaatctatctatctatctattatattattaaaggaatagaaaaaggagcctccacgttcgctctcatggcctagaaattctcacattaatcagagaaaaagaaaaggcagagtccatatagaaatacaatttagaaatagatgaaattcggaattaaaaaataaggaatattagaagaggagactagagtccatatagaaatacaatttagaaatagttaaaattcggaattaaaaaataaggaatattagaagagaagactagagtccatatagaaatacaattagaaaattactgaaattcggaattaaaaataaggaatattagaagagtagactagagtccatatagacaattaggaaataactgaaattcggaattaaaaataaggaatgttagaagtagagtatagagtccatatagaaatacaattaagaaaaaaaatcggaattaaaaaataaggaatattagaagtatagtacagagtccatatagaaatacaattaagaaaaaaaattcggaattaaaaaataaggaatattagaagtatagtatagagtccatataggaatttaaaactaactaaaatttagaacaaacataataaaattaaaagtagagtttagagtccgtataaaaatacaatttacaaataactaaaattcgaaattaagaaaaacataggaagaagagtttaaagtcaatataggaatacaatttagaagtaactgaaattcgaaaataaaaattaaagaatatcggaagatgagtttagagtccacatagaaatacaattagaaataataaaaattcagaaataaaaataaataatattggaaggagagcatagagtccatatagaaatacaatttagaaatagttgaaattcggaattaaaaaataaggaatattagaagaggagactagagtacatatagaaatacaattaggaaataactgaaattcggaattaaaaataaggaatattagaagtagagtatagagttcatatagaaatacaattagaaaataaatgaatttcggaattaaaaataaggaatattagaagtagagtatagagtccatatagaaatacaattaggaaataactagaaattctcatattaatcgg

SEQ ID NO: 24547 - DNA, 2046 bp, Oryza sativa
  ref <308>: DATABASE ACCESSION NUMBER: AK099989
  ref <309>: DATABASE ENTRY DATE: 2002-08-28
ggatgcttctccagcccatctccggcgccggcgccggcgctcgccggagctccgccgagggactctcccctcctcctaccgctcgcctccgccgccgcgtcctctgcgcgatccgcgccgacgcgccgcccccgatccacctctccgcggcggccccctcgcggccggcgaagccgcccgtctgcaccgccgacgagctccaccacgcgcccgtctccggcgccgggtggcgtctcgcgctctggcggtacaggccgccgcctcatgcgccggcgaggaaccacccgctgatgcttctgtcgggagtcgggacgaacgccatcgggttcgatctctcccccggggcctcattcgcccgtcacatgtctaaccagggatttgatacatggattgtcgaagtgagaggttctggtctgagcatacgtgatcatgataattctgcttcatctccatcaggcgctttcgatgatatatctaatggcacattggctcttgataaatcaagcacattggaggttgcttcagttcaaagttctggtttctctggtattgattatgatgaccttggaatagttgcgttggatgacccacctttactgatggagatgactagtttctttgatcgaatttcaaaacttctggaagaggctagtttaaataaaaattttcatgagatcacagataagatttcggttctatctgaaatggtagaaagctctgccgttattggtccaatgagagaagaaagtctgcgtcttctgaagaactttcaagagcagattgactcatgggaacactttgtggcaactcagatgaatctaaattctgaatataattgggacttcgaccattacttggaggaggatatacctactgcggtggaatatattagacaacatagtagagtaaaagatgggaagctgcttgccattggacactcaatgggaggaattttgttatatgcaatgctgtcaaaatatggtttcgaaggagttccatcaaacttagcggctattgttactttggcttcctctgttgactacacgacatccaattcatcactgaagatgttactgccacttgttcatcctgcgcaagcccttaatgtccctgctgttccattgggtacattattagcggcagcatatccctgggcatctggtccaccttatcttttttcctggcttaatcatcaaatatcagcacaggatatgatgcacccggagttgttgtccaagcttgtttttaacaacttctgtacagtgcctgcaaaggttgtccttcaacttacaacagcttttcgggaaggggggctatgcaatagaactgaaactttctcatacaaagatcatttgcgatattgtcagacccctgtcctagcactagctggagataaagatctcatctgtcctcctgaagccgtttatgaaactgtcaagctcatacctcagcacatggtgaaatatggggtttttggaaagccagaaggccctcattatgcacactatgacttagttggaggtcgactggcaacggatgaagtttacccatgcatcatagagttcctttctcaccatgatcagtagtttatgtaacagtgaagctcctgaaatttcaatacgatgcggagtcaatgatacaatatatgttcacctcagatggtttttgagttgagctgaacaaactttccaaggttggccatgtgacatggccagctgcgcaaaatataggtaaacccacagaactcgtaggatgtatccttgtaaacaggtgtaccatgcgtcagtgcaccacttgttatacaaaacctataaatataggtatattacatgtgcccctagaaatataacaaattcaaaagaaattgtatgctgaactcattctttgaccttgtttccttagttgatgttgatccttcaaatacttggcttctgttgttgtaacaaaatgaaatggactgatatgtactgggatatactgttggcatgtagcgctgtctgcatttgtaatgaacagttctggaggtaatggaatgcttcattgtgc

SEQ ID NO: 24548 - DNA, 2821 bp, Oryza sativa
  ref <308>: DATABASE ACCESSION NUMBER: AK099990
  ref <309>: DATABASE ENTRY DATE: 2002-08-28
gtctccctctcctctcctcccctccccttctctcccatctctcctctctcagctcagattccggctcgagctgccatggcggcggcagttactggcggtggcggcggcggcttcaggcggtggctgcgcgaggggtggagccagcggcggctcccctccttcctcccagatccggtggaggcggaggtgaagggtggaggcggcgcggagggtggatgcggcggcggccctcccttccagatctgacgcggatcgtcgtccccccaccgccgccgccgccatagcaggctcgctccaccccctagcccgctccctcctcctcaccgacggcgccatacctcctcctctaagccggccggtacgctcggccgccagccccagcttcctctcttcgtctcacgccgcctccttcctccccgtcccttcgttctacttcttcacaacccccacctccacgccatgaccaacggatgacatccgtgctcggataggtgcggatgcgcctagcgatttctcctcaccagatcaacctccactgcagcctcctcctgccggatctgacacctcctcgactcagcatgctaggtgagtccccccaccatcccgcttgcgtccactccagcatgtcagaccctcagcgtctctggcccctccggcttctagctgtctggccttcatcaacagccactcctgtagctgctagaggtcaacgctgtcgactaggcctccatcggccatcgcaggagcttcttgagctacttccctcaatctctgattcatgctcttatgtagccattcagaataagacatccaggcaaagtcaacggaaaaaggtaagctgcaggaatttctctttttaccccaccattaagcatttggcttcgactatttgcattttctaggatctgccattttccctaaggttctttgcatgtctgatggctacagatggttctgaaattcaactatatttttgtgtaaccttgcaaacggtccgctatatattgccattgtttgtaattgacatgtgtatacatcagctactcaatccagtaattgcataatagttaatatttccttgcttctatcttatcatgtaaaaaaaattccctacaaaattaggctttctcaccattgttgccttccagaattaacatggcatgttgcgtacaagaattatctttctttctatttctatgttctatggagttgatgtattgttctatggtttactagatagttgatctatcaaaatcaatcctagcattcccaaattacctataacaagaggtattcatggatcggtacaacatatatatctacagcaggttagtttcgttctgttttgtcaacacagaatcatgaggaattttagatgtgttcattctgtgatgctgtctataattctatatgtattaaatttatatgacacgtgagtgtatatatgcaatgccattacgaactgctactatagtctccctgtgttcttctctttgtatacatgaataacaaatatggcacaatttaaggcaattgcagttttacaggctctgtgcaagtagctgtttatgttttaacggtaaatatttagttttcccctgaagaggagttagcaaaaaaaaagttctttcatctgagatgcttatgatttgtggctaatgtcgtcttagtcgttcttgttaggccgaagatcctagctcaatattcaaggaatagattcccttcattactcatgttaatgttgggaggggcaacccactatactcagctcgtggatcttcatgaatggagctgccagcatcataatgacaaccaaataggagtacaagataaggaataatactccgagtctctgatccaactcttctgctcatgaaacttacaaacaccaagtcagttgactgctgcaagcagtatggtctctgtagccaatgcacatatagctctcccatgagtgtttcatgctggtggtcatatactcgtattaacaatgcgtgttagatgcaccgagttgctagcagtgtgaaggagtaatccttctcgtttgctgcttgcattgtaaaccttgcggtttcacttttaactgatgttttgttgttgacgatctcgcaggtcgactgatagatgcattgcggaattctgtgtggatgcaaagctgactcaacattgtttagcttttataacagatggcttcaataggggctgcgctatctgggttaaagaacagcagcttcaccacaatgggtgctgagaagttgcctgatcagatgcatgatctgaagataagggatgacaatgaagttcaagtgactaatattaacggcaagggagcagaaaccggccacataattgtcacaactactggtggcagaaatggtcagccgaaactgacaaaatgtaaaggtgcttgggaagacatgttgaatactgagcatgcagtgaccttctgaaagataaaacatgtttacacgcttgaatagcgaaccatttgcatcttgcagctgcgctgaactggtttgaagatgtttgcagacagaattgtggtttgtaatgagctctttccacttgtagtcctttatggtggagaagaatgccaatcatagcatccactaaatgacccatttgaaagtgtttgtcctttttgttgatgaaaattatagcccaattcacttttttattgttcatctttgttggtgtgttgtcttctattaagccacctaatggattcacaaggactacttatactttattgtactctgtttattaaacaaatgtagaccgtatttatcaaaatattatctactatctaaccattttatgc

SEQ ID NO: 24549 - DNA, 2649 bp, Oryza sativa
  ref <308>: DATABASE ACCESSION NUMBER: AK099991
  ref <309>: DATABASE ENTRY DATE: 2002-08-28
gactacgttctctccattccatctccccccaatcgctcgggcgcaatgcgcagcagcagcagcaaggccacacccacaacctcccctgcttttcgcgtcctctgctctcctcctaggttagcagcggctttgccaacgagatagataggcaaaagagaaagtacttgcatagcccaacaaggcaacagctgctgctaccctctctttcttttctctgcttctccttgctctctcttctcttcctttctttctttctatctcctgctcgttctttccattttcgagagctcaacggaggaagaaggagagagagagaggcaaaggggagcaaaagaagagcagcatggacgggtttggtattggattcgtcttgttttgggcatttcttgcttctgctccttttacctttcatagcaacatcttatcaagttattcttgccatactctctcctctctctctctctctctctctctctcttctcttctctcatcactcaccatcttcttgtcttctctctctcctctcatccttttgtgcaatgcagggattgtggcaagcaggtctatttgggtaagtttcattcatgtccatcttgtccataccccccatacttgggaactgctacaagcggcctccacgattggctcgccaattggagccgttttttctctatgggcgcggtttcgattcctcacaatggctgcctttgtgacgactgaatttgcaggcggatttgacactgctcatgcggcggctcggtaagttggactcaattcctcgtcttccaatcgctgacttctattccctgctcgcccaatcgaatccggcgctgtcaaaattctaatcttttttgttatgttcatttcccaatcgcagggcgtacgatcgggcggcgatcaagttccgcggcgtggaggccgacatcaatttcagcttggaggattacgaggatgacctgaagcaggtgagagcgcgatcgattattattacctgaactttcctttcttttcatgagtcgccacggtttcgttagatcatactactattactgtagctgcaagattaacgggatcattgcagatgagcaacctgaccaaggaggagttcgtccacgtgctccggcggcagagcacggggttcccccggggaagctccaagtacaggggcgtgacactccacaagtgcgggagatgggaggctcggatgggccaattcctcggcaagaagtatgtcctaatcgatcaccgtttcttcctctttcgttcgatcgttcgttcttgggcaatctcccgtaaatcatcttgtgggtttttggtgcactgcaggtacgtctacttggggctgttcgacaccgaggaggaagctgccaggtaaaattattgggccgcactgtgcgcgcgcgcggccattgttgttgaatgtcgagtgtggctgctgcgccgtttgcgagtttacgcttctgggttagatgggcgagcggtgatggtgattgatgtttcttgtctcttggccacagggcgtacgaccgcgctgccatcaagtgcaatggcaaggatgcggtgacgaacttcgatccaagcatttacgccggggagttcgagccgccgggtgggtgtgtcatgtgtgcgcttactgctcatggctaggctgttcgtttgtgagttgtgactgctcatccggacaaaatctgtcactgttttgcagcagcggccacgggtgatgccgccgagcacaacctggacctctcgcttgggagctcggcgggctccaagaggggcaacgttgacggtggcggggacgacgagatcaccggcggcggtggcggtggcgcgggctccgaccagcgcgtccctatggcgttcgaccttgactggcaaacggcggcggcgaggagcaccaaagctaaggtaaaaaaagaatggggactttgctttccgcatcagccgattgtcttctcatcacgtaataaaaaggcttaaaaattcctcgttttcttgtctagttcgaccagaactcgaaccatccccagatgcctccggtcctgcaggtcacccacctgccattcagtcccaggcatcatcaccaagtgggtagctcactatacaactccactccacttcgctccatttgctgctgaatttctcgcgtttggtttcaccggtatccgtgagctgatgaattcttgatgtctgtgctgctagttcttgagcaatggtgatccggggacagcgggaggcctgtcactgacgatcggcgcaggcatggccgggcactggcctccccagcagcagcaagggtggggcaacgccggcggcatgagctggccgcacccgccgcacccgccgccgccgccgaccaacgccgcggccgccgcaaccgctacagcagctgcagcatcatcacgattccctccctacattgcgacgcaagcctcaacctggctgcagaagaacgggttccattccctgacccggcccacctaagatgatcaaagatttaaaattcaagatcgctgcattcatcgtctcctcgtcgatcgatcatggcaaagatcgatggagagagagaggtgtgtgtcactgacgcagggaaaaactcaatgcagatttaccagcaagaacaagagctggatgctattcttttgctct

SEQ ID NO: 24550 - DNA, 2410 bp, Oryza sativa
  ref <308>: DATABASE ACCESSION NUMBER: AK099992
  ref <309>: DATABASE ENTRY DATE: 2002-08-28
ggtcccgtatccaaaaacgctggccattccccattgctggccttcccctttctcctctgccgccgccgccgccgccgccgggagacactccggatggcttcgctgccgccgccgccgccgccgccgcggccgctgctgctcaccgtcctcccccaagagctggtggtggagatcctaatccgcctcgacgacctggccgatctcgcccgcgccgcctccgcctgcagagccctccgccgcctcatcacctcccgcgccttcctccgccgcgtccacgcgctccacccccgccccctcctcggcctcctccacctggaacaccacggctcccgctgccgcttcctccccgccgagccgccccacccctccgccgccaccgccgccgccgtcgcgcgggcgttcgattccgactccgactccgactcctccttctccttcctccccggccgctccggcgactggcgcctccgcgacgtccgccacggcctcgctgtcctatcaacccgccatgccgtcaccgatgatggatgcttctccttccccgacgtcgtcgtctgcaaccccttgcgccgccgctacgcctggatccccccgatctccgacgacctagcggcccccatccgaagcctcggcgtcggcgtcgaggatttcgattacctggtcgctccagccggccgtgagggtttgtcattccgagtgatctgcagaccccagttgccaatgggctgtgatgtcaccgtcttcgtcttcagctccagtgccgtcatctggcgcgctgccacattgcacgcctgccgtgccaccgctcaattggtctccccgcagtacgcgcacggctacgcctactggcggctgatccgatccgccaccagattgctcttgctggacactcgcgacatggacttcttctttgtcgatttcgagcaaaggagtgtgccgtggcaggccattggggaggcaggggaagtaggcaggcttgccatgttcaacattgctcatgctaatcatacagtggagctcctctctggggcgattagaggcagcgccgatgaacattggcggcatgacaagactatcccattgcttcctggctacaaatggaggattctaaagctagccgaagggtacttactcctgcaaggaagaattctcggtgacggaacttcgcagtttactcctggtgaccaattacagtatttcacgctagacatcaacacgtttaagcttgagaggctgtgtgcttcaacaccccaaggcatcagttatcatcctcaatttgaattatacagatgcttccctccaccgttatcgttttcaagtatatgaaaatagtaagaactttccgtggtttcttcagtcattgggaagtcatgtcactagttatttcataacgtatgaatcttggaatttttacattgttatcatctgtggccatgtatatatgcactagatagagccggcaaatgagatagtttcatatttcacccaagtggagctcagttgtttatatgatcaagtcatattatttataagtgtgcctagatgcatgtgttttaattttggtccagttcttaacacaagcttagtggtggcttggacatctgtagtgtacgcggatgtggcatctgtaaaattccataaaacatactagcttgtttgattacacgtacatatttattttggaactatttgtcaatatggtgttgtctattggctctacctatagtctgtggagtattaaggagaattttttttctgataagttttcatgttgtagcaagtgggttgagtgaacaagtagcataatctatctctgtgcgtacataatttatctccccagatagaataaacagtttgccaaaaaagcatgaccacactaggacatatatatgtttggcatcttgaaacacttaatatttctgacattttgatgtccagattcattgacattttggtgtcaaatcaccacctaggttacctttttttgggacggagagagtagaatgttaattgatgactctgttaacctaacctgacattcctgttctcttgtcacattggtcaggacttaaaaagggggacagagtagcttctgttgtgaaaatgtgttgcaagaccagctgctagcctgctactaccggcgttggcatcgatatgtatatatatctactgtacgagcttagttcgatcggctgttccatttgaattctatagtgtagtggtttagcttctgaagtcttgctactcttcttttgcccatatatatgctgcattctggaactaataaataaagtagctagtctgcaaaggtaggcattcaggcttatacacgatgcacttcaatgtatgctcttgttgtcaaagtattattgttgttaatctgatgtcaatttgagcacgggaagctctc

SEQ ID NO: 24551 - DNA, 2702 bp, Oryza sativa
  ref <308>: DATABASE ACCESSION NUMBER: AK099993
  ref <309>: DATABASE ENTRY DATE: 2002-08-28
gacccgttttcgtcctccgctttccatcgctccctccacctccaccgcactaccaccaccaccaccaccaaccgccgtgcggacgccgccggcttcccggccgcgacgcggaggaggaccgaattcccccccacccctccgtccaatccgcgcgcaccacctccgagggaactccatgtatgcaaatgtcgccacccttgtagaatcaataaagctgttctagcagctaacctttggtttggtggatttttggaaaatgatgatgggaagagaggacaaatatgtgagatttgaggactggagatctgagcagtcagttatgtcaccacggaggcataatgctttaagttcacttaaagaaagaactgctggagtttttgcattcctagaaaaccttgtgcattctgaaaccttaaagagattggtgctgcatgaaaggaagttgacaactagaactcttcatcctcagggaccatttctgcaaagctggaacaagatatttgttttgtcatgtatctttgcagtttctgtggacccattgttcttctatattccggttatcaatgacaacaacacatgctggtatttggataaaaagttggaaatcacagcaagtgtcctgcgctttttcacagatatcttctatatactccatatcatatttcagttcaggacaggttatattgcgtcttctcttacaacttttggtcggggtgtcttggttgaggatagatatgcaatagcaaagcgatacttgtcaacatattttctgatcgatgtctttgctgttctacccctccctcaggtggttattttggttgtgctacctaatcttggaggctcagaggttacaaaagccaaaaatatcttgatgtttatagttatatgccaatatgtgcctcggctgatccgaataaggccactgtatctccaaatcacaaggtctgctggggtaattacagagacaccatgggctggtgctgttttgaaccttttaatttacttgctcgccagtcatgtccttggagcactctggtacttgctttccattgaacgcaaagatgcctgctggagagacatgtgtagtaataatagtacagtctgtaatcaggcatatttgtactgtggggataaggaaaactcgatcttacggactgcttgccttccaatcgactcaaacgatatagatccgaactttggaatttatgtgccagctctaaataatgtctcgcaatcaactaattttttggcaaaactattctattgtgtttggtggggtctgcaaaatcttagctctctgggccaaaaccttaagacaagcacttatgcatgggagaatctgtttgcagtttttgtctcaatatcaggcttggttctgtttgcactgctaattggtaatgtgcagacctatttgcagtcagcccatctgagagaagaagaaatgagagtgaaaagccgtgatacagatcaatggatgtcatatcgactgcttcctgagaatctcaaggaacgaatacgtcgtcatgaaaaatatagatggcaccagacgagcggggttgatgaagaactcttgcttatgaacctccccaaggatcttaggagggctataaaacggcatctttgcttatcacttcttatgagggttccaatgtttgaaaacatggatgatcaactcttgaatgccttgtgcgaccgcctaaagcctgttctttatacagaaggtagctgcataattcgtgaagaggatccagtaaatgaaatgctgttcatcatgagaggtaatctcatgagtatgacaacgaatggtggaagaactggcttcttcaactctgatgttttgaaaggtggagatttctgtggcgaagagctcctgacctgggctcttgaccccacgtcagtttccagcctccctagctcaaccaggacagtgaagacgatgtccgaagtcgaagcttttgccctgagggctgaagacttgaagtttgtggccacccagttccgacggctacacagcaaacagctccagcacacgtttaagttctactcgcagcattggagaacctgggcagcctgtttcatacaagcagcctggcataggtactgcagaaagaagatcgaagactctctacgcgagaaggagaagaggttgcagttcgcaatcgttaatgacggtgctacaactctcagcttcagggcagcgatatatgcttcgcgtttcgctggcaacatgatgcggatcttgaggagaaatgccacccgcaaggctcggttgaaggaaagtgtgcctgcaaggttgttacaaaaaccagcagaacccaactttgctgcagaagagcagtagttctgtttaccacgaatgcgtaaggaattttttgtgcatggcttgtgcattttttacttgctgatgtttttgctttcagttgacactagacctacaaattaaggagaggaaaaaatcgcaataggtgtctgtatctttctgtaagatctgtatatgtgttcgtgtatgataataggtgatacgtgtaattattattcatcaggtgtttatatacaaattgtgtttatagtagtgtagtgagcattccatcccgtgttcccatcaggctcttgaagtccaggcacggagcaagatcacattgtaacggagacacttgttttaactcacatatattgacatgatatagaattaatggattgtt

SEQ ID NO: 24552 - DNA, 2132 bp, Oryza sativa
  ref <308>: DATABASE ACCESSION NUMBER: AK099994
  ref <309>: DATABASE ENTRY DATE: 2002-08-28
gatgctccgccgcagccgccacttcctcccacccagaccccgccgccggccgagacctcgccgcgaggcccccgccgccgagccgcccaccccgacctacacccgcgacgtcgtccgccgcgtcgacgccatcctccgcggccacccctggtcggcggcgcggccgctcctcctctccctcccgggcctcgcctgggactcccacaccgtcgcgcgcgtcctcaaggcgcacccgcctctccacaaggccttcctcttcttccgcctcgccgccggcgcaggcggcgggttccgccacgaccgcttcacctacacctccatgctccacctcctcggcgaggccggccgcgtgccggccatgatgcgcctcctcgccgagatgctccgcgcgggggtggaccccgacgccgccaccttcaccacggtcatgcactggctggcgcacgccggggacgtcgacgccgcgatgcgggtgtgggaggagatgcgcgcgcggaaggggaagtgtcggcccaccctcgtgagctacacggcgtgcgtgaagatcctgttcgacgccgggaggcctgcggaggccagggaggtgttccaggagatggtggccgagggactgcggcccagctgcaagacgtacacggtgctcatcgagcatctcgcgaacgtagggaaatttgaagctactatggaaattatggacaagatgcaagaagctggtgtagaaccagataaagcactctgtaatattctagttcagaaatgctccagggctggtgagacatcagtgatgacccgaattcttcaatacatgaaggaaaatttcatcgtgcttcgccgacctatatttttggaagcacttgaagctctaaaagctaatggtgagagtgacaatcttcttcgggaagtgaatccgcatcttgcatttgaaggcatcgaatgtgacccagcatttactgatctaggctacattactgtcaggagtacgatcctgtaccttttggcttctagaaactggtccgccgtagaacacatgataaatgaaatgacccccaagaatatcaaggttgaatcacatatcctctctgacattattcaagcaagctgtgcaaactgcagaccatcatgtgggcttgcagttctgcgttacagtctaagaataggcaatgaacttgatagatctgcatatggcagccttcttggtcattacatcagaaatggttcattcgatttggtgtttgagatcgttgaaatattgattaaatctggctgcaatcttgggacatatctatcatctatattaataataaaactggcttgtgctgggcattcttcaaccgcagtgcgcatttttggattattgactacagacaagaatgttgttacgtacactgcccttatgagtgcctattttcaagatgggaaagttgataaggctctccaactattcttgcaaatgagtgctaatggagtatctgcatgcccaggtacatatgaagtactgatacatggattacaaatggctgggcggaaacaggaatctgaacattaccgaagagagagaatggagatgcaatggcatcttcagtatcgcaatgagcattcccctgaagatagcttatgtaaccatctgttttgtgattttcatggttagaagatggtccaaaatcttcatctttcattagctgaatccttccagcacctattgctgcctgaacatgatgatattgacacacagtaactcataatgaggtctggaccgttcattcggtacacaaaatcaagtactggctacatactatccaccagtttttgtgcttttgagagcatattattgatgaattactgcattgtagatgaatatgtcaagatgtcattaaattatggagtccatctaggatcaccattatgtaacacaaatgctctttctgagcatcttcacgagcatgactgcacaagctgctacacgggctgttcacttttccatttcaatgtattgctgttgtcattcatcagtagacaacttctaaaggtgcacatggtgaagactagtgctgccacttttatcaaacctttactcagcagcccctatacaaactctctattgctcttggctgctattgcaaaaaggtttcacc

SEQ ID NO: 24553 - DNA, 1261 bp, Oryza sativa
  misc_feature (646)..(646): "n"=any one base of a, t, c, or g
  ref <308>: DATABASE ACCESSION NUMBER: AK099995
  ref <309>: DATABASE ENTRY DATE: 2002-08-28
gacttgtaactagaaatcaaggctgcggaaacctctcacgactcacgagcgctctctctcgaaacctcacttgctgcagtaaatcccctctctcgacccctcttcctcctcgattccggcggcctcgtcgccggcggcgggagggagaggggtcgtcccccctcccctagtatagctaagtagccgggctagtctcgttaggtcgggttcttcccgtttcctcctcgttggtgtggtatggaagttggagatggaggcggattcgacgcggatgcagctcgtgacggcgatggcgacgcagaatcgatccgagacgacggcagcgacgcggatctggcctgcggtggtggcggcggctcggatgcgacctgcggcggcgacaggggctcggatgcagtctgtggcggcggcggcgactcggtttcggtcagctgcggcggcggcctcacggatgcggctcgcggcggcggcggccacgcggatgcggcccgcggcggcggcggccatgccgttgctgccctcggcggcgacggcagcgcggatgtggcccccggcggcgaaagctgcgccgatgcaccccgcggcggcgacggctgcgccgtgcagtccgcgacggcgtcggtggtgcggatgtgtcctgcaatgncggcgtgaatgcgactcggatgatctccttttcttcaaccttctccatcgagttaccaagacagcatgttcttcgccaccatctttggattaagtctttggttggctggatttggggaaattcttcctctttatctcttggcagcaataaccatgcaggatttatcgttcgggttgagcccagattggatttgcaactttggtttgcaggtttgcagtccaagcttgtcagattcaatgatgaaccccgtggaaatcttttgtggagtccggtgatgttcacaccaaaatctacggcttcgcaccaaacctctcatatgtgtcgtttccgtggaggcagccgaaggggtttaccagttcgtcaagcggagtacatatcaatagaggcccttggatgcaattgtcgcggccctgccacagtaccctatcgatttgctccttcattgctgcttagtttcattataaagtttgcttctttttttcagttgacctctctcttgttaaatatggtccaactcttatgtttatcctgggcgatgtattggggaattcaattcccctaaacgctgtggtttaacaaagtgtgttgtgttttaaaaaaaaatcaagactgcgc

SEQ ID NO: 24554 - DNA, 2725 bp, Oryza sativa
  ref <308>: DATABASE ACCESSION NUMBER: AK099996
  ref <309>: DATABASE ENTRY DATE: 2002-08-28
gtacgtgtgggacccttcggcgcgaggcgtacaccggatatgcgtgcgggttcgcgatgcggaggcggggaaggacggggatgatgtcgccgtggaagccgccgtgccttccgagatgttgatgccggagactgatcttggttacaaggtcactcatttatcacttaataccgacggttcatcgctactacttgctggatcacataacataagtattctgtatgtgcatgagagggtttctgaagatggtgataaggtcatatgcaggactgtgccagttgcttctcagatcttacctagcaacaatgatggcatcaaagtactgcaaacatcgtggcacccttttagcagtagtcattttggagtcttgacatcagatgctgttttcaggttatttgatctgtcatttgatttagagcaaccagagcaggagttctatttgcaaccaattctacctggcaaatgccagaatgcttcatcaatttgtccagtggcattctcatatgggagtgatcatctgtgggatagattttcggttttcatcttattcagcgatggttcaatttttgtgctctgccccattgttccatttggaagcgattacaataagaagcatattcaagaaatatatgaagatgttaattcatttggattgaaatcctcaaaccaaaatgttgtcaccaactcacgtttggcaattgcttggttggaagcaacgtttcctgacttgtcacgtcagccagctgataatagtgcattgatgtctagagctcatccatacgcatcattagatgattctctaactttacagggacctctttgtagagtttgcgaagaaaacaatgaacctgaaagcaagagcaactcttgtgaaggcaaagctgtgggttttgtgtatagttctgttggcaaagattccattcttgtaactgcctggggtagtgggcaactccagattgatgctcttgctgatgaaattcaaccacagtggagcataggaattcctacccgccttaatgttgattcacatgggcagataaagagtgttgctatgatatgtgactctaattcagaagattcttgggccatgcgatcgtatcgcccgtccagtacgggatcaaatgtgaagagtaatactgatgctgtctggatggggcattctcctcctttgctaagactcgcaattgtagatttagcactagcaaaaacttccaatgatagctctttatcattgtttctagatccccttgttccagagagattttattgtgcccatggtgggggacttgacatggtcacactgcacttcctgccattttcataccctgaaatggcatccactccaccctctgtgcatcctatcctcactacaggaaacaatgaggcaaattctcccttcctttctggttttgttaccatagcagatgcatatggccatgtgcagttagtcagcattacatgcccaggtgagtgctttgtggtggagatgaagggttggaaggaaccaacgcctcttcagcttgacatggacagcaagagcattaaggacgtggaatcttttacaactggaatgatcagtaaagagctcatcgcaggtccagatccacccatagttccatcttcatcaagcttgaggtcattgacccctgactctattgaaggaaaatccactcttcatcactatattaaagttttccatgagtactacgtggagtatgggcataaggttttcattgagctcaaggaacatggggattacctgaagacagaaattgaggacaagcagaaacgcttgcaagcagtgaagcaatcacttctatccatagaagccaaagaccaagatataaacaaccggataaatcgggcctttaaggtatacgatttgttagaaaaacgcatcgagggcttcaagatacttcctgcggcaaacaagaaaccattgtcacaagcagagcaggagttcaaagcacagctagataggtttgcagatgtggagctggatgcgttgtgctcttcaatcactgctctgagtgcgaggatgaaacgatttgctcacccggccattggcagtgcggctggtacaggaatgtcaacatggcagacaccaaaggtcggaagaagccatgtttcggactcccagatgtcgttactaaaatcttcgcttgagaagctctctctccttaatgaggagaacaatgtaaagctgaggctcattgagcatgaactcaagaaccaggagcaataggtctttcagaacaactgtgtattacaagtcctcacagattctgatttctcgagcttgttatcgcccttttgaatcaaatcgctaccagtccactgtctactgtgggtgtgtgtgcagagtgcaacttcaggtgttactctgcaaggggacggcatcatgaacaagcctgttaacactcgaagcgcgtatcagcgtgaaggaaatcatgtaacgctacttgcaatgaccaccagcatgtgtatccaatagcggttttgataacttgcccactgtagtagtttctcatcctggggattatgggcgtatttaagtcttgatttcttcgtgcttcactgaatttgcacggtcagaggtccaaaccgaacttcaaagctgacgaggttgagaatgttgctcggtcttgattatcaacatggctgcatgatgttaccagcttgtctgctttgacgatgtaaaccagttgggagagttctgtgcgct

SEQ ID NO: 24555 - DNA, 1233 bp, Oryza sativa
  ref <308>: DATABASE ACCESSION NUMBER: AK099997
  ref <309>: DATABASE ENTRY DATE: 2002-08-28
gttttccccttccttccgccgcccctactcgctcggtgttgggcggcgggcgtcccactcccaccacctcgaggcgagggggctagggtttccgccatggaggacgacgagtacgaggaggggatggagatggagatgggcgggcaccaccacccgcaccacggcggcgggtacggcgccgaagagtacggggccgtcggcggggaggagatggaggacgaggaggcggatggggacgcccccgacgaggaggagatcacccaggaggacgcctgggccgtcatctccgcctacttcgaggagaagggcctcgtgcgccagcagctcgactccttcgacgagttcatccagaacaccatgcaggagatcgtcgacgagtccgccgacatcgagatccgccccgagtcgcagcacaaccccggccgccaggccgagttcgccgaggttgcgcccccctcaccacccctagcgaatgctgttgctgcttaaaaaaacttttgctgtttgcttgctcctctgaattgggcgggcgattgcacggcttaaggcatactagggtttggcgaccttggtaatggcgagggggcaggtctcttaacctgttctttcactggctagctgcttgattagatggcagttagggttttgcaagggttaagaggagctttctcagattggagactgaattttaaaatgcaatagcaacttgaacgctagggttgatggttgagctggattttcagggtgaaatagtcttggctaatattattctagtgttgagataggagttttgttcaagtttttttgtgcgggtcggagtggagaactcttggattcacaagggttgccactagcaaagcttacaatgagttttgaagtgtgcattgctttgcgttgctgcagttccaagttatcactagtgagttagcagaagcagagtgtcaatatggcttgtgttgtttgtttgtgctgatattatgttcaactatttggaattgatgttggatagacagaagttaatcgcaatcctaactgtggtctttcagcaaacagttttgttatataacatagtactcacagaaattatattcaaaaaatttctgggaacagtggtgtagaacttcatgtctagtttgaccttctgagatgtatagtcatgtatatgcaattatacactattgtaaaattctcttggagcaatgtagtgaaactgcatgcctatttgatattttg

SEQ ID NO: 24556 - DNA, 2093 bp, Oryza sativa
  ref <308>: DATABASE ACCESSION NUMBER: AK099998
  ref <309>: DATABASE ENTRY DATE: 2002-08-28
gctatcgaacctcctctcgcagaaacccatcgctccccctccccagcacgcatccgtccccggcgcccccatcccctcctcctcgcggcgccgcctccccatcccgcctcctcgccacgccgtctcctccccccaccacaaacaacacgccgcctcgcctgcccatcccgtccaacccacgccgtcgtcccgtcgccgccacatcgtcgtcgtgcgttatcccgccggccactcgccgcctccccatcccgctaaacccgcgccgccttctccggccgtcatcatcccgccgccgccacatcatcgccgtgcccgatcccgccagccacccgtcgctcctcctcccccaccgcattagttcatctcacccccaacccctattgatctcgcttctccccacctcaacgcctccccaatccctatcgcgccaatccccggcatgacagcccccagccaatgctgcacctgcatctactgcgccgcttcaattcccggtgacatgggaaccggaggggaacttcccgcgtccgccacggatggtcctgcacgaatcgctcgacggtgctggggtctccaccgtgcatgccagggcgaatggcgatccctccatctccaccgcgacgccggcgacgaatcacctcatctcgccgccgccccttcactctcccccaccttttgctggtgacaatcccaccttcggcaccacgggatccctctccaccgcgccgccatggatcctgcatcttccgctatccatcacgccgccactgggactcctcgcccccgcaagccatcgatcccgcctgtgacaagcttgcaggaaggttgagattgattctgaattgttgccaagctgcagcaggcccaatttttttccataagttgttggcatttttgcatcttaaaatgatgatctgctgattctagggcagggcacattgagcagtggggattgtcatcccaattcttttttaccatattagctttggtgttcaatctgtctctgaaggccagccataagaaaactttacagttttgtgggattgtgtggatccagatacaatcagccggtttccaaagggatccatggtatgtcagcagctgataagcattcgcagttgagattttaggtgcagggaacaggaaattccttgtgtctgttacctctgagatattatgggcgtcagtactgagatcagttccacagctacagcgcgcccaaggtcaatgaatgctgaaagtttaaaaagaacattacagatctgtgatgcaacttcgatgaagtgccaatctttcattgtatattctatgttcgcgaggtggtctgtggttggcgcgactaggtggaacgcgacgagggtcgcacccaactccttgcgcagcatcctcgctgagccatatcatatatgaactacttcgccttgaaaggtagttttcataatctaccattgttgatgagccaacgtctaggctggattcaacaacggctctcaggataatttaattcagcttctacatcatatagctaagggattaggattggcaattggagctaccctcttggacataaaaaaatgcaaaaactgtaccttcagttacagtcatgagtcatggcattcatgctagcaggaggattctttgtaaaggggatgtcgaattttcactttgtactgtttgcaggggaccttcacccttctacttatactaagatgaaaagaagaagattcagaaaactaaggccagctatgagccagaaaaagcggtcaagatggccttcattcaagttatcagggatccaacctggattatcatttcgagttgtcaaatatgaaaccagggtcagtatgaatgaactaagatagcttccaagcgacaccgtaacaagagcgaaagcggagcacaagcttctcatgcaatctggagactgattgtagaagaactcggcttggccaatggctgtgaacatatccttattgtttcaaatttcaaactgtattatgtgattttccttttctttaagtacattctgacatttaattgtcagtgtatacaaacagttagtcttgctttaatgcagaagtccatcaattggc

SEQ ID NO: 24557 - DNA, 3073 bp, Oryza sativa
  ref <308>: DATABASE ACCESSION NUMBER: AK099999
  ref <309>: DATABASE ENTRY DATE: 2002-08-28
ggctccactcccccctccgctccgccgcaccacgccctacgacaccaaccaaaccctcctcctagccccccggcggcgatggccggcgtcggcggcagcagcagcggcggcggcgacgtggagatgggcgggtggtcggagctcctccactcctccactaagctcctcgagcaggccgcccccaccccgcacttccctcccctccagaggaacctggaccagctggaggtgctctccaccaagctcaaggccaagacggtgcgcgccgaggcgcccgtgcagtcgctctccgccaccaggttgttggcgcgcgaggggatcaatgcggagcagctcgccagggacctcaaatccttcgaacttaagaccacatttgaggatgtttttccatctgaagcaactactgtcgaggagtacctgcagcagcttcatgaaatggcaatcgtctcatccattcaagaagcacaaaaggacaacttaaggagttttaacaattatatgatgcaagttctcgaggatgattggcagaaggagaagcgagacttcttgcagagtctaagccgactctctacattaccgaaaagaaacactaatctcatggccagtgggatttctcgtcctgctctgatgccatcttcagcttccagtccccaatcttcgtccggtctgccatctaaggaagtcatgcccatacctaacaaaactataattgaaaacaaatcttcagtttatgctgcagttgtgagagatcttaatgatgctagagggcgcagcctaccttttggtcctgctacagcattcagggctgcttatgagtctttatctgttggtgctattgggacaaaatcagtgaccatgcataaagtgtggcatttaattcaggcattagttggggaagggtcaactcatcgaaacatttcaagaaaaatgtcactagtgattggtgctagacgacaccttgagtggggtcatgaaaagtacatacttgagaccatcaatagccatccggctctagctgctcttggtggatctgttggcaatcttcagaagattcgcgcatttcttcgggtccgtttgcgggatcatggtgtgctagactttgatgcaactgatctgcgtagacagccaccagtggacacaacatggcaacagatttatttctgcttgagaaccggatactatgatgaggcaagacaagttgcccaatcatctcgtgctgcattcaactttgctcccctgcttgtagaatggattactactaatggtgctgtatccccagagactgctctgacagcttctgaggaatgtgacaaaatgctgagaatgggtgatcgacctggccgtcctggttatgataggaagaagttgctcctttatgccatgatctgtggttgtcgacgtcaaatcgacagattgcttaaagatctgccaacacttttcaatactatagaggatttcttgtggttcaaattgtcagctctgcgggagtacaccagtgcatcttcttctaatgtttcaaatgaaggcttggtgccttatactctggaggatctgcaaagttacttaaacaaatttgaaccatcatattatacaaagaatggaaaagaccccttggtctatccatatgttctgctgttaagcatccaattgcttccagcaattctttatttgtctaaagaagttggagaggaaggataccatgtagatgctgtgcatatttcaattgctttatctgatcatggtgttctccctgatggtgttgggtcaggccagaagatgggtatcatggatgcttgtgcagaagctgccagtataatacggcagtatggctctatttatttgcgtaatggtaaccttgatttggccttggagtattatgcacagtctgctgctgcaatgggtggaggagaggtatcatggattggtcgagggaatgctgatcagcagcggcagcgaaatctaatgttgaagcaactgctgacagagatattactaagggatggtggcattcaacttttgcttggtccaagtggaatgggggaagaaggagaattaaagaagtatatgatggattggagaagcaggcagcaattcttacttgaagctgcccatcagtgtcatgaggcaggcctctatgacaaatcagtggaaattcataaaagagttggagcttttgccatggcacttcagacaataaataagtgcctgtcggatgcaatatgtgccatggcacgcagtatgttagatggtgaaagtcgtgctgctgctctaattcattctggtaatgaaattatggaaactgccagatattcggaagccagtgttcaagacaaggacctcatatctgagcaacaaactgtactgagacagcttgaagctattctccatatctataggcttgctcgagctggacagactttagatgctttgagggaaaccatcaaactcccatttcttcatttggatcctcaggctccaaatgtgacagttgatgtgttcagaaacttgtcaccgcatgttcaagcttgtgtgccagatctcttgaaggttgctctaaattgtatggacaatgttagagatactgatgggaccttgcgtgcagtcaagtcaaagatcgcaaacctcgtggcaagcaacatgagcaggaactggccacaggatttgtatcagaaggtggcgcagtgcatatgatggggatctgtccggccatatacctgacactatcaaaagcttccgaaagcacgcggaaatgcttttctgtgtttgtgctggtgatgtgcttatggtccgaaccggaatgtttcagactggtggatgcaaatccttttgatcactcagctatatcagccaaaagagaacatatatgccatgcccgggggtcatctgatgtgtagtgtgtgaaatgtgaaacttaatggcaccaatcagaatctgtattattaatccatggttgtaaagcagtttctgaatatccaaatgcactgttgcttagttcgaggagattatctgcggctctattgtactgtcattctgttggcttatcccacttaatcccgcgtcctatctcggatct

SEQ ID NO: 24558 - DNA, 3666 bp, Oryza sativa
  ref <308>: DATABASE ACCESSION NUMBER: AK100000
  ref <309>: DATABASE ENTRY DATE: 2002-08-28
gacccaaagcttccaaaccaagctaccaccacgccgccgccgccgccaccaccaccaccacgcgagggttcaaaccgcaaaactcctccctccccgaggtccccgccgcaaaagcccaccctaacccccaccctcgccgccggccaccgccgccgcggacctagctagctcccaccacccactgcccccaccccaatgcgacggcggcccccgccgccgccgcctcctctcctccccatggccaccctcaacacccaaaccctaatcactctcttcctcctcctgctgctcgctgctgctgccgccgcggccgacgccggtggtggtggtgagagggaggcgctgctgaggttcaaggcgggggtggcctccgacccgggggggttgctccgggggtggacgacggcggcgtcgcccgaccactgcgcctggcccggggtgtcgtgcggcggcaacggcgaggtcgtggcgctcaacgtctcgtcctccccgggccgccgcctcgcgggggcgctgtccccggcggtggcggcgctgcgggggctccgcgtgctggcgctcccttcccacgcgctctccggccagctccccgccgcgatctggtcgctccgccgcctcctcgtgctcgacctctccggaaaccgcctccagggggagatcccgcccgcgctggcctgcgcggggctccagacgctggacctctcctacaatcagctcaacggctccgtgcccgcctcgctcggcgcgctcccggggctgcgccgcctgtctctggcctccaaccgcctcggcggcgccatccccgacgagctcggcggcgctgggtgccgcagcctgcagtaccttgacctctccggcaacctgctcgtcggtggcatcccgcggagcttggggaactgcagtaagctggaggcgcttttgctgtcctccaacctgttggatgacgtcatcccgccggagattggccggctaaggaatttgcgggcgttggatgtgtcgaggaacagtttgagcgggtctgtgccagctgagcttggtggttgcgttgagctgtcagtactcgtgctgtccaatccgtatacgccgattggtgggtcgaattcgtcggattacggggatgtcgatgattttaactacttccaaggaggaataccagatgctgttgtcgcgttgccaaagctgagggtgctgtgggcgccgagggctacactggagggggagttgccacgtaattggagcgcttgccagagcttggagatgatcaatttgggggagaatttgttctccggcggtattcctaatgggctggtggaatgcagccatctaaagttcttgaatctgagctcaaacaagttgacaggtgccattgatccatcactcacagtgccttgcatggatgtatttgatgtcagtggaaaccggttctctggcgcaatgccagtgttcgagcaaaagggatgcccttcatctcagctcccatttgacgacttggtgtcagagtattcttcctttttttcatatcaggcgcttgctggatttcgttcgtcctcatttgtcttgggcacggatttgactagttaccacagttttgcccagaacaattttactggaccagtgaaatcgttgccgcttgctgcggataaactggggatgcaagggtcctatgcttttctggctgatgggaacaatattgctggacagttgcaacctgacctattcagcaagtgcaacagctcaaggggtttcattgtggacgtcagcaacaacttgataactggcgggattccagtcgagattggctcattgtgcagctctctagtcgttcttggtgttgctggtaatcagctctctggtttgataccaacaagtatcgggcaattgaattatcttatcagcttggatttgagtaggaaccatcttggtggtgaaattcctacttccgtgaagaacctgccaaacttagagcgcctctctttgggccataactttctcaatggtaccattccaaccgagattaatcagctgtactctctgaaggttctggacctgtcctcaaacctcctcacaggagagatccctggtgcccttgctgatttgagaaatctcactgccctactccttgacaacaataaacttactgggaagataccttctgcattcgctaaatcaatgtcacttaccatgttcaacttgtcatttaacaatttgtctggtccagtgccagcaaatagcaacacagttcggtgtgatagcgttattgggaatcctttattacaatcatgtcatatgtataccctggctgtcccatcagctgcacagcagggccgtggtttgaactccaatgactataatgatacatcatctgcggattcacagaatcaaggaggaagcaattcattcaatgcaattgaaatagcttcgataacttctgcaacggccattgtttctgtccttcttgctctgattgtgctctttatttacacaaggaagtgtgctccccgaatgtcaagtcgctcatctcgaagaagagaagttataactttccaagacatcggagtgccaatcacttatgagactgttgttcgagcaactgggagtttcaatgcgagcaattgcattggaagtgggggctttggagccacttataaagctgaaatttcacctggagtgttggtagctataaagaggctctctgttgggagattccaaggtgttcaacagtttcatgctgagattaaaactctggggagattaaggcatccaaatctggttaccttagtaggataccatcttggtgagtctgaaatgtttctcatatataactacttgcctggaggaaatcttgagaggtttattcaggagagatcaaagagacctgttgactggaagatgctccacaagattgctttggacattgcaaaagcacttgcttatctgcatgatacttgtgttcctcgtatccttcaccgtgatgtgaaaccaagcaacattttgttggacaccgagtataatgcttatctctcagacttcggactggcaaggctcttgggaaattcagaaacccatgcaaccactggtgtagctgggacttttggatatgttgctccagaatatgctatgacatgccgtgtttcagataaagccgatgtgtatagctatggtgttgtactgatggagttaatatcagacaagaaagccttggatccgtcattttctccttatggtaatgggtttaacatagttgcttgggcttgcatgcttcttcgtcaaggccgcgctcgtgaattctttattgatggcctgtgggatgtgggtccgcatgatgacttagtagagacattgcatttagcagtgatgtgcactgttgattcactctctgtacgaccaactatgaagcaggtcgttcaacggctaaagcaacttcagccaccaatccgagaacaccgatgattacacattcaacttgtagaaggtaaagatagccgtaacttgtggcccttggtgattttttttcctaatcatctgtttgactagatttatcttgtagatgccagctctgtataatacagttttcactgaattgctcactaatgtatctgcagataagaagagcagatgtaaattaacaaccttaatttcaaatatttcatttaggtttgcctgacc

SEQ ID NO: 24559 - DNA, 2064 bp, Oryza sativa
  ref <308>: DATABASE ACCESSION NUMBER: AK100001
  ref <309>: DATABASE ENTRY DATE: 2002-08-28
gaatttgggccttctcctccctcctcctcctcctcctcctcctccaactccctcgagatttctcatggcggcggcggcggcctcctcctcctcctcgtcggcggcggcgacgccgcagggggtgacggagcggcggggcatcccggcggcgtccttcgtcgaggacgtcgagacctacctccgccaggccgggctcgacgtcaactccggcctcgccttcctccaggaaaggtataggtagagatagctccagctaagctaagcctcgcgacgcgcgttccccctcccttctcttctcctcctcggggtgtcgaggcgaccgcctgccgcgcagtgtgctcggtgaggcggatcggggggggggggggggtcgcttcctcgcgtggtggtggtgcgcgcgcgcatgtggatcggcgagatggggacggcgtctcccgtgtgcggcgcttgatgggaggttcgatccaccggcggcgtcgtcttgcgttggatctatcatctatgtttgtgtcgctgtgatctatctccgcgagttcctcgggaatttaggattgcagctgacctgatgggatgggaggtcgcgctagctagtaggtgaaacattaggatttcacattacgattttattaggatttcatttttaggattttaggatttcagggttttggatttcacattacgattttattaggattttaggatttcagggttttggagttattaggatttcacattaggattttaggatttcagggttttggagtggcgttgaagggatcatgagtggctccgtcgcgcagcgcttgtcagtgctacctacctgtttgcagagttgcttaggtaatggccttggagtgtgcatacctgttgttttggttgtttagcgactcggcttggccgctccagaggtctggaagctgctgtgctgtatgactgattgatttcattgatttctttgattactcatggtttgttgatcatgccctttggtacgctagttgttggtgcctgcgtttttctgttgattatggatgatagccggatttcctgttaaagacatgttgttcggtaaaattgctggttctgcggttacagcttgtgcatcatgcttgatctgggaaaggctattcctttcttgggatcttgaaccctcaacacaagcatgtcaatcaatgtgattgtcccccatgattcggatgcgaacaactctcacgttgaccagtaatcccatttagtctcgtttcaagaattatggggttactaatatttcaaataatgctaattccaggtagttgtgctagtgcagttggcaggggcagccgtcgtccgccccgccagcttgcgtttgactcccaagcgtgctcacatccgttgttaattaatcgataccaagctccttcttagttatcctatgttttctaccttcaaataaggaatgcaacgtgtcattgtagatgtagaattttaggggatgtagacctagacatctgttggtctaggtcagttattctaatgataaaggtttttaaggtgcaccaccttgtatggagaccatttgttcgttttgatgtaacggctatcatgaatcttaactgtaccttcaaggatctaagagaccatctataaccttttaaaggataatgatatctttaaacattgtcaaatttcattactgatagataaaaagaaaataagatagtatttgaaaggaaagggattaaaatacaattaattccatcctttattgtcaaacgatttgccattttccttgctaaaagaaaaacttccttcagtaatttttgttggcactgagaaatgcaaatcttgttctggaatacaaacatttaataatcagtagtacactaggttacacaaaagaattgacttctgagactttcatcttgtgaaattgatagttaatttagctttttattttttggggtgttttctattcatcaacgacttgagaattgctagatcccaatcaactttcttttttcattcttcttatttacttgcacttgaaacagaaaattacattagaaacaacattacatttcccgc

SEQ ID NO: 24560 - DNA, 1771 bp, Oryza sativa
  ref <308>: DATABASE ACCESSION NUMBER: AK100002
  ref <309>: DATABASE ENTRY DATE: 2002-08-28
ggtctcgctcggcgctcgtctttctcccctccattccatttttccttctcctcttcaaccaaacgaaaccctagccgcctcctatagctaagctaagctccctcccctcctccctctcatccatcaatgggcaagctcctctgcgactcctcctccgccgccgtcgccgtcgccgaggcaccttcccctgcccctgcgcccccgctcctcacctggcccacccccgaccccgaccccccgaccagctgggccgccgtcgccgcgctcgaggaccagcagcgccgccgcctccaccggatctgggagcgcggcgtcgcctggaagccccccgccacgctcccgctcccgcccctcgtcttccgccttgaccacgccggggaggtcgacgccgacggcaactgcctcttcaccgccgcccgcaaggccgcctccgccaagcccgacgcgcgcgacctcaggcaccgcatcgtccgccgcttctcccacctctacgccgccgcccaagcccccgacagagacgccatcgatgcggccgtgcgccacctctacgcgccggatctcaaggccggctggggcgtccacgtcgtgcaggagctcaagttgctcgcgcccaagaccctgcgccaccacctcgacgctgccatcaacgacctcgtcgacctcggcatccaaagggaaatggcagctgaaaccatatacagggagagatgcatagctgtaaacaatggagatagttgggccaagtacatgtctgtctctggttccgcagaggacgagcacaacataatcactctgcagtacacagaggaaggcttactgaccatcgatgagaaccgggatggccatgctgcagcttttggtgatgatattgctatcgagtgcctggcaaccgagttcaagagagaagtttatgtggtgcaagcacatggagcggatgcaatggttgatgaggacaactgtgtgttcttcctaccacaccgccctagaggagaaatttgcgagccgccgatttttcttttcatgaagggaacagcatggtgtggtgctggtgccgaccattatgagcctttgatagccactgtcctccagaatgttactccagacaaggcagctgttgtactttgaggatgacttccttctttttcgctcccccagttctagtcactgatggagtcgagccaattttgtaatctgagctagattgctttattgaggagcaacgtctatgccaaagaggatctaactgtgcgccgcagggtcttgcctgcttctgaagttgtgtactatgattcgttttgtatgctgatttgattagtgtgtgttttgataggttctgactgttgaggaggagattcagagtgtggtagaatatcggatctagtttatgctgtgaattgttgtgcggcattgtaaaccggcattttggtattgcctcatgcctattgtgaggttttttttttttttggttgcttgcgttctagggacatgattggacatttgagaatgaggatcattcttttcagttttgggctacccgttgttccagtccttgctgttgccacaatctgactggagcggggatgaattgatttgcaaaagagatgtaatacttgttttctcatgcaaattgtaccaacattgcagagggatatggctgctgtaaaagtctcttctttcctttgcaaaaataggatcatccttcgttgtatttatagctttgaactcatttcatgcatgaggaaaccatgaaagaacgctacttaagctcgtg

SEQ ID NO: 24561 - DNA, 3110 bp, Oryza sativa
  ref <308>: DATABASE ACCESSION NUMBER: AK100003
  ref <309>: DATABASE ENTRY DATE: 2002-08-28
ggcttggaaaagctctccattctccgcaccgcaccccgtcgccgggaagcctcgaacaatgagcgccgccgccaccgccgcagccgcctcggctgccaatgtcgccgtcatcgggggcggaatatcgggcgctgtatgcgcgtcgctgctggccgcgcgcggcgtggcggtgacgctcttcgactccggccgcggggccggtggccgcatggcgcagcggagggaggtgatggaggacggcacggagctgcgattcgaccacggcgcgccatacttcaccgtgagcaacgacgaggttgctcgggtcgtgagcgggtgggaggcgcgggggctcgtcgccgagtggaaggccatgttcgcgtgcttcgatcgggaggccggcaaattcactgatttcgagaaggagggaacaattaagaagtatgtgggagtgccaggcatgaactcaatatgcaaatcactttgtctagaggatggtgtggtggccaaatttggtgtcaccattggcaggatggactggattcaagataggagttcatggttactggctagtttggatgggagagatcttggccattttgattatgttgtagcaaccgataagaatatagcatcaccaagattttctgggctaactggaagaccaccgcctcttgatttgtcattgcttccacaattgtcaatgatgattcaggatatccctgttcgcccctgttttgctcttatgttagcattctcagagcctttgactaaggtacctgttcaaggtttctcattcaataattctgactacctaagctgggccttttgtgatagtagcaagccaggacgtgctcatgtaccgcttaacagtcagtcttgggtattgcattcgacagctgagtatgcttcaaaggtaatcaataatattggtccacggaaaccttcagctgatgcccttgctaaagtggcagaggaattgctcaaagaatttcaggctacaggattgaacataccacagccaatctttatgaaagcccacagatggggcagtgctttcccagccatcgctataagtggagacgacaagtgtgtttgggataagagcatgaaattggctatttgcggagatttttgcacaagtccaagtgtggaaggagcagtccttagtggcatgagaggagcctccaaaatactacggtgtttaaactttccgtcagggttgtgacttaaacagttaatcaaaccccaactgagagttgagggccatattgtttaccgaccaattaggtatgaaataagaaatcagtaccgatggcaatgttattttttatgaagtttatttgctttattatctattccatgtcatatagaaaagccaggttccactggaagtgctgtttctctgttggcctactatgccttggactaaaacacactaactacaagtctaggttgtctgccagacagaaccttgtatgagtgcacaagatgaaatgcatgatggatattgtaaagaagccatacaccaaccactcctgttatctggttgtgtatcatggaatgtcaccaaatattactagggggttagggaacatgcttgtcatgcaagtgatgtagcagaatagcctttggagaatgcttgctgaacatattaatttgacagaaatgaaggaacaatagttataattgatcaagatttgttctgtcagttggtctcaatctcaattcggtgatactttatacagatatgtggaaatgtctgcataccctttatattggattctacttcctaaaagttcagaagtctaactgtagcacattcaaggtgacatgattataatacggtcatgtaatgcttgaaatgtgagtttaaatatactttacagttacaattttaaatcccatttcattgaggacaaagttttgcactccaacaatttcttagcatcaggaaaggctatgatttttgtggtccataggtcctgtaaggaccatcatatctttaaactgtcatatttagatattccttatagcttttttgtgttcaagtcttctacccttgcaatgatatcagatgctgcccagcgacctaatataataaatgtctaagtgcactgttgggagaaatcttttccaaccagacttcatattcttatagctttgtttttaatctaatttgcccaacagagcaactttcagtttagtttggtagtgtctactgatgtattttggtacaatatgtgctctattgtgagtgaataaataggttagtaaattcacactactatttggagctagaaatgctcaaagcaattgtatcgctgcacataatggttccacatcttcaacagaaacaggtacgattttcagtttaaaagaaggctttgcatggtttgttccctatgtaatcatttcaattatctgttgcatattctctgagttcatcttattagcctttacattcctatatccttgcatccaccttttccttttcttgttgaagaattttgggtttgtcccacaggaaattttcatgtgcaaattggtcacccttcatgagcatctgtgaaaaaggtgagcagcacattttttgaaagcttcatccagggtcccaactgaatcgaagtacgctacgctgctcacaacagtcacagcagatgcatggtcctggcatggtggcgtacgtgtggccacccaatcatatatatctatcaacctgtcaagagagtatatatatgaggcaaatcacatttgaagacaaatttgctggatttggagcatctcaagccataaccgatgcccagctcggcagctctccaggcctccacgttgcatgaagagtgccacctatttcgacggatcaaagaatacatcaccagcccgtcaacacgcgcacctcggatttggtgtttttacttaaagtgagttaagctgcatgcttcttgcagtcgcagatccgggtccggcctgcccagaacctgtctctccgctgcgttaaaggagtaattagcatactccctccgtgttcgtaaataaagtcgtttagaacaatatttaagttaaatcttgataatataaatcataaataactctcaagttgttgagtttgaaaatataaaaattatacg

SEQ ID NO: 24562 - DNA, 908 bp, Oryza sativa
  ref <308>: DATABASE ACCESSION NUMBER: AK100004
  ref <309>: DATABASE ENTRY DATE: 2002-08-28
ggtcaaacacacacacacataggcaacaatggcaagcaaacaggcaatgaactctgccttgttctctgcattggttgttgtggtcttggcttctgctgtgaatgggcaactaaacccatgccaagcaccggcaccaaccccgactggaactccagccccagcaccagccccggtggtgacaccgacgcccgcaccaactccagtcccgacgccatcgccggcaccaacaccttcacccaccgttgcccctgtcaatccgccatctccgacgccgcctcccaagtgtccgctggcgttaattaatctcaacgcgtgcattagtgtcggtcttggcaacccgctcttgaaccaggcgtgctgctcgcagctctccagcctcccgagcgacaccgctgctgtctgcctttgcgaagccatcaaggttaatgctctcgtcaatctgaaggtcaaaatccccgacatccttaaagtatgcgggaaggtctccgctgtagtttgtgtttaataagtacgtcgagagatagcgtgcatatatatacgtacgtacgtatgtatgtacatgctatacataggtgtgcagcatatatatatatatatatatatatatatgctgtgtgcttgcctctacatatatactgtattaaacttttggacgacccaaatatatatccgccagcagcatgcgtgcgcgtacgtgccgtgcttcatggaggtagggtcttaatatccatatatgtttaagaataattaagttacaggatctgggattgtgctatatatgtatgtgtacacacacgtggcttgatcatatcattatgtgtacgtgctagaagatttgattgtgtactgatctgtgtgtatgcatgcctgcctacaaaatcaaaatatagtgggtacaagtgtatgtg

SEQ ID NO: 24563 - DNA, 3799 bp, Oryza sativa
  ref <308>: DATABASE ACCESSION NUMBER: AK100005
  ref <309>: DATABASE ENTRY DATE: 2002-08-28
ggctctaatcttcttcccctcaacccgctccaaaattcccccgcctcccactccaaaacccaaaaaaatcccgcgcggccgcgtgaagccgtgaatctactcctcccttcctccgcgcccgcgcgtcgccatgaatccgcaggcggagggcgatgcggcggcggcggcggcggtgctgggggcggacccggcggggctgacggcgctgctgggggacctgacgtcgccggcgaacgaggcgaggtcgagggcggaggggatgttccacgcgctcagggcgtcccacccggacgcgctcgcgctccgcctcgcgcacctgctgctctccccggcgcacccctccgcgcccatggcggccgtgctcctgcgccgcctcatctccccggggtcgcaggcgttcgtctacccggggctctcccccgccacgcagtcctcgctccgcgcgctcctcctctccgcggcgtccgcgacggggctctccaagtccatctcgaagaagctctccgacgccgtcgccgagctcgcgtccttcctgctgccgtccaacgcgtggcccgacctcctcaccttcctctacaagtccatcgcctccccatcctcgcctccggcgctgcaggagtcggcgctcaacatcctagcccggctggcctcccatctcgccgcgggcttccccaacctccacgccctcctcctctccgcgctctcgcacccgtcgtccgcagatgtccgcgtcgcggggctcaacgccgctatcagcctcatacagtctctcccctctgccgccgaccgtgaccagtttcaggatctcctcccagccatgatgcgcgccctcgctgaatcgctcaactgtgggaacgagggctctgcacaggaggcgcttgagatgatgatcgagcttgcaggtgcagaaccacggtttctccgccgccagctgcctgacgtggttggttctatgttgcaaattgctgaagcccctggattagaggatggtacgcgacaccttgctgtcgagtttgttgttacccttgctgaggcaagggagcgcgcgcccgggatgatgagaaagctgccacggtatgtgggccggctatttgcggtgctcatgacaatgctgctcgatgtccaggatgaacctgcgtggcatgcagcggtgtcggaagaagaggatgctggggagactgggagctatgttttcgcacaggaatgtcttgatcggcttgcgattgctgttggtgggaatacgattttacctgtggcagctgagttgctcccatcattttttgcttctgaagagtggaagagacgacatgcggcactggttacgatagcgcagattgcagagggctgtgctagagtaatgattaagaatctggagcaggtagttggtatggtgctgaattccttccgggatccttatcctcgggtgagatgggcagctatcaatgcaattgggcagctttcgacggacctggggcctgagttgcaaaataaactgcaccatgttgtcctgcctgcattggcttcatccatggatgatttccagaacccgcgcgtacaggcacacgcagcttctgcgattctaaacttcagcgaaaactgcaggcctgatattttgacaccatacttggatgggatagttgggaaactactgtcattgcttcagactggaaaccaaatggtgcaagaaggtgctttaactgctttagcatcagctgcagattcttctcaggaacacttccaaaaatattatgatgcagtcatgccatatctcaagtctatactcatgaatgcaactgacaaatcaaatagaatgttgcgggccaaatcgatggaatgcattagcttagttggtatggctgttggaaagcaaaaatttaaggatgatgctaagcaggtgatggaagttttgatgacattgcaaggatctcagatggaggctgatgaccctataacaagttacatgctgcaagcatgggcgagattgtgtaaatgccttggtcaggacttcttaccatacatgaatgttgttatgcctcctctgctccagtctgctcagcttaaaccagatgtgagtgtcacatctgctgggccagaagatgaaaatggtgaatctgatgatgagggtgttgagactattacgctaggagacaagagaattggcatccgaaccagtctgctggaggaaaaagcaacggcatgtaatatgctatgttgttatgctgatgagctcaaggaagggtttttcccatggattgatcaggttgcaactactctggttcctctcctcaaattctattttcatgaagaagttaggaaggcagccgtttcagcaatgcctgagcttctacgttcagcgaagttggcaatagagaagagccaatcgcaaggtcgggatgaatcttatcttaagcaactgtctgattacatagttccagctcttgtagaggctatacataaagaacctgacacacaaatatgtgcaagcatgctggaatcgctgaatgaatcaatacagttatctggaacacttcttgaggaaggccaggtcagatctatagtagatggaattaaagaagtaataactgcgagtgctctcagaaggagagaacgaacagacagggcaaaagctgaagattttgattcagaagaagaggatctactcagagaagaaaatgaacaggaggatgaaatcttcgatcaaattggtgattgtttgggcactcttgttaagacgttcaagacttatttccttccattctttgatgaactttccgtctatttgacacctatgttggccaaggacaaaacagtagaggaacgaaggattgccatatgcatttttgatgatgttgcagagcactgtcgcgaagcagctgtcagatattatgatacatatcttccttctttattagaagcctgcacaagtgaaaatccagatattagacaggctgcagtttatggtattggcatttgcgctgagtttggtggctctgcatttaggcctcacactggtgaggccctgtccagactatacaatgtaatcaaacatcccaatgcgttggacttggataatgcgatggcatatgacaatgctgtttctgctcttgggaaaatatgtcagtttcatcgtgatggcattgatgcatctcaggttgttcctgcttggttaagttgtttgccaataaaaaatgacttaatcgaggccaagatagttcatgaacaactctgtacgatgcttgagaagtcagatagggagcttttgggtcataacaaccagtatcttccaaagattgtctctatttttgcggagatattatgtgcgggtaaggatctggcaacagaacaaacttttagtaagatggttaatttgctaagacagcttcagactacattgcctccttcagtactggcgtcaacatggtcttctttgcagccgcagcaacagcttgccctacagtctgtgttgtcatcatagctgaacagtaacctcagcaatgttgagcatgtggccttcacatattgccttcttttttgggttttcatgtggttttgtgcttgggttcctggagtttgtgcagcatacaaatgccctgagcttttgtatgaagggcatggtttgcatcagaagtgtatactgtcacagaacatcatggatgtgtatggggctgagcaatctctgcttcacagcaagtgaagttgtaaagcaatatgttcattttactaggaattagttgggttgaagaaaatgtaaattaacaattttgatcgttgatgttttgatatcatattatttcaaacc

SEQ ID NO: 24564 - DNA, 1740 bp, Oryza sativa
  ref <308>: DATABASE ACCESSION NUMBER: AK100006
  ref <309>: DATABASE ENTRY DATE: 2002-08-28
ggcatcccctctctcttttcgtgagcagggaagagcatcccctctctcttttcgtgagcagggaagagggggggggggggggggacgggcgggcgggcgatgaggcgaggaggggcgccgcggagctcacccaccgagagccgcgccgcaagcatgctgcctctcggtgaggaggggtgctagccccgccgctgcccgcgcggttaaattgctcgccgcgccccgcacccgcactcactccaccaccaggcggggcaagaggagagggttggattgatatgggttccaatctcaagtaccgtgctggcctcgtcctcatcgtcgccgtggtgctcatatgggtcacctccgcggaggtcacgcaggggatattcactaaatacaagcaaccctttgcaattacttacctgggggcctcccttatgatcatctatatacctctttcatttttaaaggattttatatgtaatttgttgagaaggtcttcttcaagtagtagagtttcaaaagttaccaacaaatcttctttcggtggttgtgctcctctgaagaatggtgaattccagaagatgttggaaatggaatctcaaaaaactatagtcataaactatactgatgtggatattcctgtaatagaagagacaaaacctcttatatgtggaatcactgaattcgatgacgttttgaaggagcaagaactttccactaaggagattgcaatgtatgggttgtatctttgtcccatatggtttgtgacggagtacttgtcaaatgcggcacttgcaagaactagtgttgctagtactactgtactatcttcaacgtcaggactcttcactcttttcattggtgtgctacttggccaagattctataaatgctgcaaaagttattgctgtttttattagcatggctggtgtggtaatgacaaccatggggcagacttgggcatcagatgaatcagaaatcagcaattctggtgccactcagagaactcttctaggtgacatgtttggtcttctgtcagctatgtcatatggtttattcactgtgcttctaaaaaagtttgctggagaggaaggagaaaaggttgatgtccaaaaactgtttggctacctcggacttttcagccttgttcttctctggtggcttgtctggccattgaccgcattaggcattgaaccaaagtttacaataccccactcagccaaagtggatgaagtggtgttggcaaatggccttattggaagtgtattgtcagactacttctgggctctttctgttgtttggactactcctttggtggccaccttgggcatgtcactcacaattccactagcaatggtggctgatatgatcattcatggtcgtcgttattcagcggtctatatctttggttctgtccaggtattttctgggtttgtcattgcaaatcttgcggatcgcttttcacgttttctagggctctagtgtcacgaaatcaaccaggttttattagagtgtacatctgtgtggatcgttagacaaatacccttgtttcataagattgcgaaaatgttactgtagttttttttttctcttggccctttacacacaggaatggaaaatttttgtggcggtgaaatagaaaagagtgacttgaagaaactttatgctgtagcaacccttgcaactgtaaattcttttgctataaaatccttctcaatgtatactactgtagcttcctacagtagacttgcgt

SEQ ID NO: 24565 - DNA, 1317 bp, Oryza sativa
  ref <308>: DATABASE ACCESSION NUMBER: AK100007
  ref <309>: DATABASE ENTRY DATE: 2002-08-28
gatcttcgaaatgcggcccatgacgagcccacctctcctctcgccctcctcctcctcctcccgtctcctcctcctccgcctcctcctctcccgccgccggagccccgcctcgcgctcccctcctcctcccctccgccgccgcctccctctcctcgctgcctccatgtcctcctcctcctccaccgccgccaccagaaaccccggctccgtcgtcgccgacgccgacggcctcgcccgcaaggtcgccgccatccgcgccgccggccccgctaagctccaggtcatcgcggacttcgacggcacgctcacgcggtactggtacgacggctcccgcggccagagcagccatgggttgctgaggcaggggaacgaggagtacgacgccaagagggaggagctgttcgagcactaccaccccatcgagatctgccccgacatcccgctccccgagaaggccaagctcatggaagaatggtgggagaagacacatgctctccttatcgaaggtggacttacatatgaagctataaggcaatctgtggctgatgctaaaatcacttttagagatggagtggtgaagctctttgagttcttggaggagagagatattccagtattagtattttctgctggacttgcagacataattgaggaggtcttccggcagaaactccacagatcattcaagaacattaaggttgtgtccaacaggatggtcttcaatgaagaaggtcgtcttgtttcatttaaaggaaagactattcatgttctaaacaaaaatgagcatgccttggacatggcagctccagtgcatgacaatttgggtgatccaaatggatatactgatgactattcgttggtgaagaagaggaccaatgtgcttctccttggagatcacattggcgaccttggaatgtctgatggtctaaactatgaaaacaggattgctgttggatttctgaacaacaacatcgagaaatctctaaaagattactccgaggcatttgatattgtctacttgaatgacgcgccaatggtgggagttgttgagcttgtatctgaactatgtccttaaccaaatgatgttttgctgagcttagaagccgcatccgcctcccgctcttgctgaaatctgggaatcctattccccacttcactaaccggctgggtttgttcaataagaagcaattttgtacaggcttgacatcaagcaagccaagcagccttttgaaccaatatctccttaagccaatccaaacttgtatgaagtccagaacacatttgtgaaatggaatttcaaatttggttttggtcccc

SEQ ID NO: 24566 - DNA, 3590 bp, Oryza sativa
  ref <308>: DATABASE ACCESSION NUMBER: AK100008
  ref <309>: DATABASE ENTRY DATE: 2002-08-28
gagtgcagcgagtgatctcatctcaaactcaccatggcctcgccgccgccggagcgggcgccggcggcggaggctcgccggcgcaggacgacggtgtaccacggccaccgccgaccgtctccgcaccgccccaccgtccgaggcggcgtattctccgacctccgcgccaccaccgccgcctcctcccaaccgaggcctccctcctcctcctcctcctccgccccattccgcctcgccgactgggacccctcctcctcctcctcctccacgccttctccttccgccaccgcggccgcccgccgcctctccccgctcgcgcggttcctcctcgacgcgctccaccgccaccagcgctggggcccgcccgtcgtcgcggaactcaccaagctccgccgcgtggcccccgagctcgtcgccgaggtcctcagcgctcgcccgccgccgcccccgccgctcgcgctcccgttcttcctgtgggcgggacggcagaagggcttccgccactgcttcccggcgttccacgcgctcgcctcgctcctctccgccgctgggctccccgccgcggccgaccagcttcccgacctcatgcgagcccatggcaagccggtctcgcattcccagctcaacctcctcgtcaggctccacaccggcgcgcgtcgcccgctccgcgcgctccacgccctccgccgcttccgccacgagttctccgtgcagcctgaggtccacgcctgcaaccgcgtgctgggagcgctggctgcggctgggcatgttgatgataccctcaagctgttcgacgaaatgtcgcactgcagtgtgcggcctatgccggtgacattcgcgatcatggtgcgtgcgctggcgcgggcggggatgacggataaactcctggagatgattgggaggatgcgggctgaggtgtgcagaccggatgtgtttgtgtacaccgcactggtgaagacgatggttcgctgggggcatatggagggttgcatcagggtttgggaggagataagaagggatcatgtggatccagatacaatggcttacaccacaatgatagctgggctatgcaatgcgggaatggtggagaaggcggaagaattgtttggggagatgaggaggaagggtttgctggtggacaggatggtgtatgcgtctctcattgatgggtatgtctccacaggaagggtcagcgatggttgtagagtgttgaaagagatggtggatgctggttaccgtgcagacctggggatctataacacactgattggcgggctatgtgagatagagcgggaggataaagcacacaagatgtttcagattgtcgttcaggaggatctaataccaagctccgagactgtttcaccattgctggctcgttatgccgataagggcgagatggttaagttttttggattggttgataaactagtggagctaagcttgcctatagttgaaattttagtggacttcctgaagctctttgcatgcaagagtggcaatgaattgaaggctgtggaagtttttaatgctttcagaagaagggggcattatagtgttggcatttataacattctcattgagaatctgctgaagatcaaggagaggaagaaagcacttgtgttgttcgaggaaatgcaaagttcagatgactgcaagccggactcatgtacatatagccatatgatcccatgttttgtggacgaaggaaatattgaagaggcttgctcgtgctacaacttgatgatgaaggcagtttggataccaagcatttcagcctattgtgctcttgtgaaagggttgtgcaaaaaaggagagataaatgcagctatttcacttgttaaggattgtcttgggaatgtggaaaatgggccaatggaattcaagtacaccttgactattcttgaagcttgccaatcaaaaagcccagagaaggtcatcaaagtggtggacgaaatgattgagttaggttattccatagaagaaattatatattctgctattatttatggtttctgcaagtatgcaagttcaactgaggcaagaaaagtactatctaccatgagagatcgcaatattatttcagaagccaattatattgtttatgaggatatgttgaatgagcatttgaagaatgtcactgcagatttggtgatatctggattgaaatttttggatcttgaatctaaattaaaatggagaagcagagatgattgagaaatctttgtacagttgctacatactaggtacaacctgcttcacttcacttgtgatttgtgctatttagatattgtattatgtgttacctcttgtgagttgaacattgcattatgtaataaatagtcctaaacacttctagggatctcataacctggttattccatggtatgtttagctagagttgatatccatgggcctctggtttgtaccaaattatggataattcatacttcatactgatcctgatcatttttctcaagtattttttttaagaaaacacaaatctggtattccaccaaaaaagtcaacatgtgggagtggacgtggatgagtttgggaacccttgttgtgcttatccctccatagatttatcatgagaaaatttaatgatactgtagtatgtagaacataagtatgtatgttacttgacagacagttatttggaaaattcatgcctgcataatgttgtgtaaattcatgcctgcataatgttgtgggcatataggagatattgagtaaccaatgatggttctcacagactcacacagtcacactaacgaatgggcctgatcactttacattattggtgacattatgcagagaaagtaggtaaaggtagaagtatacaagttctctaatgagcaacgacggcactacagatgaatgagccttacagcataggtgttttttgtttacacaatttggaggaacaagcagtgtatacaaccagttccttctgagtttgtagtttgagcaggccaacttggtctgaggcatgttagaacttagaaagatgtgagttgcaagctgagaaaatatgatttgagtactgattagctaacctcaagcagcttggttcttgccctcccatatcaagtcccgatgcttaataaaaacagagtgcatggtttcctgccgtttaacattcattgtttatttatcttcaatttacgagctggtgttgagagcctgaactaatggactaattttgtgagtcaactcttccatgatatgtcctccgttttagtatttaggattcgactggaccatttatgcaaacacacaacactgacacctatgtccccagttggccagtcacttggttaatggttacataaatccatgcacacccttgcttgtagctaagtattatttcattttacttttaaattcaagattgccaatcttttgtgtaattgctaatagcagtactgtattttgacatagcagagataattaaagcaattttcatcgttttgttttatcatgtctcaatattttatgcatgtatggtaaatggtaatgtgccttcatccctgtatcctactacatatgttgtaccattagcaagttaaagaaacacgcacacc

SEQ ID NO: 24567 - DNA, 1714 bp, Oryza sativa
  ref <308>: DATABASE ACCESSION NUMBER: AK100009
  ref <309>: DATABASE ENTRY DATE: 2002-08-28
gtatcctctcaaacatttccaaagcatacgtctttatgttactcaagtcattctatcttggtgccttctgatgcaaattattgtagtgtaaggcactactatttatttagacccatcaatcctttatatggtttcatatgaccagtatttatattgctcaagcgcatacttcagatagctttatgaactgaaccctactcttttgtcttggcagttggcacaacagatcagccctatagccaaaaaaacaaaccttctaagattatagcttttgcatagtcaaattgcatgtatgggcataccagttctaaaagctttgtaaatgtctttgaaactagtcgttggagggaagacaaggctcgttcactccacagaagagtacatgtgctagaaaaggcagccagcttaaaaacaccaactactttcttaagccttatttagtttggttgcctacgctgatctccggcgtgctatgcaacaccccctgcttgcttctttctgttcgacttggagcttgcagcctccctacccttgcttatgacctattcttaatagaaccgatctgattttcactacaagaggaattccgtgcttctgccggatcctccctatctcctgatcaagcttgtgttggtaaatactccctccgttttttaatagatgacgctgttgacttttaaacacatgtttgatcattcgtcttatttaaaaattttatgcaaatgtataagatacaaatcatgcttaaattacgttgagtgataaaacaactcacaacaaaataaattataattacgaatggtcaaacgtctgacaaaaagtcaacggcgtcatctattaaaaaacataatgtagtactccctccgtcccataatataggggattttgagtttttgcttgtaacgtttgactactcgtcttatttaattttttaaaaaaatattatttattttatttgtgacttactttattatccacagtactttaagcgcaacttttcatttttgatatttgcaaaaaaattttgaataagacgagtggtcaaacgttgcaagcaaaaactcaaaagccctcatattgtgggacggagggagtattgtttagtatggcctatagtagtacactgtttgggacagagttagtgcccttctcacaacatcccgtctggcggaaactatggagggggtggctagcgcgcgcgtgggcaccaggaaagtagctggcgagcattccccccttccctttagtcttaactacctatattagttaatatacttaacagtaatgatagtaattaggaaagattcgggagattttttttactaacagattaaaaaaaatttaagttagatttgaaaactttcgatttaagttttaaattttaaagtcaaattttaaaaactttcaactcatatttgaaaactttcaacttgagatttgaaaactttcaactcagattcgaaactttcaactcaagaatcgagattcgaaaactttcaagttcggatttgaaaattttgaaaactttcaatttgagatttgaaaactttcaactcgagattcaaaaacttccaaatgcagatttgaaaattttgaaaactttcaactcgagatttgaaaactttcaaatcgagatttgaaaactttcaagttcagatttgaaaactttcaaactcaaaatatgctaaagataaaaaaaaatcagaaaaaagtg

SEQ ID NO: 24568 - DNA, 2934 bp, Oryza sativa
  ref <308>: DATABASE ACCESSION NUMBER: AK100010
  ref <309>: DATABASE ENTRY DATE: 2002-08-28
gatccatgcctttgtgttagtggtgatagtagagattttttttttaaaataacaatctttctttgttcacaaatactcgcatctttctttctttcacatcttttatagattggcactaccacttttcctttttgttctatatgcaaatatatttatttttgtatgtaaagttgtttaggccttttgttcttaccatctatcccttttcagttgggaatatgctacatcttatagttgaagcctgtatttcaaggaatttgattgatacatcttcttacttatggcccggctatgttgtatcatctgggcatttgaaagatgcgacattaccccaagaatccccctggttaaactttatgcaaggagcaccactttcaggtccacttattgatgctctgattgctactcctgcttcaagcaccacagaattggataggttatatcacatagcattaaatggttcagaggaggaaaaatcagctgctgcaaaaattctttgtggtgcatcatttgtttgtggttggaatatccaggaatatgtggtccgcatggtggtcaagctattatcacctccattgccctcaaattcctcaacacagggcagcatgagccactaccttgctcagatgtctacattaaatgcactcttgcttggtatttcttatggtgatgctatccacattatttctttgtatggaatggttccagatgttgctgcagctttaatgccaatctgtgaagtttttgggtccataccacctccatctaaccacaagcctgccattgttggtgaaatatcagtttattcggtcttctcttgtgcatttctttgtcttcttcgactgtggaaattttataaacccccacaagaatactgtctagctggacgtggaggctcagttagattggagcttactctggactacctgctgttaatgcgcaataaccatattgactttgcaaattcatctgccagtagtagaaactctagcaacaacataggtccattaaatgaggttcctgctcaaccactttatattgattctttccccaagttaagggcttggtattttcagaatcaagcttgcatagcttcaaccctttctggtctttgcaacaaaaatcctgttcatcaagttgcaaacaagattttgagtatgatttgcagaaaaatgaacaaacctgttgtatcatctggcaatctttcatccacttctagcagtagtgtcagtggttcctctgtaagtacaccagatgattaccaaaggccaacagttcctgcatgggaatttttagaagctgttccttttgttcttgaagctgttcttacagcatgtgctcatggacggttttccagccgagacttgactacaagtttgagagatcttgtggacttcttgccagcttctattgcagcaattgttagctacttcttagcagaaattacacgaggaatctggaaaatggtcccgatgaatggaactgaatggcctagtcctggtgcttctcttcattccatcgaagcagaaataaaggaaattctcgcatctgctggcattcagattcccagctgctatccacgtggtgtaccaccaatgcttcctttaccaatggctgcgctggtcagcttaacaattacatttaagcttgataagagttcagagtatatccatgcgatcagtggccaggcactagagaactgcgcagggggcagttcctggccaagtatgcccatcatagcagccttatggacacagaaagtcagaagatggcatgactttatcatcctctcttgtctgcgttctccattcggcagagataaagatgcagttgcacagctcatccaaagttgcttctcatcctttctacggtcctcgtgcagtgggtctgactttactgcaaaccgtggagttggtgccttaatgggagatgcaatcaccggccaaggtcttcagcttcccatggctcctggtttcatttacctgagaacttgtcgaacattccatgacacctactttgtgagtgaggtaatcctgaagcaagtcattgagtgggctgacaaacttgcaaatggattctcttccagtggccctccacagttaaaatcaggacgcacgccactatccagcgctgcatgtatggcgcatcaagttgcgatgcttggtgggggactcctgtgtgttgcaggtggacctcttctggtccaggtattgtatgaggagaccttgcctacgctgctgctatcagctcgagaagagagtatgaaagaccctggaccagtttcaagcacactccaaggttacgccatggccaacatgctcttcttctgtggtagtctgctctggggagcggaaagaacttctcctgtcatgaaattgtctttcctgtcaagaaggccacgagtggtgggaaaccatatggatttcatggcgggtgtattggatgggcacattcttctgggttgtgaccatggcacctggaaggcatatgtatcgcgctttgtgttcctggtggtgaagtttgtcccgtcatggttgcgggacattaaactggacacgctaaagaagatagcgtctgggcttcggagttggaatgagcacgatcttgcattggctttacttgagcgaggaggacctcaggcaatctccactgtagtcgacaccttgttgtgatctttgcctcttgacatttcccacccattatctgacataggagtttttgtaatcacatttgaggccaggacttgtgtagagatgtcttctggttcaggatttctcagtcgagctatctaaaatttctgaattctgtcagcggagagatgctagctaatcttgtttgctgggtgcattgctaacgttgctattttcagggtagcattgtgaacccaaaatcatacagaggccttgctcgacaacgtatccagttagaacttcc

SEQ ID NO: 24569 - DNA, 1362 bp, Oryza sativa
  ref <308>: DATABASE ACCESSION NUMBER: AK100011
  ref <309>: DATABASE ENTRY DATE: 2002-08-28
gcgcatctccgctcctcgaccgcgagagaggagaggagagagagagagagagagagagagagagagaggcgttgcgagattcatcaggcaggcgcaggagaggagaggagaggagaggagattcattatgggggtggactactacaagctgctgcaggtggagcggggcgccaccgaggaggagctgaagaaggcgtaccggaagctggccatgaagtggcacccggacaagaaccccaacagcaagaaggaggccgaggccaagttcaagcagatctccgaggcctacgaggtgctaagtgattcccagaaacgagcagtctatgaccagtacggagaagaggggctcaaagggcaggtgccacctcctggagcaggtgggcctggtgggtcttcatactatgggggtgatgggtcgacgttccggttcaaccctcgaagcgcggatgatatatttgctgagttcttcggattttccagcccattctcaagcatgggtggcatgggtggtatgggtggaggtgttgacaggggcatgcggggatcaaagtttgggatgtatgacaatgatatatttgggtccttctctcagttccctggtgaggcatcaatgcatgctccccaacggccccagaaggctgcaccaattgagaaccgactgccttgcaatctagctgacttgtacaaaggcaccaccaagaagatgaaaatttcacgggaaatattagattctagcgggagaaccatggttgttgaggagatcctaacaatcgacataaaacctggatggaagaaagggacaaaaattacttttcctgaaaagggtaacgagtctccgcatgtattcctgcggatattgtattcgtgattgatgagaaaccacatgatctgtttacacgagaggggaatgatctcgtcatgacacagaagatttccttggctgaggccttgacaggatgtacagttcaggtaacagcactagatggtcggaacctaacagtaccaatcaataatgtcgtctaccctggctacgaggaggttgttctccgagagggcatgccaattccgaaggatccatcaaagaagggaaatcttaggatcaagttcaacatcaaattcccctcaaggctgacgtctgagcagaaatcagaaattaagaggctactagcttcttgaggaacacaatataccgttaggttgtctggttttttgggtgcactggggagaccaatcagatgttaagctgggaaatgtgaataccatccaaagactcattttttgtgggttctggttattccacctttgtaacttaaaattgtcaattttggcagaataattcatcaaaatagataattctgtgtc

SEQ ID NO: 24570 - DNA, 1646 bp, Oryza sativa
  ref <308>: DATABASE ACCESSION NUMBER: AK100012
  ref <309>: DATABASE ENTRY DATE: 2002-08-28
gggtgccgtcgttcccgcagccggccagtgcggcggcggcgacgcggccaataccggggagctacggcccgccgctgctcggcccgctccgcgaccgcctcgactacttctggttccagggccccgacgacttcttccgccgccgcgccgccgaccacaagagcaccgtgttccgcgccaacatcccgcccaccttccccttcttcctcggcgtcgacccgcgcgtcgtcgccgtcgttgatgccgccgccttcaccgcgctcttcgacccggccctcgtcgacaagcgcgacgtcctcatcggcccctacgtccccagcctcgccttcacccgcggcacccgcgtcggcgtctacctcgacacccaggaccccgaccacgcccgcaccaaggccttctccatcgacctcctccgccgcgccgcccgcaactgggccgccgagctccgcgccgccgtcgacgacatgctcgccgccgtcgaggaagacctcaacagggcccctgaccccgccgccgcctccgccagctacctcatcccgctccagaagtgcatcttccgcttcctctgcaaggcgctcgtcggcgccgacccggcggcggacggcctcgtcgaccgcttcggcgtgtacatcctcgacgtgtggctggcgttgcagctggtgccgacgcagaaggtgggcgtcatcccgcagccgctggaggagctcctgctccactccttcccgctgccgtcgttcgtcgtcaagcccgggtacgacctcctctaccgcttcgtggagaagcacggcgccgccgccgtgtccatcgctgagaaggagcacggcatcagcaaggaggaggccatcaacaacatcctcttcgtgctcggcttcaacgcgttcggcggcttctcggtgttcctgccgttcctggtcatggaggtcggcaagcccggccgggacgacctgcggcggcggctgcgggaggaggtgcgccgcgtgctgggcggcggcgacggcggcgaggccgggttcgcggcggtgagggagatggcgctggtgcggtcgacggtgtacgaggtgctccggatgcagccgccggtgccgctgcagttcgggcgggcgcggcgagacttcgtgctgcggtcgcacggcggcgcggcgtacgaggtgggcaagggcgagctgctgtgcgggtaccagccgctggccatgcgcgacccggcggtgttcgaccggccggaggagttcgtgccggagaggttcctcggcgacgacggcgaggcgctgctgcagtacgtgtactggtccaacgggccggagaccggcgagccgtcgccggggaacaaacagtgtgccgccaaggaggtggtcgtcgccaccgcgtgcatgctcgtcgccgagcttttccggcggtacgacgacttcgaatgcgacggcacctccttcaccaagctcgacaagcgggagctcactcccagctaagctttgctgccgccattctctcactcgatctccatgcacatatgcatgaagaaattaattaaattcaagttgctagctccattttttctctttgagctgctgataaaaaaaacatctctattcttctgtgcaataagccaataattaagcattaatcagagcgtacaagtaaaaattgttttc

SEQ ID NO: 24571 - DNA, 2602 bp, Oryza sativa
  ref <308>: DATABASE ACCESSION NUMBER: AK100013
  ref <309>: DATABASE ENTRY DATE: 2002-08-28
gacttgaggcaaggcaatgccatgacaacatcttctcatcgcaccacttgattctttcatagtagtatttctcaacgcagattgatttgatttgatctgatctgaacagtgtgtaaatggagcatctcaagaaaggagtggagtttggggtggcctccctgcagagatgccattctctgtcgtgtcaaatggcagagagcacgcagatcgacgagcggaagacggggaaccgatgtagcaaggagaaatcacggcgtccgaaatgctgccatcctgcagagatgccggtcatccccgagcaggcaatggagttcctctctcggacatggagcccttcctcctcggatctcttccaaatcctctctcccagtagcctgggaacatcaccggtaaaccgtcaggaagacgaggtgatcggagacgaagacgttgaggtacatggggacacggttcgatttgatggaggcagaagccaagtgttcaaccagacatggggaattctagccagtgggaagtctagctcaggacagcacaaacataagaaccaacccacctgggtaagggcatatgtagcacagggagatgtgacaacactaagagtaaggtcaatagtatagccaactactggctccaaaacatctatagccaatctaatagctcatttatataatagttaactataaaaatatactacaccattaatacccggtcccacctctcatacacacataacatcttggagtatgtgttgcagccggctataaatctgtagcccgctttcttctctctcttctcttttcttctcgatatatggttatagccggcttatagcctgctattgtacctgctctaaggccctgtttggttgcagtgtattgtagtccattccaaaaagatcttatttctggctatgcacatgaataaatatttgtccaggtgcatagacagaaataaaatctttttaggacggtggcagtagtattttgtcagatttttcatttcaagacaaggccatcatgctttgtcggatctggcacagtgaagtgaattgacgaaagcttttggtttccactgaaaatgagcagctgaacatgggacacatgagggcaattctgagaggatacttgatggacagcatccccatcgccgggagtcggaggaagaggcgcgacgagctccggctgcacacggcgcaggcccacgccgccgtctcggtggcccagctcgcagctgcgatcgccggcgtcgtgtcagcttgcgagctgaggagcagctctgggggtgctggggctgacaggaagctgagcacggtgcttgcctcggctgccgcgctggtggccaccgtctgtgccgagttcgcggagtctgccggtgccgacaggtcccgggtcacctccgccgtgaaggccggcctcgacagccgctcccccgccgagctgctcaccctcaccgccaccgctgccacatgtaatcaacacttcagtggtgaaactcaaccaagtgatcgaagctacaaactcactgatgctatgatgctgagcttcttgtatgctttttccaggtctgagaggagcagctgtgctgaagctgagagcagacgtcagcagagggatcagcagcagcaccagcaactccatgatgatgatgagcaccaatacagctagcattcagaaaggcacaattctcagggtttgcctgccttgtggtaagagaccaaaccaatgatattagtaccttaaaaaatagcatcactactagtagtactacattgttatgccctagtacaaagtactaagactctgactatgaggagtactaagatagtattactcctaagtcctaagagattatatttccttccccaaaatattaaaaaaagatagtaattctaagagattttgtttcttaaaaatgaagatatatagtactcctaggatattttatctgttataaagaaagaaggtagtactagctcctaggatctagcattgagcatggtgcagcaagcaatctaatgataatatgatattggggtatttgggtggcattacaggaaggttgcggctgaggacggtggccgtcttcccggagtgcggcacggtggctctgaggctggggaagaagcgcctgcatggagcattcacaacataccagcactgtaataattaaaaaaatttacctgcatgaaccagctgaactgcttgccactagtgtattgatcttcgttctgcttgtcggtgatgatgcctgaaccctgttgtttgtgcttggtccagatgaggtgttggcagtctctggcggtggcgaggcggtggtggattgtcggaagttcttccccgtggcgctgagcacggcagcagggacggtgcagctgctgctggacaaccagatgcactgcaaggtctggaaggcttccatcgagagcatgctgtccggtcgaaagctcaagcacaccaaatgctgattaattagagccaggaaaaattgccttgcttttcttaccatgttgcatcacccctgtacatgcaatgtatgtgatgtgagttcttaatatacaggtaaaacataaacaactgtatagtataaaattataatttcttcg

SEQ ID NO: 24572 - DNA, 1941 bp, Oryza sativa
  ref <308>: DATABASE ACCESSION NUMBER: AK100014
  ref <309>: DATABASE ENTRY DATE: 2002-08-28
gggcagcgatttcatccaagcaccacgccgccgccgccgtcgaagccgatctcctgcgcgcggagcggatcgcctctgtcaggtacgacccgccctcttcctcctcccctgctaatttctcttcgcttcgtcggccacgccacgccacgcgcgttcttgccaaccttggtctcgcgagcagcgaggatggggaggaggagaggaattcctctcgaattgatcgccggttgatgcgcccggcttgttcctcttctgcggcctaattttgtacgagttcgggggttgtttaggtggagaaatttggtacagattcgattttacccttttggtcttcttcttgtgcgtccatgccgccgttcatcagctacggtgaccttttccagtctagcttttggaaggggccgagctcccagccatggattagctatcatcaacttagtcaagtgacttgtcgagttgtcggggtgtagttcactgtctaggtgttctcaaaatcaccaccttttatagtggcacgcctcttaaactgtatccatgcaatcaaatttaaatcacatgtcattgagttaacctttatgctactttacaggccactgtaaattttaccgagtttatgaaattgtgaatatgtgctaaaggttatatgagctccttttttttagcagagcctgctgtttaaattatagtcttataggtagcctgatgagtgatgacaaaccttattctgctactgccaatttttccgagattctttaaacctttagctgttagccctgttacattgctttcggttttggcaatttcttcgttatcactatgcaacagagatcacgactgagcctatattatttttggaattaatttgtttcttttcctgcttcaattgtgtccctgattctgtcacggtaatgctcatctattcactgctataattgtgacccaacatcttatcaccgatgcagtcaccagctatacagtatgagttcactggagagtgcaagagcagatcttgctctgcttattttatacctaaacaaggctgaagcaagagataagatctgtagagctatacaatatggctcgaaatttgtgagtaatggacaaccagggcctgcacagaatgttgacaagtcgactagtctagctcgtaaagttttccgactttttaagtttgttaatgatctgcatgctttgattagtcctcctgccaaaggaactccactacccctgatcttacttggaaagtcgaagaatgcactgctatcaactttcctctttctggaccaaattgtatgggctggaaggacaggaatatacaagaacaaggagcgagcagaattcctcagcaagatagcattttattgcttcctgggttctaacacatgtactagtattattgaggtagccgagcttcagcggctatccaagtcgatgaagaaactagagaaggagcttaaacaccaggagctgttaaagaacgagcaataccagatgaaactgcagaagtgcaacgagaggcgtctcgctctcatcaaatcgagcctcgacatagttgttgctatagggctgcttcaactggctcccaagaaagtgactccgcgtgtgacaggggcgtttggatttgctagctcactcattgcttgctatcagttgctcccagccccagccaaatccaagtgatccacctgaaggggtgtcagtgggcagttccaatgttgcaaccagtaagaaataaaagtggagctgcttgattgactcatgtggacttgaaaatcctttgtgggttatggttaatatgatgatctagtggattgctgcagctgtaattttaaggtgcagtacttgtgacaaaaaataagaaacttagcatgggaaaaatgttgcattgtttgccaatggtttagtgttgggactagctaataagaacattgccattatacc

SEQ ID NO: 24573 - DNA, 5421 bp, Oryza sativa
  ref <308>: DATABASE ACCESSION NUMBER: AK100015
  ref <309>: DATABASE ENTRY DATE: 2002-08-28
tggtggaaaacacacctgttggatctggcaggctactgtgcaactggtatggattttggagagcattcagtcttgatcacaatagagcagacttgatatggaatgaacgcactagacaagaattaagggaggcattgcaagctgaagttcatagccttgatgttgagaaagaacgaactgatgacattgtccctggaagttcagtcactgaggatgccagtgatagtgaaaccttaccacgaatttcatggaattatgttgagttttcagttagctaccctagcttgtccaaagaagtctgtgtgggccaatactatctgcggcttcttcttgaaagtggaagcaattaccgagcacaggatttcccactgcgtgatcctgttgccttttttagagctctgtatcaccgcttcttgtgcgatgcagacattggtcttactgtggatggtgcagtccctgatgaactgggttcatctgatgattggtgtgacttgggaagattggatggttttggtgggggaggaggttcttctgtaagagaactttgttcaagggcaatggctatagtttatgaacaacataacaaagttattggacctttcgatggcacagcacatattactgttctcttggacagaacagatgatagggcattaagacatcgcttgctactactgttaaaggccttgatgaacgacctttcaaatgttgaagtgtgtgttttggttggaggatgtgttttggctgttgatatgttaactgtcgctcatgaagcatctgagcggacagctattcctttgcagtctaacctgatcgcggcaactgcatttatggaacctctgaaagagtggatgtatattgacaaagacggtaaacaagttggccctctagaaaaggatgctatcagaaggctatggtcaaagaagtcaattgattggaccaccaaatgttgggcttctggtatgtctgactggaaaagattacgtgatatccgggaactccgttgggcacttgctgttaaagtgcctgttcttactcctagtcagattggggatgctgcattgtctatattacacagtatggcatctgcacattctgatcttgatgatgcaggagagatagtgacaccaactcctagggtgaaacgtatattgtcaagtccaagatgccttcctcatgttgctcaggctatgcttactggggaaccaagcattgttgaagcagctgcctcattacttaaggctattgtcacaagaaaccccaaagctatgattcgactatatagtaccggtgccttttactttgcattggcatatcccggttcaaatctcctatcgatcgcacaactcttttcagccacacatactcatcaggcatttcatggtggtgaagaggcagcagtatcttcatcattgcctttggcaaagcgcagtgtactaggtggactgctcccagaatcattgttgtatgtcttagaacgcagtggaccttcagcttttgctgccgcaatggtgtctgattctgacacgccagagattatatggacccacaagatgcgggcggagcatctaattcgtcaggtcctgcagcatctcggtgactttcctcagaaattggctcaacattgtcattcattgtatgattatgctcctatgccacctgtgacctacccgaatctgaaagatgagatgtggtgccaccgatactacctccggaacctatgtgacgagattaggtttcctaactggcccattgttgaacatgtagagtttttgcagtcattgttggcaatgtggcgtgaagagttaactcgtcgtccaatggatctatctgaagaagatgcttgtaagatactggagatctctcttgatgatcttgtccttggtgagaacggcagtagcaagcagtcatctgagttaagttcgggcaatttgacaaacaacattgaaaacattgacgaagagaagcttaagcgccaataccgtaagctggcaataaaataccatccagataagaatcctgagggaagagaaaagtttgttgctgtgcaaaaggcttacgaacgattgcaggcaagtatgcagggactgcagggaccacaagtttggaggctgctactcttactcagggcacagtgcatcttgtacaagagatatggacatgtcttggaaccattcaagtatgctggttatccaatgttgctaaatgcagtcactgtagataaggatgatagcaattttctttcatctgagagagcccctcttttgatagctgcttcagagctaatttggctgacatgcgcatcatcttcattaaatggcgaagagctcatacgggatggtggtatcccattgttggcaacacttctttctcgttgcatgtgcattgttcagcccacaaccccagcaaatgaaccggcagcaagaatagtcaccaacataatgcatacatttgcggttctcagccagtttgagtcaggaagggctgagattcttaagtttggtggccttgttgaggatattgtgcacagtacagaacttgaatttgttccatcggctgtggatgctgcactgcaaacagctgctaatatatcagtgtcatcagaattgcaaagttctctgctcgcggctggatttttatggtatgtgttgcctctattgcttcagtacgattcaacagcagaagagaatgcaacaagtgaagcacatggtgttggtgcaagggtgcagattgctaaaaatctgcatgctgtacatgcaactcaggctctgtcaaggctttgtggtcttggtggtgatggaataagcccatctaatcaatctgcttttgatgcactaagagcgcttcttactccgaagcttgctgatatgctgagaaaccacccacctaaagaactgttgtcaaatctgaatgcaaatttggagtcaccagagatcatatggaattcttccaccagaggcgagctcctcaaatttgtagaccagcagcgtgctagccaaggacctgatggttcatatgatttgacggaatcacattgtttcacataccaagctttatcaaaagaactgaatgttggtaatgtgtacttgagagtttacaacaaccaaccagattatgaaataagtgaccaggaaggtttttgcatcgcgctgcttaaatttatagcagagctagtacagaagtggaattcattaagtttggatgaaaatatgatgcatcaatgtggtacagctattgagacatcagtcactgaaaatggtgatatcagtggttcaacgaatgaaggaaaagaagaagattcattggaaaaacacaatagaggagtaacagatggagattctgaagtgattatgaacctccgaagtgggctaacatcactacagaatcttctaaccagtaatccaggattggctgctgtttttgcttccaaggaacggttgacacctctttttgaatgtcttgcgctacctgttcctcctgaaagcaacatcccacaaatttgcctaagcgttctttctctcctgacgaagcatgcgccttgtttggaagccatggttgcagaaagaacaagtctcattttgcttttccagatactgcactgcaatcgttcttgcagggatggagcccttactgtcctctattctttagccagcacaccggagctggcctgggctgctgccaagcatggtggtgtagtgtacattctagaacttatgttaccacttgaagaggaaatccctatgcagcaaagagctgcagctgcatcattattgggcaaacttgttgggcagccaatgcatggtcccagggtggcaatcacacttgctagattcttacctgatggtttggtttctgcaattagagatgggcctggtgaagctgttgtttcatgtcttgaacagaccacagaaacccctgaacttgtatggacacccgcaatggcagcttctctttctgcgcagttgtcaaccatggccacagacctctaccaagagcagatgaaagggcgtgttgttgattgggatgtgcctgaacaagcatctggccagcatgtaatgaaggatgagccacaggttggaggtatttatgtgagactcttcctaaaggatcgcaagtttccattgagaaaccctaaaaggttcctagaagggctgctagatcagtatgtctcatcagttgctgccacacactatgaggcgaatgctgttgatccagagcttccgttgctgctttctgctgcattggtttcattgttgcgtgttcatccagcccttgcaggccatgttggttacctaggttatgttccaaagctggtttcagctatggcatatgagggtagacgggacactatggcatccggacaaaccacaagtaggttgcaagcggaacctagcaatcaagagaactcggcggactctaccgtgcagactccacaagaacgtgtccggcttagttgtttgcgagtgctgcatcagctggcttccagcactacttgtgcagaagctatggcagccacaagtgcaggaactcctcaggttgttccattgcttatgaaagcaattggatggcaaggtggaagtatactggcactagagacactaaagcgtgttgttggtgctggcaatcgggctagagatgcacttgttgcacaggggctaaaggttggccttgttgaagtactgcttggtattcttgattggcgagctggtggcaggcagggactgtgtaaccaaatgaagtggaatgaatcagaggcttcaattgggcgtgttttggcagtggaggtgcttcatgcttttgcaacggaaggcgcacactgtgctaaagttcgtgaaattctgaattcttctgatgtatggagtgcttacaaggaccagaagcacgatttattcctcccatccaatgcacagtcttctgctgctggagttgcagggctcattgagagctcatcgtcaagactgacctacgcccttactgcaccaccacctcagcctgccttggtccggctaccttctacagctccagcgctaccatcggctcctgcaaatcccagtgggcggcattcttatcagcattcatagcgtgcgaaatgaaccacgttaagctcagatcattagcggtgtgatcatttcaagttttattctttggcttggttggcctagcaatttcgcacacaggccagagcgccacaaaggggacttgctacaacagcaaaatacagtttcacccatacattactcgcaacttggggcaggaggcctgcgttgcagtgccagtacatagcctgtacagttttccattacatagaggtcgagttcatgctagtttcttgagaatgtaaagcatattgttgttttgtttttttttacactgtaacatacctgtccatagaatatgcaagctgaaaatgtgtatcgattc

SEQ ID NO: 24574 - DNA, 1270 bp, Oryza sativa
  ref <308>: DATABASE ACCESSION NUMBER: AK100016
  ref <309>: DATABASE ENTRY DATE: 2002-08-28
gctttgaagcttatccaaccaatcaaggacaaatacccgggtataacttatgctgatttgttccagttggcaagtgctacagcaattgaggaagctggtgggccgaaaattccaatgaaatatggacgagttgatgtcacagcagctgagcagtgcccaccagaggggaggcttcctgatgccggtccacgtgtgcccgctgatcatcttagggaggtattctacaggatgggccttgatgacaaggaaattgttgcattatctggagcacacacacttggaagatcaagacctgacaggagtggctggggaaagccagaaacaaaatatactaaggatgggcctggtgaacctggagggcaatcatggacagttgaatggttgaagtttgataacagttacttcaaggacataaaagagcaaagggaccaggatcttctagtgctacccacagatgctgcattatttgaggatccgtccttcaaggtatatgccgaaaaatatgcagaggatcaggaggcattctttaaagactacgctgaagctcatgctaaactgagcgaccttggtgcaaagttcgatccacctgagggattttcactggacgatgaaccagccgtcgaagagaaggatcctgaaccagcaccagcgccagcagcagcaccaccacctccaccagtcgaggagaagaaggaagctgaaccaactccagtaccagtaacggtaggagcagcagtggcatcatcgccagcggatgacaacaacggtgcagcaccgcaaccagagcccttcgtcgctgcgaaatactcctacggaaagaaggagctgtcggactcgatgaagcagaagatcagggcggagtacgagggattcggaggcagcccggacaagcctctgcagtccaactacttcctcaacatcatgctcttgatcggagggctggccttcttgacgtctctgctcgggagctgagagcgatggtctgatgacctcctctgacgagtgttttgagttgttctgcctgtgctaagatttgcgtgtttctctttccatgttttgagtcgttattccgtaaataaattgaggtaaaaggatgggcatgtgaatggattccagtactttctgaacttcttgagtaattcctctagagaaatatttgtcggagagaaatgtcacattatctagttgtcatggctcatgactacattctctatactgagggaaattatgacattctctaaactaaggagggaaataatgaggacacccc

SEQ ID NO: 24575 - DNA, 2421 bp, Oryza sativa
  ref <308>: DATABASE ACCESSION NUMBER: AK100017
  ref <309>: DATABASE ENTRY DATE: 2002-08-28
gcctgccgtttctttccctttccctctctctctctacttctctctgcctctgcttgctctgctctgtatctgtgaccatctcgcttcgtcatctcgtcgtcgtttgtgttcttggattgggttgggttgggttggtgaggtggggagatggtttggtgaggagttgtgtgttgctgcagctgcagctgctctgctggtgtgggggtggaattgtgttgggtttctttggttgaggagagaggagggcgaatctgtgggatgaggatgcggtggtgggcggcgccgctcgccgccgtgctcgccgtgatcctgctgccgtcgtccaccgccacgctctctcccgccggcatcaactacgaagtcgtggcgctgatggccatcaagacggagctgcaagacccctacaacgtgcttgacaactgggacatcaactccgtcgatccctgcagctggaggatggtcacctgctccgccgacggctacgtctccgcgctaggtctgcccagccaaagcttgtcaggcaaattatcccccggaattgggaacctcaccaggctgcaatctgtgctattacagaacaatgcaatatctggcactattcctgccagcataggcaggttggggatgctgcagacgcttgacatgtcagacaatcagattactgggagtatcccgagttcaattggcgatctcaagaacctcaactatctgaagttgaacaacaacagcttatctggagttctacctgattcattagccgccatcaatggccttgctctagtagatctttcattcaataatttgagcggtccattgccaaagatttcttcaagaactttcaacattgtgggaaatccaatgatctgtggtgtcaagtctggagataattgctcttctgtatcgatggatccactttcataccctccagatgatcttaagactcagccacaacaaggcatcgcaagaagccaccgtatagctattatctgtggagtcactgttggttcggtagcatttgcaactatcatagtcagtatgcttctttggtggcggcataggcgcaatcagcagatcttttttgatgtaaatgatcaatatgacccagaagtatgtttgggtcatcttaagcgttatgcctttaaggagcttcgagcagctaccaataatttcaactcaaagaatattttaggtgaaggcgggtatggaatagtatacaaaggttttctacgtgatggtgcaattgttgctgtcaaaagattgaaggactataatgctgttggtggggaggttcagttccaaactgaagttgaagtcataagcttggctgttcatcggaatctccttagactcattggattctgcaccacagagaacgaaagattacttgtttatccttatatgccaaatggaagtgttgcttctcagttgcgggaacttgtaaatggcaagccagctctagattggtcaaggagaaagaggatagcactaggcacagcacgagggttgctttatttgcatgaacagtgtgatccaaaaataattcaccgtgatgtaaaagcctccaatgtgcttcttgatgaatacttcgaagcaattgtgggagatttcggattggcgaaacttttggatcatagggagtctcatgttaccactgcagtacgtgggacagtagggcacatagctccagagtatttgtcaactgggcagtcatcggagaagacggatgtttttgggtttggagttttgttggttgagttgatcactggtcagaaggcattggactttggaaggctagcgaatcagaaaggaggagtgcttgattgggtaaagaagcttcatcaggaaaagcagctgagcatgatggtggataaagacctgggtagcaactatgacagggtcgagctcgaggaaatggttcaggtggccttgctgtgcacacaatactacccatctcatcgtcccagaatgtcggaggtgatcagaatgctggaaggggacggtctcgcggagaaatgggaggcatcacagaacgtcgacacaccgaaatccgtttcgtcagagcttctacccccaaaattcatggattttgcggcagacgaatcctcccttggcttggaagccatggagctctctggaccgaggtgatcggtgtcgatattcgttctttgcgacaaatgtgtttgatttgattagagctcttgagccgcccaactaagggggatgagaattttccaaattgagtagagccatattgttgtctatagccgaggtggtattcatttgtacatacagtaagcattatgtgaggtgagcccatccttgttgcacatctataggtggcaaagagagatgagattgatgagcaaatatagaaaaaaaaagaagttttctattggagagtctctgctccatttttcatgc

SEQ ID NO: 24576 - DNA, 3048 bp, Oryza sativa
  ref <308>: DATABASE ACCESSION NUMBER: AK100018
  ref <309>: DATABASE ENTRY DATE: 2002-08-28
gatgcatttcctcgggcgatgcagctagtactgtcaaggaaagtgaaatgaaccaagaagcttctgtgggggaccaagggatgtattactacggatattattatcctgcctcatttggaggatatgatgagaatggctacttcgttggatacaatggactggaggtgcaccctacagtaagtgatcaactagcatactttatcaagtatggtatatgccttttctacagtatttacaagtggttctatctaaaatcgaaacaatggtgcactcagtacatctctgtggtggcatggtggtaccgacaagctttgaacctatttgctgtcatcttccctttgctacgtttgggaaagtggccaacatttttctttagtaccactcgttattcttcaattgttatccttgtgccagaaaagtatcctgcacagttttatgatattttttgctgcgctgttgtaagcacaacatatgctttcatgagcaaaagattaatttaccgtaatgattgaataaacaaagctgactatttttttctttttgccaaaggaagtaaacttccagcctctgcatcaactaaggatgcactcgggccatatctgtggcatcaggatttaaaccttggtaggtggagtcatgcacttacgactccaccatatcaatggtgcttccccaaacgatgatgtgtataataaacaaagctgaatgatggagcacttttatgttccatgctatacaagaatttgtggttaagtaccaaggatattgtcctgacactaatctttaatgataatagtcgagattatattgcattaccaccttcagtttattttataattgattgcttgatgtcatccaggtgaactattccttgaaggtgcagctgtgaaagttgacatattactagagaactgtgcttatatctgctctacaatctatttcaggtggttcaaggtgataatgggtcttatttgtgttatcttccggggtatgaaaatggatatacttatagcccgattgttcctggagttattgctggtgtggatggtcaatatatcagcaaagagccatattattctacaatttctatgcaggaccctagcacacctggcatttttgctcaaccagttgcttatggacctgagctagtccctgcatacacatgggatccttcttttgcccttcttgatggggttcagggacgtcctgttggtgtgcatcaaacaaattaccctgcaagaccaaaatactcttctaataagcttccttcatcaaaagcttcccggaacactaagtctgcatcagataccatcaaaggatcatcatcagctctagacacgatgtcaacttctgctaatggctatccatcctcgaagactgcaaacaaggcatctggtgcttccatttcaaaagggtatcctctgtctagcaagtttgcggtgcatactaaccaaggaaaagacaatctttaccaaagtaaagacattggtatgaaggaaagtggtagaagctggaacagtactgagaagctcaaggccagaagtaagctaaatggatatggtgactgtgatatatcagataacctcactgataactccaaaaatagtttgagccctcaaggtggtcattatggactatcaagtgcaggggggggcaatgatgttacaccttcacctgttgcaatgagccgagatgcatataatcttccagattttgttacgaagtatgatcaagctttattctttgtgattaaatcttatagcgaggatgatattcacaagagcattaagtacaatgtctgggcaagtactcctaatggaaataaaaggcttgacaatgcctttaaacttgcacaagaaagagttgctgagaaaggaaccaaatgtcctatgttccttttcttctctgtgaacgcaagtggccagttctgcggcgtggctgagatggtcggtccggtagatttcaacaggaatatgaacttctggcagcaggacaagtggaatggatttttcccagtaaaatggcacattatcaaggatgtgcctaatccacaatttcgccacataatactggagaacaacgaaaacaaacctgtgacaaacagcagggatacacaagaggtcaagtttccacaaggttcagagatgctgaacattttcaagaacttttcatgtaaaacgtcaatattggatgactttgacttctatgaaaataggcagaaagtaatgcaggacagaagaggcaagccacttgctacaacattggatcaccccatgttaaaagttgaaaaacctgaagaaactaagaggccaagtcaatttgtaagtacagtggatcttgatacagccaaaccagatgaagtggtgtttgacaagattgcaacagaactcgatacagccaagctaagtgaggagcagatcaacaaagttgaagtggaaattggcacaactaacagtagtgagtagcagagaagggttgcagaggatgaattacaggatgggtacttgagctagaaacataagagatgatttcagaaacgggcttcctacttcaaacaattaacttgctgtgtgaaacgttgagaatccttggcactcgtccacttctaaatgcaagcggaaaaagaggaaccaaaggaaaagaggaaccatggtgctgtcttcccatgagaatgctcgatgactgggaagaggttacaagacaactaactagatatctactgatcatgcgtgtgttactacctctgccgctagccgctaacgctcaattctccctcgtctatttttcagcttggagggaagaatttttcctttttgccttatgtcatgcctttttttatttgtctaataatactgctggggtctttgtaagcagtctagtttgatccaaagaagcaagttcatcatggttaggcgtgtttcagtgaaggtttgtaggtggttgtggttgggttgtcatttggggttgtagaggtttatttaagacaagttttaggtactgacattgaaggtgggaaaaagaaaaggaataagtttttggacttgcttt

SEQ ID NO: 24577 - DNA, 1877 bp, Oryza sativa
  ref <308>: DATABASE ACCESSION NUMBER: AK100019
  ref <309>: DATABASE ENTRY DATE: 2002-08-28
aggggaggccggcaagaagcatactagcacgctacgaaaccccccttctcttcgtccccaaattgcactacaaaaaaggccgcccctttcttctctcctcgtccttatcaccaccaatccgatcctcttctcttctcttctcttcttccccacatccagttcgattctcatctctcccacaacaaatcacgccatggatccctacaagcatcggccgtccagcgggagcaattccaccttctggaccaccaactccggcgcccccgtctggaacaacaactccgccctcaccgtcggagagcgaggccctatcctccttgaggactatcatctgattgaaaagcttgcacagtttgacagggagcgtatccctgaacgtgtcgttcatgcaaggggagccagtgccaagggattttttgaggttactcatgatatttctcacctcacatgtgctgattttctccgtgctcctggtgttcagaccccagttattgttcggttctccacagtcgtgcatgagcgtggaagccctgagacattgagggatccacgtggttttgctgtcaagttttacactagagagggtaattttgatcttgttgggaacaatatgcctgtcttttttatccgagatgggatgaaattccctgacatggtccatgctttcaagccaagtccaaagaccaatatgcaggagaactggagaatagttgatttcttttcacaccacccagagagcctgcacatgttctccttcctctttgacgatgtaggcatcccactcaactacaggcacatggagggttttggtgtcaacacctacaccctaatcaataaggatggaaagcctcaccttgtcaaattccactggaagcctacctgtggtgtcaaatgcctgttggatgatgaagctgtgactgttggcggcacctgccacagccatgccacgaaggacttgactgattctattgcagcagggaattacccagagtggaagctttacatccagactattgatcctgatcatgaggacagatttgacttcgatcctcttgatgtcaccaagacatggccagaggatatcatccccctgcagccagttggacggatggtcctgaacaaaaacattgataacttctttgcagaaaatgaacagcttgctttctgcccagcgataattgtccctggaatccattactctgatgataagctgctccagacaagaattttctcctatgctgatacccaaaggcaccgtcttggcccaaactatttgatgcttcctgtgaatgcaccaaaatgtgcataccacaacaaccaccacgatggctccatgaatttcatgcacagggatgaagaggttaactacttcccttcaaggtttgatgctgcacgtcatgctgagaaggtccctattcctcctcgtgttctaacaggctgtcgggaaaagtgtgtcattgacaaggagaacaatttccaacaggctggtgagagataccggtcatttgaccctgccaggcaagatcgttttctccagcggtgggttgatgctctctcagatcctcgtattacacatgaactccgtggcatctggatctcctactggtcgcagtgtgatgcgtcccttgggcagaagctggcttcacgtctcaacctgaaaccaaacatgtagatcggccaggaggaatccagtggtggtgctatgttggacagtcaaacatgaactgtaatgtgtcgaccagccgtagtcgtgaataaaatgtgatacggtgatatgtatactggtgacgcaagttgtgaaactgtatctggaatcctgaaaatatgccttgctgtgtcttgggaaagagataataaagactgatacagtgggtgct

SEQ ID NO: 24578 - DNA, 3285 bp, Oryza sativa
  ref <308>: DATABASE ACCESSION NUMBER: AK100020
  ref <309>: DATABASE ENTRY DATE: 2002-08-28
gacgatctcacgattctgcctcctcatctctgtcgtttcggaggacgacggggtgttgacgccagcaccggcgccggccgctgagttcatctttgccaaaatggctgaagaagtttggacattgcggtttttcaagcatgatcgtggtccaggggcaatggttgttgaggagccaatggatcgagaccttgtctgctttttcaatatggttgagataatagagaagcttgggtaccagaaaagtgatgaaatattttttgcccaacctggatgttactgccgcacatcaatgacaagaatcaagggtgacagcaatgtcatggacatgcttagggaaaacgatagcataaataaagttgacatacatatttttgacagaaaagttgcctcaagcagtgcactagaagaggatgttgttgcagatgccactgataatgtggaggcaaataaaaatagagatttagaagaaaaaggatctgaacagttgaagaacagtgatgaagacttgtggatggaccagggtgataatacatttctctttgttgatggtaaagaagatgaagactcagaatatagcgatgatgattttgaccttgatcaagagaagattgactatattcataagctacaggagataaagagacaacgagctgaccctaggaatcgttgtgaaggtgatactgatgatgaggatttgtttgtccctgttgttgattggagtgctctatctgttgttccggtggactctaaggatgtggcagaggcaatatcaaacaaggctcaatgtggtgttgtcaatattcaagatggtacagatgttgcatcatcaaatttgcaaaagaagaatagcactaaggcgagtaggaatgtcaaaggacaaaatgatgtggggtcttctcaggttgaggaaactgttttttctgatcctccaagtgaggatggtggggctagtgctgttgaatatgaaagtagcgatgatggtcaaaaacttgatgcacaagctaagaggaggaagaggagaagaagagagagtagggtggttaacaggaggatttactttgatgaagataacattatggacaccacacaattacaggaggctatgtgttttaccaatgtcgaccaatatagaagggctttaaaatcctatcacattgtccaaggaagagactacagatacacaagaaatgagccccgtagggtcaatgttaaatgcaaagaagaaaattgtccattcatcatgagggggtctcgaattgctagagagcacacttttatgctgagggagatgatacctcatacatgtgggacaacgagagcgaattcaaggttgaatagcacttggttgagttataaatacctcgaaaattttagaagtgaccctgattggaaggttagtgcgttacaagatcagtgcatgagagaattaggtactgatgtttctaagaccatggcatacagggctaagagaaaggcaggagaaaaagttcttggcaatcataaaaaacaatacatgagaattagagattacctgcaaactgtcattgataagaacccagggagcacagcagttgtgtcaactgtggatagaatagctctaggaatgaatcctagattttatggtctcttcatctgcttgaatgcccagagacagggatttctcgatggttgtaggccattcataagcattgatgggtgctttgtaaagctcagtaatggagcccaagtgctagcagctaccggtagggatggcaaaaataacctattcccaatagcatttggcgttgttggaaaggaagacacaaaaaactggaattggtttcttgagaggttggagacagccatcggtagaggagaagcgcatggaggatggacaatacagacagaaggggctcatgaatgcagtggctagagttttcccagactgtgagcatagatattgcaaaagacatctcttggcaaacatggcaacagctggttatagaggagagaaatacaagagctttgttgattctgcagtctatgcttacactgaatatgattacaacagagcaatggatgcattaaatgcattcaatgccaaagcatggaaatggcttaattatcttggcaaagaacatttcagtagacatgctttctcctctaggagcaggacagacctagttgtgaacaatcttagtgaggtgttcaacaactacattattgagcttagggacaaacccatcgtaaccatgcttgacaaaattagacaaaaactaatggtcagggcaaatcaaaagagagacggaggtcaacaagcaatgtgggagatcaccccggtagtagtcgggaaattggaggtagagaagaaatatgctaggtactgcaatgcttatcaatcaggtgttggtttgtgggagattttaggatcggagaggcagtatgaggtcaacttattttctagaacatgtggatgtaacaaatggcaacttaccggaataccttgtaagcatgccgtgacggcaatatttgcagcaaaagagaggcctgaggattatgtcgatgagcactttaggaaggaagcttaccttcgagcatatgcgccagttatctatccagtcccaggagagcatgattggacaacaactgattcacctgacattgatcctcctaagttcacaaagcaaccaggaagaccaaagaagagtaggaggaggggtcaagatgaagctcccaaggtaaccggcagagcaagaatgacaaccacaacatgtactaattgtgaagggatgtaccacaactacacgacttgcaaaaaaaagttgaggcccgatctgcagataagactcgatgctctcaaggctaaaaggtcgcatgagccagaaaaccaagctcaaagatcacatgagccaagtagtcaagatcacatcaataatcatcaaccaagttcatatcagccaatcaatgaagggggaacaagcaggggaaggaaacttgattcaaggagggggtgtgctataggaagcaccatgaaggaaaatgctagaggaactacagacaggggaagagaaaatgctagagaaactatagtcaggggaagaggaaatgctagaggaactatagtcaagggaagaggaaatgctagaggaaccacagttaggggaagaggtctagggcacacttccctcaaccaatggatcccatagagaattcatccatgtgttcctcagtcgttaattatctttatttagttgttaccaaggattttattatgtgacttgttttctggtcaatgatcacctttcc

SEQ ID NO: 24579 - DNA, 2822 bp, Oryza sativa
  ref <308>: DATABASE ACCESSION NUMBER: AK100021
  ref <309>: DATABASE ENTRY DATE: 2002-08-28
tagagttgagcatattagatgttcagcaaaatagctgtagcgtgtgtatgaggctggcggatgaatgtgatagccggactttatttggtcagtttgctcaatcgggataaccttggagttgcttcctagatcacagcacttcaatctgatagagaatttccatgtctcaaaaccatgagacatcctttacaagcaaatagttatttcatatgacagccatcgaatgcgctactgatgtttcaaaatcaagccggttgatgcctgtgcctctgtgggggttgggtttcaacaattgctttgaaaaaaaatgtgttatgcagcgatgataatttgattgtgtgaattaacagcacaagacctttttcatgttatttctagaacagaattttgactcttttgggaaatgcatatgcttgcaatttatccttctggacaaagcattcttaagtaccatatatttcatttgcttgctggatcatgaggtttgagttcactttgagatatttgatgagatgaaacccaatagaacatggcatgctgtatataaggaagagtcctacatatatcttacataattgaattattgctaatggcatcctttttatcttgtagaactccttctatagccattcctgtggattcagatgcctctcctaggaaaaatacgccagagactgtaacaagtcctcttgtgaatggtgaaaagagtattttccgggatcaggttagaggatacagtgcacttgggagtcctttgaggagagaagttgggaacagatctataacaagatccttctgtattgacaacactgacttggaagatggtaaggctgaaaaagacagagataggccttcacatttcctcagtctcccaaagatacagaatcaggctcttctatctggtcttgcctattgcatatcatcctgcagcatgattttagttaataagtatatcttatctggctatggtttcagtgctggaatatttctgatgctttatcagaacattgtatctgtgactatagtgtccactctatcgctctctggtgttatcccaactgaaccactaacttggaagctaatcaaagtttggttgcctgtgaatatcatatttgtcggaatgctaattacaagcatgtttaggtatgcaccagacattcagattgttttgatctgaacgctttttgggtgcaatttacattgttctgtagattctttgttttggttttagagcatggaacgtatgtgatttaaaaatgtttttatatttatctatgtattcatagggtacaatatgaacactgtgctatattgctagctttccactctaggaactatgcacaaagaaagaggacttacctgatgaacttgtaaatgtgcttattgtgagaataagtagtgatatttaataaacttttggcagtttaaaaagttaatgcagggaaactatttgtttgtcctgacattttgcgggcgttaatattcattatgaatatctgttgtggcttgccttacgtcttctctcgtgctgctattggtccattagttggtttggagagtggacgattaattactatctaagatttctgaacatttggaactgaaacttttcatataagaatctatcatggctcagcttgtaataaggatggtctgggttgaaattgcgcaactggcagtctcagacaaaaattacttccctcatttttaatgcattttgtaccttgcagtttgaagtacatcaatgttgcaatgctgactatattgaagaatgttgccaatgtattgactgcttctggggagacatacttctttaaaaagcagcatgacagacaagtttggatttctctcacgttgatgcaattgcaggaggaataacagatttgtcttttaatgcaattggttatacttggcagatcttgaactgctttctaacggcatcatattcgcttacattacggcatgtaatggacagtgccaagcaagccaccaaatctgggaatttgaatgagttatcaatggttttactgaataatattctttcagtaccacttgggattatcctcgtgcttggtttcaatgaagtggagtacctttttgaaacgcctctcttaaggatgcccatgttttggatagtcattactgctagtggagttttggggcttgctatcagctttacttctatgtggtttcttcaccagtcaagtgcaacaacatatagtcttgtgggctcccttaataagatccctctctctattgctggaatccttctcttcaaagtgcggacgagcatggagaattctttcagcattttgtttggtttattggcaggagtattcttcgccagagccaaattgcttaataactctcagtcctagtcgtaggccaagctttataggttatacaaggcagaattattctagtcagtcagattcagaacaggatgctcgctcggattatgttcctgggaaatttgtgcagatgtaaagatccttctccagctaacaagaagagagattggcaacacatttgttactatggggccatggggctgcttcagttctttttcctcgaaatcagtatggaccccctgttgtcgctctcgtggttgtggtatacgtcctcactttcacttacgatcgaaaggccgataatactcaaatgcaggcagtttgggggaaaaaaaacaattgacgggtcgccgcatttgtaatgttgtgaaattgcagcggttggatcgaaatgggattggtgtttttgtgcgttgcacggctgcttggcctgctgctgtgttgagtatactgtatatacttgtgcagttt

SEQ ID NO: 24580 - DNA, 1965 bp, Oryza sativa
  ref <308>: DATABASE ACCESSION NUMBER: AK100022
  ref <309>: DATABASE ENTRY DATE: 2002-08-28
gggaaggccacctctcccatggcaccaccaccaccctgacgccgacgccgacgccgactgactcacccgccggcgagcccacgccgcccaccgccggagacggccatgccccccgtcgcaatccagctctacagcctcctcttcaagctcatcctccgccgccgcctctcctccctctccgcctccgccgcctcctcctcctcctcattcggcgtctcctcccgcgccgccgccgaccaccaccacccctcgccgccttccaatccctccttctcctccgccgccggcgctgacgctgttgccaccaaggacctccaccccgacccgctctcctccctccacctccgcctcttcctccccaacccgcaccacagcgccgcccccgccgccgccgcgaacgctccgcctccgctgcggcggaactcgttcccgcagccagcgcacgacgggggcagccccgcggcggcggtggggcaggagctctcccgccgcgccagcgcgagcttcagcggggtgtcgccctccgccgcgccgtgctacggcgggtaccggccgacggcgcgctccgggaggaggctgccggtgatcgtgcagttccacgggggcgcgttcgccacgggcgcggccgacagcgccgccaacgacgccttctgccgccgcgtcgcgcggctctgcgacgccatcgtggtggccgtcgggtaccggctcgcgccggagagcaggtaccccgccgcgttcgaggacggggtcacggtgctcaaatggatcgccaagcaggccaacctcgccgcgtgcgggcggacgatggcgaggggggcgggctctggaggggccgattcgttcggcgcggcgttggtcgagccgtggctagctgcgcacgccgatccatccaggtgtgttctccttggtgtcagctgcggagcgaacattgctgactatgtggctcgaaaagctgttgaggctgggaaactcctcgaccccatcaaggtcgtcgctcaggttttgatgtatccatttttcatggggactagtcccacgcaatcggaactgaagctggcaaactcctatttctatgacaagtcaacgtgcttactggcctggaaactcttcttgcctgagggtgaattcagcttggatcatccagctgcaaaccctcttgttcccggtaaaggtccccctttgaagctcattcctccaacattgacagttgttgcggagctggactggatgaaggaccgcgcgatcgcttactcggaggagctccgcaaggtaaatgtggatgcccctgttctcgagtacaaggatgcggtccatgagttcgccacgctggacgtcttgctgaaaacaccactggctcaggcttgcgccgaagatatagccatctgggttaagaagtacatatcactgcgtggccatgaattatcatattgactgtgtcgcggtgcgctttcaacgagattttcacctgagctgcgcccttcaaggcttcgcaatggtcactccactacttcatttacctcccatgctgcactgaaaccatttgatgaagcagggagaggtacactggccgagtggtaacatgggtgctgaagaaaggagggggagagagagagatgctctgtgatgtaagttggttcttttatggcaatttaggttgcctggggtcaaggatctgagtgtaatctagtacaggacggttgttgtatatttccacgttctaatggcatctcaagttttcatgtattcgcttccctgtccatagatctgcttggcctgatcaaagcggtttattctgtttctgtttttaccccctggtaatgagttgatatgcaaaacgcatcttataaatgggaggagtgatcaaacggtgggtgtgtgtgtgtgtgtgtgtgtgtgtgtctgtgtctgtatgtatgtatgtatgtatatttatttatttatttatttatttattcgattattgtg

SEQ ID NO: 24581 - DNA, 2444 bp, Oryza sativa
  misc_feature (352)..(352): "n"=any one base of a, t, c, or g
  ref <308>: DATABASE ACCESSION NUMBER: AK100023
  ref <309>: DATABASE ENTRY DATE: 2002-08-28
tatctccccacaaatcacacggcgcgaggcgaggcgaggcgaggcggtggctgctgcggaattgagcttggatcccggagggattacgcggcggcggcggcggcggcggcgccaccatggagccgagcatctaggcgaggattcagttgtcttatggatccagatgttctcgtggagccgtaagcagtcgtcctcctccggccgccgcggcgcggacgcgtcgtcgatggactccagcagccgcggcggcggaggggaagggagcggaagcgggagccgcgggcgtagctcgcggctggagcgccgcaacgcggtgaagcacatcgactacgaggcggcgggggcgggggcngggggcgtcgtccgtgccggcgtgcgcgtcgtggtcgtcgtccatgtcggcggaccggtcgctggggctccggccgtcgcgctcgctcgacctggccgtcgggggcggcggcacggacatccgcatcagcggcagcgtggagggggaggtcgacgagctgtgccgcagcctgggtttatcggggccggaggagttcgcgatccccgtcgccgcatgggaagcccggaaagagcgttctaactccgacctactaccgcgctccagcttcgtctcctcgccacccgtcgacgacccctctcccatggcccgcaccatttccgcccccgaggtcatccagtgcgaccttcctccctcattccctgcttcaattcctgaggagtccctcaattcttcctccaattccaccgcaactgattcggcggaggagcctaccgctgcggcgctcggtcaggaatcccccaaggctgcccctgccgttgctgctgtggcacccctcgctggattgcccctgctatcgccaaagagaggaggcggcgaagtcggtatccgaggagcccgacctcctgtgctctccccgcctcagccgctcatggcactcgcaccgccgccaatgaggcgttcaattgtggctaaagacatgagcggggtgtcggcttgggatattgtgaactcgtttgctcccagtgaagagaaaagtgaagtgagaacagatgatgaacgcgtggacgcgtctcacatgtcggacaccgaggaggaggaggagtttgctgacgagggagtggcaggggtggacggggagctgaaagagttaaggataggagagacctttgaagggttcactgggacatcatcattgtcaacaacaaatgatgatgatgcatccagcacaactacggaggctatgttcatcatctcaccaaatggaaagttcaagaggaagattaagtcgtggatgcgtggtgctcttctggggagcggctcatttgggatggtgtatgagggcatcagtgatgaaggagcgttttttgctgtgaaggaagtatctttgcttgaccaaggaagcaacgcacaacaatctattcttgcacttgaacaggaaattgcactcctaagtcagtttgaacatgaaaatatagtccagtattatggaactgacaaggaagaatcaaaactgtacatttttattgagcttgttacacaaggttctctatcgtccctctatcaaaagtataaactacgagactcacaagtgtcagcatacacaaggcagattctcaacggattggtttatctccatgagcgaaatgtggttcacagagacattaaatgcgcaaatatactggttcatgcaaatggatcagtaaaattggcagactttgggttggcgaaggagatgtcaaaaattaacatgctgagatcatgcaaaggaagtgtttattggatggcacctgaggttgttaatcctaaaaaaacatatgggccccaggctgatatttggagtcttggctgcactgtattggaaatgcttactcgtaacataccatatcctaatgtggagtggacaaatgctttttttatgattggaaaaggagaacgacctcaaattcccagctatttgtcaaaagatgctcaagatttcattagccagtgtgtacaagttgatccagagcaacggccttctgcatcacaacttatgtcacacccttttgttaatagaccgcttcgagcttcttttgaatctgcatcccctcctgccatcagctcgtattgattgtggcatgcttctgtttttgagaacattgctgagctcatgaacaaatcttcgtggttcccactcagtgccagaaaggaacttcttgggcttgtttaggatatagtttagcattttagtcagttaggactagtgagataagcattaccttgctgcgtcggtctgggaatatttgagtgttttcttgttgaagacattcagtagattttgtacgacctggtaggggggagatggaattgcttgcaatgtatttgagcttaagccattgtaaatttttgacttcatcattattttggtttgttgctcctgaagcactcagct

SEQ ID NO: 24582 - DNA, 2198 bp, Oryza sativa
  ref <308>: DATABASE ACCESSION NUMBER: AK100024
  ref <309>: DATABASE ENTRY DATE: 2002-08-28
ggcgcggacgagacacctggaacccccccgatcaagcggcgcggcctaacctaaccccgtgcgtcgcgtcgtcgagaggggcgaagcatcggcgggccgccgacgccgacgaggtcctcctcgggcaacgacggcgaacgcgccggccaccgccgccatgtcgaagaagaaggcggtgacgacgatgacgctcaaggacttccacggcggctccatcccctccgagctccccctcccctccgcccccggcgtctccgcgcgcccggcggaccgccccgtggcctcccaggcggccgctcccgcggcggcggccgcggtcccgtcgttcctcaccaacccttcccgcatcggccgccacttcgacgaggacgagcgcacgcccttcgaggccgcctccacgccgcgccgcccggccccgtcgcccccgtcgttcgccccatccccggctgcggggcccaccagatccgggcccgggaacgcctgcggggccgaggagggaggcggctccgaccgcggcgccggtgagtcctgccgccagcggcggcggcggtggtcagatctggtcggcgacgcgcattgcgcaggcgagcgccgtggagaaggtgatctccgggaggtggaactcgtcgaaaccctcctctccaccggcggcgcctgtgtcggtcccagtggtggtggagactcatgttgcaccgccggagatggagaggccaaagtcagtcggggtgagagagctggatggtggcatagagaggagcgtggcgccagtgaggcctgcgtcgcatgaaggcagggttggggaggctagaggcttggaggtgcaagagagacctagggtgggtgatgtgccagagagacctagggttggtgatgtgctgccagagagacctaagttgaagctgcttcctcgctccaagccaatcgaggcttcagaaccatctcctgtctatgttgaagagaagcaggtgcatcaggttccagtggtcgcgaatactgtgcaggttgacgttattcatgatgtgcaccagaatgttgtagcacctaaagcaggagtagcaggggcagatgctgagggccgggcagtggagcgaccacgattgaatctgaaaccccgctccaatgcagtaggacagtctgatgaaagtgctccaaaggaaaggcaatccctctttggtggagctcggcccagggaacaagttctcagagagcgtggaatagatgctttagcaagtgaccttgataagacatctccagttggcaggtctaaaagtgaatttgcaaagggtgagcagaaggtcgaagctatgtccattaacccttcaggtgaaaaggctgagagttttccagctggttctagaggcccaaggaatgctgataagaaagactacaggcgggatacagaccggagtgatgtgtataggcctacacgacgggaggacaacaggagagttgctagagatgtggagaagcccgagcaacagcgtccagagcctgaaacctggcgtaagccagttgagccaccaaagcctgaggttgttgcacctcgttttgggaaaggagcatctgcattggagcttgcacaagccttctcgaagtccatgtctgatactgtgcctcagagtcgcttgacaagtgttcctagccctaaagtgccccagagtccagggaccagggatcaggttggcttctcaaggctcactgacaaccgggcattacactctagcccctcgcagcgaaagattaacggttactaacctcattgcacatgcacgctgtgctcccatgatggcacgactcaaataccatggcctcgccgaagcgcactggttttatcttcatgtttgattcttccatcatgggaaaaaaaaaaatcaattgttgctctctggatggcgacacacgaggggtgctgatctcgtaactggtggctcatttccactcttgataacaaagagatgagaatttatgaactatttgtgcttctattcttcagcctgctacccgtgatttaagctggggaataatttgcaacctctgtgctgctacttggatgtgccacatatgtttctggtgtgcttgttttaagatgttgccagatcagtgctatgcctatgtatgcagcatattggtttcccggtacttcattagcacgttatactttcttcttttcactatagtaaaggacataatagttgttc

SEQ ID NO: 24583 - DNA, 1909 bp, Oryza sativa
  ref <308>: DATABASE ACCESSION NUMBER: AK100025
  ref <309>: DATABASE ENTRY DATE: 2002-08-28
gataaatcggagcacgcggcgcccaagcccctctcacttgcgccgcccgcccgacctcgccgccgaccacctcctcctccctcctcttcttcttccacgcgcttcccaccccccacctccatccttcgccgctaagcgaaaatcccgtgtcttcccttccttcctcccccgatccatctcgctctctcgattccttgctccgtgtgcgggttcggttcttgtggtgcgagatctgggcgcgagaggagaaaccccgatcttgatttgggtggcgtcgcgtcgcgtcggcggcggtgatgtggggggacgggaaggcgatgctgaagtcgcggggagggggggcggcggggggagcgggtggcgcctccggggacgaggaggcggactactgcccgccgacgccgcggaaggagtggtggacgacggggctcctcgtgaggctggtcaccgtggccgtcatcttcatggcgggcgtggtcatcgggctctccgcgagcgccaacgtgtcccgctactactacaactcgcacaccgagctcttcttcccgtcgaacaccttcggcgcgtgcgagcgcgccgactgcgccccgaccttcaagtcgttcgtccacccgccgcacctcgcgcactccatgtccgacccggagctcttctggcgcgcctccctcgtccccgtcgccgacgacttccccttccagcgcgtccccaaggtcgccttcctcttcatgacgcgcggcccgctccccttcgcgccgctctgggaccgcttcttccgcggccaccacggcctctactccgtctacgtccacaccctccccgactacaagctcaacgtctccaagaactccgccttcttcgcccgccagatccccagcgaggaagtgtcctggggatcgatcacccttgttgatgctgagaagcggctgctggccaatgccttgttggatttctccaatgagcggttcgttcttctctcggagagctgcatccccgtgttcaacttcccaaccgtctatgagtatctcataaactcggcacacagcttcgtggagtcctataacattgacacccctcaatgtgctggccgctacaaccggcggatggctcctcacatcttgccgagtcaatggagaaaagggtcagagtggtttgagctcaaccgtgaactggccttgcggataatagcagacaacaagtactactcaatcttcaggaagcattgcagaccatcttgttatccggatgagcattacataccaacctatctgcatttgtttcatgggtccctgaatgccaacaggaccatcacatgggttgattggtcaagaggaggtccacacccagcaagatatggtgcttcaaacatcagtgaagagttcatccaggctatcaggaataacggtacacgatgcacttacaactcgaagcccacttctgtctgctatctgtttgctaggaagtttgctcctagcgctctcgggccattgatgaacctcacttcgaccatattggacttttgagttactcaccattcttcattggcatcacgctaccggactatctccatcggcacacatactccatgaggagtagcggtacactatacatgtttgggggcatgtatcgcatgacagatggatcggagacgcctttcgatgagtcgtcacccatctctgatggatgatgctgtgcgggcagtgaagattacttcacctgccctgaagctgattcctgagtataggatgaatggagctgcatacggagaggacttttgtttcacctcccattctttttattatatcatagctatatgatattagagcttttctttttcttctttccccatccattgtaatgacttggtcaggatactaatttctgtgaatataacctatcaatcattgctttt

SEQ ID NO: 24584 - DNA, 1566 bp, Oryza sativa
  misc_feature (528)..(529): "n"=any one base of a, t, c, or g
  misc_feature (534)..(534): "n"=any one base of a, t, c, or g
  ref <308>: DATABASE ACCESSION NUMBER: AK100026
  ref <309>: DATABASE ENTRY DATE: 2002-08-28
gaagggtgtaactgaaaaataccccgcccatcgtctctctcttctcccaccgttcacaattcctcttccccttcccacggaatcctcttcctccccatgctccgacgacgaccatccctccgattccccggccatggaagcagacgagccggccgccgccgccgcctccacctccctcgactccgacgactccttcttcgacgccctcgactccctcccttccccaccctctcctcctcacaccccttcctcctccaccctccgccgccgccgcccgcgccgcggatggagtctgaagcagcacgaggacgacaccgccgcatcacctacgttctctgattcatccaccatcaccgtcgtcgacgaggccgtcaagcccgactccgaggagacaagctcacaccgtcctcccccgcctcccgaggaggaagacgaggaggatgcggcggaggcggcggtggagggggaggtggagggggaggtggaggcgagggacgcgaagctaaatccggcaccggcaccggcacnnaagcngacgcctccgccgccgggcattctcgagtccctcgccatgctcgtcatcaaggcggtggtgttccaagtcagcgcgctcatcagctgcctcacgttcccgattcggctgctgcaatggtggttcctcctcgtgacggaccctctcggattggtgcggcgagcgagggggtgggcgctcgaggtggctgggcacgccacgggcgccgcggccgcgcgtctcggcggcggggaaggggtggggcgcatggtggcgaggctggcgggggggtcgctctgggcggtgtacgtctgcgttgttctgtgctcgattctggttatggcgttcctcggaggagggctcttggtggggaaagttgtggaggagcccattcaggttactgagaccctgaattttgattacaccaaaccgagccccgtggcatttgttcctgtacagcggttggtgccgccgaatcagcggatgcagctcgaggtgttcctgacgctgcctgaatcggattacaaccggaggcttggagttttccaggtaagagcagaatttctatcagcagacggcaaagtgatctctacctcaagtcaaccatgcatgctaaagtttaagagtgcccatatgcacttcatagaaacttttctgcgaagcgtgtctcttttgtctggctattcctcagaatctcaggtcataagactaaaaatgaggggcattacagaggcttcagaaccagtaatgggaataaggataattcttgaacaacgagctgaatttagtcctggtgcaggcatcccagagatctatgccgcatcactaaagcttgaggcagaactacctctgctcaagagaatactctggaactggagatggaccctttttgtctggagtagcatggggttctttgtttttgaattattgctggcccttatttgctgtagaccctgtatatttcccaggagtggacataacgctgcaactccttaggctagctcatgtaatgtacacttcaaaataaatgcaaaagggatgttaatgttgcacgg

SEQ ID NO: 24585 - DNA, 2062 bp, Oryza sativa
  ref <308>: DATABASE ACCESSION NUMBER: AK100027
  ref <309>: DATABASE ENTRY DATE: 2002-08-28
gaaaacacaaacccaccacctcctcctcctcctcccatccagcacgcgcctcctctctcgcgcggctttccatttccatctccccctcctcctcctacgtctccgccgctcctcacttcctccactcgatttcctttcttggcctctcctcctctgacacaggggtgtgcaggtttgtgtttgtgcgtggcgcgtccgccatggctcgcggcagcggggccggaggaggcggcggcggtggtggcggggggctggagctgtcggtcggggtcggcggcggcggcggcgcgcgtggtgggggaggcggtgaggcggcggcggcggtggagacggcggcgccgatcagcctcgggaggctcatcctctccgggatggtcgccggcggcgtgcagtacgggtgggcgctccagctctccctcctcaccccctacgtccagacactcggactgtcgcatgctcttacttcattcatgtggctctgtggtcctattgctggcatggtggttcaaccatgcgtgggtctatacagtgataggtgcacctcaaaatggggaagacgaaggccatatattcttacaggatgtgtgttgatatgcttggctgtcgtagttattggattttcagctgacattggatacgccatgggtgatacaaaggaagactgcagtgtctaccatggatcacggtggcatgctgctattgtatatgtcctgggattctggcttcttgatttttccaacaacactgtgcagggtccagcacgtgctctaatggctgatttatcaggacgtcatggacctggcacagctaactccatcttctgttcttggatggcaatgggaaacatcctaggatactcctctggttccacaaacaattggcacaagtggtttccattccttaaaacaagagcttgctgtgaagcttgtgcaaatttgaaaggtgcatttctggtggctgtgattttcctgtccctgtgcttggttataactctgatatttgccaaggaagttccattcaaaggaaatgcagccctcccaacaaaatcaaacgagccagctgagcctgaaggcactggtccactagcagtgttgaaaggcttcaggaacttacctactgggatgccttctgtgcttattgtgactggccttacctggttgtcttggttcccattcatcctctacgacactgactggatgggccgtgagatctaccacggtgacccaaagggaactgatcctcagatcgaggctttcaaccagggtgtcagggcaggtgcatttggcctgctactgaattcgattgtgctaggattcagctcattcttgattgaaccaatgtgccggaaagtcgggccaagggtggtgtgggtgacgagcaatttcctcgtctgcatcgccatggctgcaactgcactgatcagcttctggtcactcaaggacttccatggaactgttcagaaagccatcactgcagacaagagcatcaaggctgtctgcctcgtcctctttgcgtttcttggagtccctctcgccgttctgtacagtgttcccttcgcagtgacggcgcaattagcggccactagagggggtggccaagggctctgcaccggcgtcctcaacatctccatcgtcatccctcaggtggtcatcgcgctgggagccgggccgtgggacgagctgttcgggaaggggaacatcccggcgttcggcctcgcctcgggattcgcgctcatcggcggcgtcgccggaatattcctgctgcccaagatctccaagcgccagttccggtcggtcagcatgggcggcggtcactgaccgccccgctctcgccgccggctgcggcggcggcggcggccggagcagcgccgccggaagtggtgagctttgtagttctcgtttgcaatggatcaaaggagccccctctttttttttacatagggtaattaattaattaaggctgttaattaggaaggggtgaggtggccctgcagctggggcccacgctttgttgccacctcggtagaagagaataagcagatcatgcagataatatggaactg

SEQ ID NO: 24586 - DNA, 1897 bp, Oryza sativa
  ref <308>: DATABASE ACCESSION NUMBER: AK100028
  ref <309>: DATABASE ENTRY DATE: 2002-08-28
gattcaattcactcccccctccagcttctcactccccacacgcagcttccagctcatcaccccccacaaccacctcctccccctcccatggcggcggcggcgccggacaaggcggtggagcggctgtcccagaagctggtgcacccgtcgtcccccacgccgtcggccccgctccgcctctcctggctcgaccgctaccccacccagatggcgctcatcgagtcgctccacgtcttcaagcccgacccggcgagggacgccgcggggcaggggctcgcccccgcgcgcgccatcgagacggccctcgcgagagccctcgtcgagtactacccgctcgccgggaggctcgccgtctcccgggactccggcgagctccaggtggattgctgcggcggcgccggcggccatggcggggtgtggttcatcgaggcggctgtcccgtgccggctcgaggacgtggattacctcgagtaccctctcgccatctccaaggacgagctgctcccccacccgcgcccccgccccacccgcgacgaggaagacaagctcatcctgctcgtccaggtgacgacgttcgcgtgcggcgggttcgtggtggggttcaggttcagccacgcggtggcggacggcccgggggcggcgcagttcatgggcgcggtcggcgagctcgcccgcggcggcgagcgcatcacggtggccccgtcgtgggggcgcgacgcggtgcccgacccggccggcgccatggtcggcgccctcccggagccggccggcgcgtcccgcctcgagtacctcgccatcgacatctccgccgactacatcaaccacttcaagtcccagttcgcggcggccaccggcggcgcccgctgctccgccttcgaggtgctcatcgccaaggcatggcagagccgcacccgcgccgccgcgttcgacccctcgacgccgatcaacctctccttcgccatgaacgcccggccgctcctcctcccgcgcggcggcgccgggttctacggcaactgctactacatcatgcgggtggcctccaccgccgggagggtggcgacggcgagcgtcaccgacgtggtgaggatgatccgggaggggaagaagcggctcccgtcggagttcgcgcggtgggccgccggagagatggccggagtcgacccgtaccagatcacctccgactaccggacgctgctggtctccgactggacgcggctgggcttcgccgaggtggactacgggtggggcccaccgggccacgtcgtgccgctcacgaacctggactacatcgccacgtgtatcctcgtcaagccctgggcccacaaaccaggggcacggctcatcacccagtgcgtcacacccgaccgcgtcaccgccttccacgacgccatggtggacatcaactaatttattattataattataattattattattattattattcccttttctttttattttattttttttaccacgccacctttttcactttgtttttttaccactacttccttataattaattaattaattaattagatattaataatgaagaattaagggtaaaaaaaggagaggataaagaaaggtgaaaagtacatattgatattgagggtacaggtagatggtagtagttgttggcattattagtgggattggtattggattcctttggtgttgtttggtcaagtgtatactggagaacagctactacatgctgggtattccttttatttttttttcttttttttgggatcaaaagctggaattggtgggaagccaccaactaaccagtatgtcccccttgataagtgtaccatatattgtattcaatttttatcttattttcagaatggtatatataagctggcaaggtgtacagcctctttagttgc

SEQ ID NO: 24587 - DNA, 1297 bp, Oryza sativa
  ref <308>: DATABASE ACCESSION NUMBER: AK100029
  ref <309>: DATABASE ENTRY DATE: 2002-08-28
ggtagtgttcgcacggtggaatcaagagaagatgcaagcgcaggacgtgaagaacgtcttctgcatgaagggtgggcaaggggagtccagttacctcaaaaacagtaaagctcagtgcagttgagagacctgcaaatgatgctgtatgccctggaggagacactggacaagatcgcgatccctccccgcgggccggggaggcttctgctgacggcggccgacctcggctgctcctgtggccgcagctcgctcgtcgtcgccgatgcgatcgtgcagcacatgaccaagctgtgtcgcggtcgcggcaagcatgtcgacgccgtcgcggctgctgatccggagttctggttctacttctccgacctcccgagcaacgacttcaacaccctcttcagcctcctcccgccgcacgccgcttcctccggcgacggcagtgggcggcgctacttcgccgccgccgtgcctggctcgttccatgaccgtctgttcccggagcgatctatcgacgtgttcacctccaccttctgtctgcactggctctctcaggtgccggacgaagtcgctgatacgcggtcaccggcttacaacaaggggaaggtgttcgtgcagggcagctcggaggagaccggcacggcgtaccggcggcagttccagtccgacatggcgcgcttcctgcgctgccgcgccgccgagctgaaacctggtggcgccatgttcctagtcttcgttggccgcccgtcgtccgccggccccaccgaccaaggccgcagcctcaacctgctgggcaccatgttcgaggagtcgtggcgtgacctcgtcgacgaggggttgatcgacggcgggaggatggacagcttcaacatcccgtcgtacgctgcgacgctggaggagttcagggagtccgtcgacgccgacggctcgttcgctgtcaaccggctggagcacgtgatgggaggccgtctcgccgtggacgacgacccccacgacgaccgctgcgcggtcgggcgcagggtggcgaacaaccagcgatcgatcttcgggccgctcgtcgaagcgcacattggcagggcgctcgcggacgagctgttcgtccggatggagaggcgcgcagaagagctctccgacgagcttgtggacgagatgggggttcgcttccacatcttgtgctcgctttcactcgtctaatgatatttacgtcgtacaatgtcctaataatgaacaaaatattcaaattgtgggcacaatgatttaaatatattaattgtatttgctaaataagtatgtttaaaatatagcc

SEQ ID NO: 24588 - DNA, 1488 bp, Oryza sativa
  ref <308>: DATABASE ACCESSION NUMBER: AK100030
  ref <309>: DATABASE ENTRY DATE: 2002-08-28
ggggcggtgtgcgctccccacgccgcctcctcgatcccctctctcccctgtctccccgatcccctttctctctcccttctccggcgccgctttcctcgccgccgtccccttccggtgcgccgctccccctcccctacatcccgacctccacctccaccgccctgccgcctcctcggcgaaggagcacagaccctagcgaccttccaattcgtcgccgccgcccgactcgccgcgtctccacgccgacatcgaggtaagagctcccccccttctccggcgagacgtgtcttctatgattctccccccattgtcgtcgccgattggccggcgatggattactggctcgtcttcttccggggcgccggggacaacatcttcgacgccatcgccgtcgcggcgtccgaccaccccgccgcgctcaggtcgaggcgggacgccatcgcccagcgcttctacacggcgtaccgttggcggtgcctcccacggggggcaccgccaccgaggcaccgccgccgcagctgctccaccccgagggcgccgctagcgtccctagcatctgtagctccgaccgcgccaatgtcatcgccgacgacggcggcgtcccttgccatgaggaccccgtcgccgccgagaccgagcgcatcaaggccgtcctcctcaacgaccaagaaaagtcggaggcgacgttgctcgagctgctccggcgtctgcagcagctggagctcacggtggacaccttgacggttactgagattgggaaagcggtgagcagctaccggaagcacaactccaagcagattcgtcaccttgttcaattgctcatcgaaggttggaagcgcatactcgatgagtggatgagcagctgagacgccattgtagtgcattggatggaattgttactttgtggcaagtgcagccaaaaggaccagccatctccttgcttagcacaacagattgcttttctcctaagcataggtggcctgaagatgtagcttggcatccagatggtgaattaatttttgcaatgtacagtgctgataacggcgactctcaagtttcactgatgaatcatagcatatcaggacaaaagaaagttagttttctaccagtgaagcctcataccaaggaaattattaacaacattaattttatgccatggtctgatgtatgctttgtgactggtggaagtgaccatgctgtcaacaaaaagatgattcatggaaccacacaaaagtgcacaaggatttgcattcttctgctgtcatgggtgttgctggattacagcaaaaaaaaatgcaatattatcagttggcagtgacaagaggattataccatttgatctggcagctagaagggcagggtccaagattgtattacagatccatgcgatttcaacttgttatgattgtagtcttataaggttgttttccttctttgttccatacctactctgctaaaaaaagaaggctagcatgacggtcacattct

SEQ ID NO: 24589 - DNA, 1340 bp, Oryza sativa
  ref <308>: DATABASE ACCESSION NUMBER: AK100031
  ref <309>: DATABASE ENTRY DATE: 2002-08-28
gatctgctgccacatttcatttcatttttcacctcaccatcgccgccgccgccgccgcagtgagctagggttccgaccgaccgggggggcgaagggcgaaggcaatggacgagtcgaccgcctaccgcaacctgcggggcccgtcgtcctttgtgttggccatgaaaacccgcctcgccccgccgccgcagctctccgatccgcctccgcctcccctccccgccgttcctccctcgctcctaccgcccctcctaccaccacccgagaagcgacgccggggtcgtccccgcaactgcgaccgcctcactgcgccgccgggcttcttcgccccgctgccgccgccaccgccaccgcaacctcaaccccccacgctgcctgcgcctcacgggcaggggcaattcggtggcctccagccccaccttctccaaattgatgcaggagaggaaatcataccgaagattacggcactgtcaaagtcaaatgggagggtgatctgtgttctttcagtgcttggagctgttcaggaagcaactctgctcctatcatccggtgttacttcatatcacaagggtcctttggaaataattcgtttgttcggatccattttgacaccaaatgaccaaggatgcttgcgtgtaacccttgcttctggcgatagttctgtgattggtggtgttatcactggacctctcaaagctgcaacacctgtccaggtagttgttgcaagcttttacagcgatgtatactggccaaacaggacacctaagatcattgcaccttaccctaattcccagtctaccatcaggaatggcagcactctgtctagtgagcatgtcaatccaggatatgtatcttacactgcagtggatcaacatgaatcaagtgaggttgatgttaagccctcactcgggatgcttaacttagcatcattggatcgacatgaatcaagtgaggttgatgtcaagccctcactcgggatgcttaacttagcatccttgtaggtaatttaactcaatggaagagatgtttgacatatttttagagaaaatgcatcagatagctcagatttcgtgaaccatcaagtagtcgtgactttgtggcttagttgaaaagcagttctttatagatggaacattgtactcttggattttcattgttgaaattcatgtgggcggcgggcatatagcttcagtgctaatggtgctctgatgaactggtaattttgagtgaagccaaagggtgtgtgctcttgagctgaatcttgaccttacatgatgtggctggcaggtttggtgggaacttgaaaatatcacaataagattggcaaggtacagctggtt

SEQ ID NO: 24590 - DNA, 2699 bp, Oryza sativa
  ref <308>: DATABASE ACCESSION NUMBER: AK100032
  ref <309>: DATABASE ENTRY DATE: 2002-08-28
gaagctgggccgcactctcacccgcttcctctccaagccccctttcaagcccaagcccaccaacccctcgccgccgccgcccccgccgccgccggggatccagcctcctccaccggcgctgcccggcatgccgcacggacgcccgccgccgccgttcccgggagggcgggacgcgttcccgcaggcggcgtcgacggtggtcccggacccggccaggttcttcgcgccggcgctgctctcgtcgccgctccccaccaactccttcttccagaacttcgtgctcaagaacggcgaccagccggagtacatccacccgtactcggtccgctccgccgccgccgcgctcaccctgtgctacccggcgcggaaccactccccgtcgttcgtcatccagacgttcgtcgaggacctgaccgtctccgcggcgtccgacgccgcggcggccgcggcggggcagaggcaccgggtcgccgcgttcgacgacctctcagtcaccctcgacgtctcgccgtcgctcagggcgttcctcgtcaggggctgcccctttgtcaccgtcgccaccgccgacgccgcgggccccgtcgacatctccgtcgcgtccgtccacgccttcatcgaggtggcctcctgcgacgacgcgctcaccaagtggcggctccggatgaacagcggccagaccttcctcctctacgcgtccgcgccgatccgcctcgcgcagtccagcgtcacgcagctgtcggcccccggcttctccggcgtcatccgggtcgcctacctgccggacccgtccatggaggcggttcttgatcagtacagccggtgcttccccaccgccggcgaggcctcgctgaaccgccccttctgcgtcgagtacacctggcgcaagcaagggtggggagacctcctcatgctcgcccatcccctccacctccgcctcctctccgaggattgctgcgtccgggtgctcgacgatttcaggtaccggagtatcgacggcgacatggtcggcgtcgtcggcgattcttgggttctccggaccgatccggtgtcccccacatggcactcgatgcggggcatcagcgacgacggggtgggcgaggtcgccgccgcgctgcgcaaggatgtggatgcccttgcttccagctccatcacgaccacctcctcctacttctacggcaaggcgatcgccagggcggcgaggttcgccgtaatcgccgaggaggtcggctgccctgacgtcatcccggcggtgcagcgattcttgaaggccaccgtcacgccatggctggatggcagcttccagggcaatggattcctctatgaacccaaatggggtggccttgtcacattgcagggatccaaggacaccggcgccgatttcggcttcggcatttacaatgatcaccactaccatttggggtacttcttgtacgccattgctgtgcttgccaagattgatccctcctgggggaggaagtacatgccccaggcctactccatggttgcagatttcatgacattgtcgcggaaacacggcgcaagctacacaagattgaggatgtttgatctctggaagctccattcctgggccggaggtttgacagaatttgcggatgggcgcaaccaggagagcactagcgaggccgtgaatgcgtactactccgctgcgcttctcggattgagctatggggatactcaccttgtctccatcggcgcgacattgaccgcattggagatgcttgcagcacagacatggtggcatgtccgtgaaggtgacaccatctacgaagacgatttcaccggcaacaaccgtgtcgtcggcgtcctgtgggcgaacaagagggacagtggcctctggttcgctccaccggagtggaaggaatgcaggctggggatccagctgctgcctgtcctgccgatcagcgaggcgctgttcccggacatcagcttcgtcaaggagctggtggactggacaatgccggcattgtcaagggaaggggtcggagaagggtggaagggcttcgtgtacgccctggaggggatctacaataaggaatcggcattgcagaagacgagggcgctgacggggcacgacgatggcaactccctgaccaaccttctctggtggctgcacagccgcggcaccgccgatgatggcgtcgtcgggttctccaggtgctgctggtaccgccagtattgccattgatgggggctgaaatgatcgcagcagagattgcccgagatgatgcgttgttgctgaagatcaggttgtgtgggtgatatgccgaaggatacagattattatagagtgggctgttcagtttcagagtttccgtgtgattcaaacatcaggatgctacacacacatcttttacactttgttgtttcaataaaaagtagtcaaaagtcatggtatgttgatattttacatggaacgcaattggttcagaagttttgagttgcctatgttttcttttttttttctctctctttgtctcggttttgagagtgagatttctcctgctgatagcctgctagcaggtgtggcccattctcaatctcagggctcaggccagtttatttggaatgcaacttacacaaagcttcccccttaaaccactagaatatacttcctccgttttataatgtataatgtatgatgttgttgactttttaatcaacatttaatcatttgtctt

SEQ ID NO: 24591 - DNA, 1535 bp, Oryza sativa
  ref <308>: DATABASE ACCESSION NUMBER: AK100033
  ref <309>: DATABASE ENTRY DATE: 2002-08-28
gcttcttccacgcgctcacgcggctcccgttttcgcggctgcgttttctcgctttcgccgcagctcctcccttcgtcgtccgtacgacgccggccggccgatgcgccgccggtccaggggcgccgcggggtggtgctgttgtcggtagggagggagtgggggtgggtggggggatgatggcgtactcggagccggcggcgagggcggtggcggaggaggtggcgcggtggggagggatgaggcagacgggggtgacgctgcggtacatgatggagttcggggcgcgccccacggagaggaacctgctgcggtcggcgcagttcctgcgcagggagctccccatccgcatcgcccgccgcgcgctcgacctcgactccctccccttcggcctctccaccaagcccgccatcctcaaggtgagagattggtatttggactcattccgcgacttacggtgcttcccggaggtgaggaaccgggatgatgagcttgcattcaccgagatgatcaagatgattcgagtgcggcacaacaatgtggtgcccaccatggcgttgggtgtgcggcagctgaagaaagacctgggtggcacaaaggcctttccccctggcattgatgagatccatcagttcctcgaccgcttctacatgtcaaggattgggatccgcatgctgatagggcagcatgttactttgcatgagcctgatccagaacctggtgttattggactcataagcaaaagattatcccccatgctggtggctcaacatgctactgaagatgcacgtgctatttgcatgagggaatatggatcagcccctgatgtgaacatatatggagacccagatttcacatttccatatgttaaactacatctacaactgatgatgtttgaattggtgaagaattccctccgtgcagtacaggaacgatatatgaactctgataagcatgcgcctcctgttagaatcatagtcgctgatggagcagaggacgtaacaatcaagattagtgatgaaggtggtggaatacccagaagtggtctctcgagaattttcacatatctctacagcacagcagaaaacccacctgatctggatggccgtaacgaaggagtgaccatggccgggtacggctatgggatcccgattagccgtctttatgctcgatattttggcggggacctgcagatcatttctatggaaggatatggaaccgatgcttacctccacctatcacggctaggagattcggaggagcccttgcattaggagatctggaggaggaaaccctttgcctcagttctgataccactgctgtaattaggatgctattgcttttaccattgctgtgctggtatgcaaatacatagttcccaaggccagccagctctatgtgcttccagtttgctggagcgtgatcataattcagatttcagaatcccctctggttcacattgccattagaactcgttatccctcgccctcggtggctgcctgaaaaatgtgatgtacagttgtccgttttcggagttc

SEQ ID NO: 24592 - DNA, 2710 bp, Oryza sativa
  ref <308>: DATABASE ACCESSION NUMBER: AK100034
  ref <309>: DATABASE ENTRY DATE: 2002-08-28
gtggggcaaagtcaactaggacaccactactctgccgcgcgcgcgaaagcagaacacactactacagtgacgcaacttccctctgcctataaaaggttcagcggcagaacaagctcagctcagcgcctcgcagccttctttttcatcatttcttgcacaaacaaaacaatccaaccatcggtcgaagctgtcacaataatggaggcgtcgacccctcttctgaccccttacaagatgggccagtttgatctcgctcacagggtcgttcttgcgccgttgacgcggtgccggtcctacgggaacgtgcccgggccgcacaacgccgcgtactacgcgcagcgggcggcgcggggcgcgctgctggtggcggaagcctgcgcggtgtcggagacggcgagagggtaccccgacgtgcccgggatttggagcgcggagcaggtgggggcgtggcgtgcacgccaagggcgccgtcttcttctgccagatatggcacacgggccgcgtctccccgacaggcagggtgacgctcgctcgcttgattatatagttggccataaggcccgaggcccgaaggcccggcccacggcacgcctttttgcccggcccaagcacggcacggcccgacttgggtcgggcccgtgccggcccggcccgactgtcgggccgtgcctgggcctccccaccagcacgctgggctggcccggcacggtcgggccggcccggcacgatgggctggctggctaggcccggtacacaaagtatagggactaaaaatagacatataaatgtcaatgtctaaagaatagggaccttaaatagacttattttagctatttatataccacagcacaaagaagagggaggtaaaatagactttttttagctatacaatgtcacagcccaataggagggagaaaatttagacttattctgaggaaaagcacgatggcccatcgtgccttcgggccggcccggcacggcccgaggcgtgttgggccgtgcctgggctgtgagtgcagcacgtgagctggcacggcacggcccggtgcgtcggtcgggccgtgccggcccgacaagcctcggcccaggcacggccgggcctaggccgtgccgtgccgggcggcccacatggccatctatacttgattagttcttctccaagtcgtccttttatgtttttttttaagttttttggtttgattcatctttctgcagtttgccatagtaccatgcgctaaaagtttatctaattatctaaagtatattgtttgcgtttcgtagttcttagtttatagtttgatctaagcaacacctcggcagtttcatttcagaaatttttgcaacccaacactgctgatgatttgtcactgatcgacgctggtgaaactcgtgcttttttttaagataatgaactggtgctgttttgtgatttgttggctacctttttttctctctcattcatgcttggctctactttgtattgtcatccaaaacgattttgatttgttgtgatatatttttaataataattttagacagatatttatatatccttatcttcttatggtcctgaaatagaccactaaaatgaaagtgacaaccccctcctccttaaattagtcatgaagtcaagtccaaatcagctgagtatcttttcgtatctcctgggaatttgctcgctcgacactttgttaagtccagttggccgcaagatggatgcaatcagtccgctggtgattttaaggatggacaatcatatatcctcttttttttcagagttccagcctaatgggcaagcacccatctcaagcacggacaagcaagtgaccccacaggtcagccatgatggccaagttctggaattcgctcctcctcgaagactgaaaacagaggagatcccaaacatcgtcgacgactttcgtattgctgccagaaatgccatcgaggccggtttcgacggggttgagatccacggcgccaatggttacctgatcgaccagttcatgaaggacagcgtcaacgaccggaccgacgcgtacggcggcggcatagagaaccggtgccgcttcgccgcggaggtgatcacggcggtggccggcgagatcggcgcgcaccgcctgggggtgcgcctctccccgttcgccgactacatggactgccacgactccgacccggaggtcctcgcgctgcgcgtgatcggcctcatgaacaacctcggcgtcctctactgccacatgatcgagccgagaatgtgcgtcggcgccggcgaggacggcagcaagccggtgatcgcgcacggccgcctgcttccgttcaggaaggcgttccggggcacgttcatggtgaacggtgggtacgaccgggacgaaggcgacaaggcggtcgccgacggctacgccgacctggtggcgtacgggcggctgttcctggccaaccctgacctgccggagaggttcaggaggaaggcaggtctgaacaagtatgacaggagcacgttctatacctctgatcctgtggtgggctacacggactacccgtttctggatgatcagaattcagaactagcaactcgttgagttcttccgtcccaaagaccgaccagatgctcgtgctaccatgctgggcacttgcatgcatctagcttggacatttgtggtgtgaacctcagcttgtaccgtgtgtactatactagtataaaaacgacttactc

SEQ ID NO: 24593 - DNA, 2085 bp, Oryza sativa
  ref <308>: DATABASE ACCESSION NUMBER: AK100035
  ref <309>: DATABASE ENTRY DATE: 2002-08-28
gagttccatccttcccaaaatccaccggagaagaagacgattagccggggaccacgccggagaaaaaaaaatgctgtcctccaccgctctccggccgctggcgcagcccgccacggccacggccacggccaccgccttctcggcctcccgcacggccgccgcggctgggcggcgcgggtcggcggcgggggtagtggttcgcgcggtgcggaactacgactcgatcccgaagcgggagcccttcagctcgagccgcagcgtcctcgacgagttcctcaggcaggagaagcctctcgtccagcgcaccaaagaccagatcacagattattgcacaaccctagaaggtgatgagtgctgcagctgttgggatgcttactttgaactcaataaacttgagcaagagctacccaaagaggaaattgcaaggatggtgaaggactccgagggagatccgaggtacctgatcaatagcatccatcaccgttcagatctaagaaagaagatggctgagaaatctcataattcactatcatcaaactccctggggcaagctgcgaagccaaggcctttccctgtgcctgacggattgccgaaaacacaggaagagcttgctgaagaacaggaggccctaatgccggagtcctcctatacgaggctactgagaagaatggggagatttcctgattggtatacgcctcgtccagatcatgaaaccgactgaatcaagtcaccaagcatccatataccgctccttgtgaaaattttgtattggttgccggataattatgatgcctgaagttctgtggtttgggtaatgcactaaggttcagcagcgtggtagctatccaggaacaagatgagggagtacaagcatgagagcgatctgttggaccagtgcagccgcctctacgacccatcagtctctagcaggagttttgagctgtatgctacgcagatttctcaggagataggatcaacctccaccatcatggacagggagatggtttccattcggagcttaatggctgtggtcgaagaaatgatgcggaacacagattcggctatacgctcatatcaaaagctgagaccaaatttcatccgtagatattctggaactgcaaatactggttttgctcatcatgctggaccatctggtgctccaacttatttcaatcaaccctcagcaattgtgccaacatttgatttttacagtggtgttgcaatgcggccttctccttttatgcaacacactgtttccaagtttgagaaccgtcttgaggaatgcagcagaatggtcggagagctagagcagcttattcaaataaagaatgataagaactattcaaatgcgttcgaatccctgtcaacagtagtgcctaatgtgtacgactatctcatccatgttgctacccaggtggaaaatcttcatcaatatgctgaggtaatgagaactcactatcggaatgcttggcggctcatgggtgattgtagcaatccttttttggaggcagatagaagagaggcagctaaacaagaagccactgccagaatagtccatcctacaggggttgatgtatctgtgctggcaagccaacctttgcaattgtcatcccctactggcgtaacttcatctagtactcgtgcaattcttagaacaccactttctgctttgccctggttcagcattcaaacaagtcctgctccatcacccagccctttcagttcatctgggtctatgctgcagcccacaccatttggctcagcttccacacttgcactaggatccactccagcaagatttgcgtcttctgctttgggtggcacctcacttttcagaacaccacctggaggtacacataatattctatgtgtaactggatagaacggattaaaggaccatttgattcagaagttatttttatttaacttgacatgtaacccgtgtggacatccttagtcaatgtcgtgtagctttttctttctaaatttgtaaaaccaacgcattcttttggttaaatgtgaaggatagaaatgttatttccataccactgtagcacattcaattgaatctatcagaaatttagc

SEQ ID NO: 24594 - DNA, 1046 bp, Oryza sativa
  ref <308>: DATABASE ACCESSION NUMBER: AK100036
  ref <309>: DATABASE ENTRY DATE: 2002-08-28
gatagagtggggagagagtcaagagaggggcgtgtagcacacgtggaagctgacgataaatttttttcccccaattccgcctctttgctttgcgtgcgaatttgatctcgaagcttccgccaagcagcgagctctcccgatccgcgggggcgtcgaatcctatggcggccaacgccggcaacaagatccgcaacgccaaactggttcttcttggagatgtgggcgcaggaaaatctagcttggtgcttcgttttgtaaaaggacagtttgttgagtttcaggaatcgacaattggagcagcatttttctcacagaccttagcagttaatgacgaaaccgtgaagtttgaaatctgggatacagctgggcaggagagatatcacagcttggctcccatgtactataggggtgcggctgctgccatagttgtctatgacatcacgaatccggcctctttcacccgtgcaaagaaatgggttcaagaacttcaagctcaaggtaactcgagtacagtggtggctcttgctggcaacaaagccgatttgctagagactaggcaggtgcaaatagaggaagcaaagacatatgcacaggagaatgggcttttcttcatggaaacatctgcgaaaactgcaacaaatgtgaatgacatattttatgaaattgcaaaaagattgcttcaaggatagccagctcagaacccgcaggccggcatggtcctctcccagagaccaaatgagagactggtcagctctgcttcatgctgctcttgaagcatagtttcggccgagtattgtcattataaaatctaggagaggaaaattcaacaaatatcccagaagttcttgtgtggccaccttcatggctatatactccagccttcacgcttatttcttttcattccttgtgtcatgtaaatgtcaatacaaaaatgccacatcagaggcttgaaattggtaccgaaatgttaattgtgctctatcattgttactgttcttttacattcgcattcccatgaaatgtgtgacccatggttactggttact

SEQ ID NO: 24595 - DNA, 3741 bp, Oryza sativa
  ref <308>: DATABASE ACCESSION NUMBER: AK100037
  ref <309>: DATABASE ENTRY DATE: 2002-08-28
gctccccttctctgcgtgtttttgtggacgacggcgtcgtcgcaagcttcttgtggccatcgtcttccccccctctcctccttcctcgcatcctctcctccctatctctcacaaaaatccattcttgcacagggaattttgcctactcctatttacgatccttctcttccccctctgggcggccaaagctctcgtttttacgcgtgatttcgtcgtcttgttgctgctgacgagcccgctgattttggctcgatttaatcccattttacgggtgttttgcatctattggagatccaaaggtgcgccctttctgggggtatcttggggggaattggatcgatttcgatctgtctgagtggttctctgggcgttgttggtgcgttcttgatccgagaggtgagagatttggttggattttctccctggagcatttggtgtgctcgagcaggatgctctatttgaagcagccgacgaggagctgaactacgcggagttgtttttcccctctgaattttcttggtttggatttcgcggtggtcgtgtggtttgctttgctgatctgatctgatggaggctatggcgggcgacaaattccttcagaagttccggctctacgagaccagatcgaaattttatcttatcggaagggacaagacaaggactctatggagggtgctgaagattgacaggatggagcctactgagctggaaatcgaggaagatcatacaagttacacagagaatgaatgccaagaactgctgtggcgaattcatgaggggaatagattgactggtggactgaaatttgtcacgaaatgctatggaatagttggttttataaaatttcttggcccttattacatggttctaattaccagaagaaggaaagttggtacaatctgcagtcatgaaatatattctgtcggcaagagcgaattgattgcaattccaagtcctattgtgtggcccaacgtggcttattctagggatgagaacagatataaacggctcctttgctcggtcgatctctcgaaagacttcttcttcagctactcttacaatatcatgcgcagccttcagaagaacataactgacaagaatactgggcaagttgtttatgagacaatgtttgtttggaacgagtttctgtctcgagctatccggaaccatctcaagaatacaacgtggactgttgccttaatccatggattttttaaacagtcaaagctctcagtagctgggaaggaattctggttgacacttatagcaaggcgctcacgtcattttgctggaaccagattcttgaaaagaggtgttaatgaaaagggtagggttgccaatgatgttgagactgaacaaattgtttttgaggacacaccagatgaaataccacatcagatatcatctgttgtacaacatagaggatccatacctcttatatggtttcaggaaacttcaagactcaacattaggccagatatcatactgaaaccggatgtagactacaagacaactcgccttcattttgagaaccttgcacttagatatgggaacccaataattatcttaaacttgatcaagactcgtgagaagaaacctcgtgaatctttgctccgtgcagaattcgcaaaggctatacattatattaacaaggggctgccagatgacaaacgtctaaagtttttacacatggatctgagtaagctttctagaaggaaaggtaccaatgtgctttcgctgttgaacaaggtagcatcagatgtgttggatctaactgacttcctccactgtgagataactacatcaaagtatgaggatgcatcaagtggacaaggagctgttgccaactcaggtgacatcgaaaacatccaggatcaaaatttatgtgcaactaagctagtacctcttttactgcaaaagggtgtcctcaggactaactgcatagactgcttggaccgcacaaatgttgcacagtttgcgtatggcttagctgctttagggcgtcaacttcatgtgctccagctcaatgaaacccctacaattgaattgcatgctcctttggccgatgatcttatggatttctatgaacggatgggtgatacgctagctattcaatatggtggctctgctgctcacaacaagatcttctgtgagcaaagaggccaatggaaggcagcaacacaatctcaggagttcctccggacccttcagcgctactacagtaatgcctacactgatcctgagaagcaggattctataaatgtgttcttgggtcatttccaaccacaagaaggaaaacctgcgctttggaaattggactcagatcagcattacaacattggcaggcaaggaactttaactgaagaaactgggagatcattcataaagaggtcgttatcggacggtaatattttatgtgacaacactggtggacctgtatctgactgtaatgttggaaaaaacaacacaagctcagaattgctcccaatgcaaccactggaggatattagagaaccttctgattctgcaccagagatctctatagaacctaacccgtgctccagtacaaactatagcacattgtctgggagacactcaatttcagaagagcggcagaattatttgagaagattgggttatcctgaattgcactcttcaaactttcttgatcttgatctgttatcatcttcaggaaattcttgtgaggaggaaatttatgagaggtcatcactcatcaattcacccatggatgttgtcagtattgaatcaactacatcatacagtgaacagggacacaatgatgagcagggaagagatgacacagatctgtcacgctcaagcagccaaatgtcagacatccgtgactactctgaccgcttcacgcattgggtggatggcggaggcatgctttgctactagagctataaaattgtcttggtgacatctcagcaaaaggattcaacagcagaagctatcgcagctacattaaaggaaacactcgaagtcaagctacatctgctgcaaactgcaacggtctcgtgatcgaagagatcatcacaacaaatggaagaaacatcaacttggtttgcccagagaaagtgctcaaagatgacaatccattggggaatatgaaaccattctgactcggttcggttgaggtacacgattgaatttctatggtgaagaagaattgaccatactgaagacaataaataggagaaacatatatcacattctttgcaagggttagcttagttagaatctttggcaatatgttataggaaaaggataaaacagaaaaaagaacttctcaaacaaaaatgaaaaaaaaatggaaatgctaatccctgttgtaaatatgttatagtattatacatatttaccaatttttactttacttgctctctgtatggaacttgccttttcagtcttcactgtacaaaatacactaatcgttggcaacacggtaatgattgcgagacaatctaacaggccacacggtacaggaggaaatgagttgtcaagccaatgtttcagtcagcctggttgtgtgtttttttttttcctttccagagatgtatgaaattgcacctgatgcatgaactaattttcttctggggtcctgctgattcatgttaccagtattgtcttgcatgaaccctgaactccatgatgaatgggagtgctgttgcaacatgatgggtaattactatattaacgaatcaagatacaggtttgtgc

SEQ ID NO: 24596 - DNA, 1721 bp, Oryza sativa
  ref <308>: DATABASE ACCESSION NUMBER: AK100038
  ref <309>: DATABASE ENTRY DATE: 2002-08-28
gacgtattccccatgagctatttagttgatttggcgatgtggtagttgcatactagtcgtcctttcttcccttgtcacctttggcggcctcggcttgcttaaaaggatacatatgcttttgtaactagaacatttgttgttgaatttggattatttgatcccatggcgaattctcgggctagccgtttcaagatgtctaatctatcagagccctcaaaagaagctgcatcagctgatgattcaagtgctgtccagaaaactggagcatggagtaacacgttgaacattcttctgcaacaagcttcagtctatggtgtggctgctggttattgcctgtcagcatccctgctctccattatcaacaaatgggcagtcatgaaatttccataccctggagcattgacagctttacagtacttcactagtgttgttggagttctcttatgtggacaactaaagcttattgagcatgatggccttaatttgaggaccatgtggaagttcttgcctgctgcggtgatgttctacatctccatcttcacaaacagtgaacttctactccatgccaatgtggacactttcatcgtgtttcgctcagctgtgccaatttttgtggccattggagagaccctttatcttcaccaaccatggccatcactcaagacatggctttcactttcaactatacttggtggaagtgtgatctatgttttcacagacaaccagttcactgtgactgcttacacctgggcagtggcatatcttgcaagcatgtccattgactttgtctacatcaagcacgttgtcatgaccattggcctgaacacatggggccttgtgctttacaacaatctggaggctttgatgctcttccctcttgagatgcttctaatgggggagcttaatcagatgaagggcgacagcgctaaagtgacaaactggctttcatctgatgtcattcttcctgttgctctgtcttgcttgttcgggctatctatatccttcttcgggttctcctgcagacgggctatctcggcaactggatttaccgtgctcggtatagtgaacaagctcctgactgttgtgattaatctccttatctgggacaagcatgcctcctttgtgggaacaattgggctcttgatctgcatgtccggtggtgttctctaccagcaatccaccacaaaaccaaaggcccccaaggctgagccaaaagaggagaatgatgaggagcagcagaaattgctggagatgcagcaagggctcgaaagtagctcaactcagaagcaagcgtcatcttaagcctggtaggaaatttggcgtcgatatcttactctcaacctcaagacggcttccctgtatcatattatgggatgctaaagaagaatcatttggccaaaggatgtttgttcgtcatgctagaatcctgtaatgctgttggcatgaaaaatctcagagaaaacttaatgtcactttaaaattctttgtttagtggtataccgtaattcatttgttagacctgtggtagggtatcaattatcaaagaatcctgaaacatactcgaacagaatactccgtatacaatatgctgtttcattgataatacagggtggttacccttttccatgcagtatatttgtttttgcttttcgttttgtgatgaaggaaaattatcttttgtactcaaattgcctgtatattatgtattctgtattgtgttg

SEQ ID NO: 24597 - DNA, 1612 bp, Oryza sativa
  ref <308>: DATABASE ACCESSION NUMBER: AK100039
  ref <309>: DATABASE ENTRY DATE: 2002-08-28
gacccacaaaaccccgtgaggccgtgacaacgcgccatggccgccgcggcgcccgcgctgccggcgttcgcctcgcttctcctcccctcatccagctcgcctccccgccgcatcccgtggccccgccctctgccttctcgccggggcgctctccgccccgtcaagctgctccccgccatctcagctgtggagaagggcaagggcgccgccgcggaagccaaggaggtggagctggaagggatgccgccggagtactacgacgaggaatggcaagctcgtcagcgggaaaagactaaggaatggaatgcatatcggaagaaagaggaagctgaggaagaaaggctaacaaatgaataccgtgaaataggcatgcgtttgaaagcttacccacaggaagaagttcgcaaagctcggattttggtttcaagttttataagagctggtgaagatattgaagaggaaattgagaaggctgctgaaagaggagagcttactgaacttgttcttatggtcatatggaatcgacttgatgttgctcgccgcgatgatgagagggatgccatcagaagccttgatctcttatacagaagggtagagacggaaattttaaggagtgaagcaactcctgctatgagattgctcaatgaccttctgaatcttcatgatggatctgatgatgacaagtggttaaagaaatgtaaaaaacatatgcttgaagtttttcccagagaagacccgttcaccatggtctttcctgctggtttcaacatggaggaacatcaaggacagatcaagctgccacctcaggatgatgatgttcttctaagagttgatttcatcagggaagttgatgagctcttgaaggaagttcaagctgcacatgaaaacaataaggtcccaactggtaatgacccggaagctgttgcgaccaagttgaagtatcaagagaagctgcggaccatacgtcaagtggaatctctcctggaactggcatcctccctgaaatggtgaggattgagtttgcagaggaccatgaaattctgcgcacataggactagaagttaccggctgagtacttgatagctgcaattagggtgcagccttttgagctgattctcaggtttctgctagttagaaactcctagcatttgaatacaaaggttagctgatatctgcttgggcgtcaatgcattttcgtagaatattttctgcacctgggtgtccaactcctattagatttgtactgctctagtcattcagagttcaactgtaactcaagcagtgaggctttgctctggattaatgtatcatcatgagaatggtgtgagggtatctcacacgctcaagctctagcatgaggcagatgagtttcaagccaacaagctgtgtctctagtgtgcataatcgagatgcagagatggttgagtacttgagttctgaagttcccaagtcaaatactgtgtaaagattttcgtttgaaggaaaagaaaacattgaatgtaacattagtacaataacttgtaaaagtttttttttgtatggagcatgtgaaaatatctggaacaatccatggtttcaacagtagcaaaatttggtcacataccaaggcacc

SEQ ID NO: 24598 - DNA, 3426 bp, Oryza sativa
  ref <308>: DATABASE ACCESSION NUMBER: AK100040
  ref <309>: DATABASE ENTRY DATE: 2002-08-28
gtgtatctgcttgcacgagaacatgtacagccacacgatcgagcagagctcaaatggctactacatcatcagcatgcgtttccattgctgtactagtagtagtgctatcgtccacctcatgctattcttctccaagtccgacgaccaccgccaatggcagcagcgacaccgatctcgccgccctgctggctttcaagtcccagcttaccgaccccctcggcgttctgacaagcaactggagcaccagcacctctttctgccactggcttggtgtcacctgcagccgccgccgccgacatcgtcgtgtcactggactgtcgctgccacacacgcccctccatggacccatcactcctctcctcggtaacctctcgtttctctccttcctcaggctcaccgacaccaacctcacggcctccatcccagctgatcttggcaagctacgccgtcttagacatctctgtctaggtgaaaacagcctctctggtaggattcctcctgacctgggaaacctagcaaggctcgaggttcttgaattaggcagcaaccaactctccggtcagatacctccagagttgttgctgcatctgcacaatcttcaggtaatttctctagaagggaactccttgagtgggcagatcccgtcttttctattcaacaacacgccttccttgaggtacctatctttcggaaacaacagcctatcaggtcctataccggatggtgttgcctccctgtctcaactcgagattctagacatgcagtacaatcagctctccagcctagtgccacaagccctgtacaacatgtcctggcttcgagtcatggcgctggcaggcaacgggaacctgaccggaccaataccaaacaataatcagacattcaggctccctatgctacgatttatttccctcgcccggaacagaatcgccggtcggtttcctgcggggcttgcatcatgccagtacttaagggaaatctatttatatagcaattctttcgtggatgttctcccaacatggttagctaaattgtcacgacttgaagtagtttcactgggtggaaataagcttgttggtacaatcccagctgttcttagcaacctcacccgcctcacagtactagagctctcttttggcaaccttacaggaaatattccaccagagataggattacttcagaaacttgtgtacttgcttctttcagctaatcagttgtctggctcggtaccgcggacactggggaacattgctgctttacagaagctcgttctaccccacaacaacctagaggggaatatgggcttcttgtcatctctttcagaatgtaggcagctggaagaccttatcttggaccataattctttcgtaggtgcccttccagaccatttgggtaatctctcggcacggttaattagtttcattgcagatcataataagttggcaggtagtcttccagaaaaaatgtccaacttaagcagccttgaactgatagatcttggttacaaccaactcactggggcaattccagaatcaatcgctacgatgggaaatctcgggttgcttgatgtctctaacaatcacattttaggccctttgccaacacagattggcacgcttttgagtatacaacgactatttcttgaaaggaacaaaatctctggctccataccagatagcattggcaatcttagcaggttagattacattgacttgtccaacaaccagttaagtggaaagataccagcaagcttattccaacttcataaccttatccaaataaatctttcctgtaattccattgtcggtgctctgccagccgacattgctggcctaagacaaatcgaccaaattgatgtttctagtaacttcttgaatggaagcatcccagaatcattgggacagctcaatatgctaacctatctgattctctcacacaactccttggaaggttcaattcctagcactctccaaagtctaactagcttaacatggttagacctttcctcaaacaacctctctggttccattcccatgttccttgaaaatcttaccgacttgactatgctgaacctctccttcaataggctcgaaggcccaataccagagggaggaattttctctaataaccttacgagacaatctttgattgggaatgctgggttatgtggttctccacgtcttggattttcaccctgtcttaaaaagtctcacccttatagcagacctcttctaaaacttctactcccagccatcttggtagcttctggcatccttgctgttttcttatacttaatgtttgaaaagaaacacaagaaggccaaagcttatggtgatatggcagatgtcataggccctcagttactcacctatcatgatctcgtccttgccactgagaatttcagtgatgataacctgttgggatctggaggatttggaaaagtatttaaaggccaacttggcagtggtttggttgttgctataaaagttctagacatgaagctggagcattcgatcagaatctttgatgctgagtgtcatatactacgcatggtgcgacaccgcaacctgataaagatactaaatacctgttcgaacatggacttcaaagcattggttcttgagttcatgccaaatggcggcttagagaaactgctacactgctccgagggcacaatgcacctgggattcctcgagaggctgaatatcatgctcgatgtgtccatggcagttcattatctgcaccatgagcactacgaggtggttttgcactgtgatttgaagcctagtaatgtgctatttgacaatgacatgacagcacatgtggcggattttggcattgcgaagttgctattaggcgatgacaactcgatgattgttgctagcatgtctggaacggttggttacatggcaccagaatatggctctatgggaaaagcatcacgtaagagtgatgtgttcagctatgggatcatgcttcttgaagttttcactggaaggagaccaatggatgctatgtttcttggagacctaataagccttagagagtgggttcatcaggtatttcctacaaaacttgtccatgtggtggataggcatctactgcaaggctcctcgtcttccagctgcaacttggatgagagctttcttgtgccaatatttgagctgggtttgatctgctctagtgatttgccaaatgaaaggatgacaatgagtgatgtggtcgtcagactgaagaagatcaaggtggcatacaccgaatggatatctgcgacatagaatctggctcagtaaatcgctctagcttattatatatgtatgggtttccttcaaaaaaaaaaaaaaacattatgtgtatgtatctaccttgtttatttgtacactgcaaacgtcatcaacgtcactatattatccaccacttcttgtc

SEQ ID NO: 24599 - DNA, 2952 bp, Oryza sativa
  ref <308>: DATABASE ACCESSION NUMBER: AK100041
  ref <309>: DATABASE ENTRY DATE: 2002-08-28
gagtctttttttttctctcattctgatcatgcaaaaatttccattgaattctctgtctccctgctttcagtgaaaactgaatactgaagaagagagataatgcatccatccatgtgtgtgtgtgctgtgttgtgttaagctttcctttacaaagaggaggaccacggtgctttgtcagtgtcactgcctcactgtttgtggtctcaccttttccctatcacgtcctcaacttacactagtctacatgccacctttatcactgtgcttgaaatccatggctattttagtggcctaatgcaagagtactcttcttgaccctggtggtgagtggtgactggtgagctgagctgagcttgcagttttggttcttggggtcttgaggagttgagctgtggtgcttaacacaggcatagctgcttgcttctttctttcacaagttgttggcattggctccatgtgatcgatgagctgagagagctcagctcagctcagctcactttcgccactgcagcatcggcgagctagagctgtagatcttgggaagatccagcaatggagaagccggcgtcgtgctgctgctacttcccgctgcggtgggagagcaccggcgaccagtggtggtacgcgtcgccgatcgactgggcggcggcggacggccactacgacatcgtccggcagctgctgcacctcgacccgaacctcctcatcaagctcacctcgctccgccggatccgcaggctcgaggcgctctgggacgacgacgcgcgcttcgccggcgcggcggggcaccgcgcgggcgtcgcccggagcctcctgctggagtgcgagtgcagcaagaacgggggcgccgccgccgccgccgagaacacgctgctccgggcggggtacggcgggtggctgctctactcggcggcgtcggcgggggacatggcgttcgtgcaggagctcatggagagggaccccttgctggtgttcggcgagggcgagtacggcgtcacggacatgttctacgccgccgcgaggggcgggaacgccgaggtgttcaggctgctgctggaccacgccatgtcgccgaggtgctcgacgaattgccccaacggcggggaaggcgcgcgcggcggtggcggtggccgctcctcggtgttccggctggagatgatgagcagggcggtccacgccgccgcgaggggcggcagcgtggagatgctgagggagctcatcgagcgccgctccgacgtgtcggagtatctcgacttccgtggatccaccgtgctgcatgctgctgcagggagagggcagctagaggttgtcaagtaccttatggccactttcgacattgtcgattcgactgataatcaagggaacacggcattacatgtagcggcctaccgagggcatctgcctgttgtagaggcattggttgctgcatctccatcaaccatttcagctgtcaacagagctggtgatactttccttcattcagcaattgcaggtttcagaaccccaggcttccgacggcttgaccgccaaatggagcttatgagacacctgatacgtggaagaacatcaaatatccaaaagattatcaacctgaagaatgatgcaggcctcacagtccttcacatggctgtggttggttgtgttcatccagacctcgtcgaactcctgatgacaaccccatcgatcgacctcaatgctgaagatgccaatggcatgactccactggcattgctgaaacagcagctgcgctcttcaacatctgacaagctcatcaggcagatagtttccgcaggaggggtgctgaattcgactgttctgcgaactcggtcagcgatcgtttcgcagataaagatgcagggagggattgcaagcagccccggtacaactttcaagatatcagatgcagagatcttcctctactccgggatcggaaccgcggagtcccgacgccctagctcatgctctagcaatggcaagtgtgaccatgcccatcatggagatgcaaaatgcggaaatgctgaaaaccatggatcttcagagaagaggctgagctctgccagccgtgccaaggaccgtctcaagctgatgctgaaatggcctcgtcagaagatgtccagaggacacaagaaatccgacgatggcgacgccatggattccatcaagaagctgagcgagcaggccgtcgagaccccggccccgctcaggcagacattcaccaagacgacggcgctgaacaacaagaggaccctcgcggtgaagacctcgactcccagctcggccaccaagaagaagctcaacagcaagctcatccacggcatcatggaggccatgccgcacctggcgtcctcgtctccggcgtccgccttcccgaggtcctccaccccgccgccgccgcagtccggcaagatgaagggcgtctgcctggaactggacgacgagaactcgatgacgacgccggtgttcggcaagctgaaggacatcgtgctgaacaacgacgacgatgatgacgccatgggcgagccgtcgagctcggggtcgtccgtgaacgacgacgcgtcggcggagatgccggcgcggcggcacgggtgcggcaacgggaggctgatcaacatctgcttcggcgcgcagggcctcaccgtggaggactcggccagcgggcagcagaccagcaagatgttcaagcagcagtgcctcagggtgtcctgactcccgagtgactcacacgcgcacacggtataattagcctgcttttctttggttttctgactcgaattgagcttgcagttcaacggaacatatatggtttctgcatgttgaactcgtcgggcttgtgtggattttgttggctgctgcgtgtaaccgtatccttgcgtggcgtgcttggtttctggttgggcttgtgttaacgccttaacggcttacttcgatgcaaatatatttggtgaatgtatc

SEQ ID NO: 24600 - DNA, 1212 bp, Oryza sativa
  ref <308>: DATABASE ACCESSION NUMBER: AK100042
  ref <309>: DATABASE ENTRY DATE: 2002-08-28
gtccttcctctcccatgccgccgcctcttgccttggaagggaggaaagaagcgaagagaagagagagctagcggcggcggcggcggcggcggcgaggcagctggttgtttgttgttggttccctctccacggcgacctcattgcctctccatctctctcgagaaccctccgcgcggcgacctagctccaccgtcatcgcagaggaggggggattaggctgtagtagtgtgagatggcttcgccggagccggccgcgggggcggacggcgcttcggctagccagacggccgtggtggagccgatccggttgccgacgccggaggagatcaaggggcaggacatctggaacaactgcgccgtccgcagcgtcgtcagtggagtcatggggggtggtttaggcgtgcttatggggctattctttggagctttggaaaacccaattacagcagaggagatgacagcaagacaacaaatagtataccaagctaaacagatgggtaggcgaagtataagcaatgccaaaacctttgcagtcatgggcctgattttctctgccgctgaatgtgtcatagagaaggctcgcgcaaagcatgacactaccaattcagcggtggctggctgtgtcacaggaggggctttagctgcaaaaggtggtcctaaagctacatgtgttggatgtgtggggtttgccaccttctcggtaatgattgagaagttcttggatcgtcattcttgaatcattggtggaaacattttatcgccttattcgccgttaatttcaagtgaagctttttgtagcaggttagcaaccaagaggtggattcagcatccaaaacaacctttagtcattttaagacattcactcattgacatgtcttctgaggtcttgcagaccaagattttgttattttacgagtgttacccaacatggtaggcataactggagtaactgcgaggtctacagaaatcgacctttaatacgaggcaatggttttgagttctgcaatatgttgtatcattctcactatacggctgctatatttatcttcgcaatccgtatccaatttgctgttatcttgtctcacgttactccaattctttatttctactgatctattgtctgacaatctagtggcacgatatttgggactgttcagaacactgatcaagtgttgtaccatctttatatacttgagatagcacttgtacttt

SEQ ID NO: 24601 - DNA, 2753 bp, Oryza sativa
  ref <308>: DATABASE ACCESSION NUMBER: AK100043
  ref <309>: DATABASE ENTRY DATE: 2002-08-28
gatggaagcgtaagcgcgaggagagagcggatcaaacaaacgaaacaaaacaaacgctcgcaccgaactcgaatttcctccgcgttgccctcgccctcgccctcgccgcctcgaatcctccctcgccgccgggggtatcccccgttggcccgcctctccgatccgagcctgatcggaggagtcccgcgccgccgcagctggtggatgcgtgcgtgccgctagctgcagacctcctcctctcccggcgacgagcgtctaggcccgtgtggttgtgactaagtatcggatcagcgatctttgagaaaaatacagagtgagaagtctgatcgtctgagggtgcatttgtggagaatgtcagagagcaatgtcgacggcatcgaaatatcagctagtaacgatgagaggagggacagaggggacgctgagatttcggaggatgagccaaggcagacgaggatacggtcgttgaagaagaaggcgctgcatgcatctacgaggctgacgcattcgctgaagaagagagggaagaggaaagtgggctgcagagtgccgaagatcacgatagaggatgtcagggacgcggaggaggagcaggctgtcagctcttttcgagaggttttgtttgccagggacatgctgcctgagaggcatgacgattatcacacgatgcttagattcttgaaagctaggaaatttgatgttgaaaaggcagcacatatgtgggctgacatgctgcactggaggaaggatttcgggactgacacaattttggaagattttgaatttcatgagctagaggaggtgctgcagtattatccccatggttatcatggtgttgacaaggaaggaaggcccgtctatatcgagttgcttgggaaagttgaacccagtaagcttgtacaaattacaacagtggaacgctatattaaatatcatgtacaggaatttgagagagcattccgagagaagtttcctgcatgctcaattgctgctaaaaagcatattgatacgacaactacaatactggatgtccacggtgtgggttggaagaactttagcaagatcgcaagggatttggtgcgctgtatgcagaaaatagatggtgattattatcctgagacactacatcaaatgttcattgtaaatgcggggcctggttttaaactgatctggagtactgtgaagggacttcttgaccccaaaacctcgtctaaaatccatgttctaggaacaaaataccaacacagacttcttgaagctattgactcaagccaactaccagagtttcttggtggttcttgcacgtgctctagccagggaggatgcctgcgatccaacaaaggcccctggagtgatcctttaattatgaagcttgtacattgcatggaatcatctgcgttgaaggacattggccaagtatctgatatagaagaagcaattacaggctctgtaagattgcgtgctctcaagttaccagaaagaattagttatacatcaaatgctgaatctggttcagatgttgatgatcttggatctcctataggacaggaagattttgagtatcatagtttggctccagttcatgaggaggccagggagtcaggatcaacatgcagtggttctgatgataaagttgttgagacgaatacaagatacaaccctcctggaaatggatcgggacagtacagcgcaagacaaaatccatcaataaacagagtttcgcctgagccagcaggtcacgtcccaaatgatggtgaaggaaatgcagatcatgggatcttgaaatatatttctaaaaaagttctcggtgtaattcttgaagtactctcttttttgcgtattttcatccgtcatcgacaacagttggaaaatgtcccccagcatactacaacagtgcacagtaatcaggcagatcttcagataattaaggaagatcgtgtaaatccttgtctagagcgtcttgaaagacttgagacaatgtttaatcagctcagcagaaagcctctagagattccacaggataaggatcgtgctatacaggattcttttgacaggataaagtgcattgaatttgatctggagaagacaaagaaggtattgcatgcaacagtgattagacaaatgcagatggctgagacattggaagctgtaaaggagtccgatcttaggagaagaaaattttgtacataataaacttagcagcaatgtacaggaacaagaaaagaagagtcgacgacttactaatgccggcattccaacataaaactaaacttcattgctttgtacatggttacccttttctcactttttttttggtctatcaaaaaaccgagcaaatcttactctgaataagtacagagtggtgacccgaggcaaactgagaagatagtcaagaaagaccgtgctggaagtcacttaacatagtccagcttataatagtccaaaagggatattctaaaagagccaatgcacagcttatttatgttccatcgagcctcctgatctgctgtatgcatctcatcaatgccttgtgcatttttcattttcagaacagtttgaggcaatgggccggaattcatagttcttcataccctttttttggttgatatggtcaatacatgatcaggtttttcattgctttgcctcccttcaaatgtaaagtgtaaatatatgactgcactgcttgctgctgcaagatacttataccagattgacatggtgaaacggccaataaatgccaaaatttaccgttc

SEQ ID NO: 24602 - DNA, 2571 bp, Oryza sativa
  ref <308>: DATABASE ACCESSION NUMBER: AK100044
  ref <309>: DATABASE ENTRY DATE: 2002-08-28
gatccgcgagaagcacccgaaccgccgccgccgcccctcctcctctcttcccccttccgccctctcagccctcgccgacgacgaggaggagaaggcggcggccgcacgcacgccgcgcgagaggggcaagcaaagctcggtggtggtggtggggggggggggcggagccgcgtcgcgcccccggcgcctcggcgccatccgccccgccgcgggcgggctcaggcggaggaggaggaggaggaggcgaaaccctagcgcggggggagacgagtgctgctcaggccactttcaatagataaagaagtaatatcttcatcagtcctttctcaatatagttgagagcgagtttacatggctatgatgccaagtgattcatcacatcatggaattgtagaaaatagcccatacagaactacccagggcaggaatgaggagactggtgaacttggtgcttcatggtatttcagtagaaaggaaatagaagagaattctccatccaggagggatggcattgatttgaagaaagagtcttacctccgaaaatcatattgtacttttctacaagatttgggcatgaggcttaaagtgccacaagtcactattgctacagctattgtgttctgtcaccgtttttaccttcgtcagtcccatgcaaaaaatgatagacgaacaattgccacagtttgcatgttcttggctggaaaagttgaagagacgcctaggcctttgaaagatgttattctggtttcttatgagattattcataaaaaggatcctgctgctggtcagagaatcaagcagaaggaagtatatgatcaacaaaaagaacttattttacttgcggagcgagttgtacttgcaactcttgggtttgatttgaatgtgcatcatccatacaagcctttggttgaagcaataagaaaatttaaagttgctcaaaatgcgcttgctcaggttgcatggaattttgtcaatgatgggctgcgtacttcgctttgcctgcagttcaagcctcatcatattgcagcaggtgctatctttttggctgctaaatttctcaaagtgaagcttccatctgatggtgagaaggtttggtggcaggagtttgatgtgactccaagacagctggaagaagttagcaatcaaatgttggagctgtatgagcaaaactgtgcagcacaggcacaaccgtcccatggaaatgaagctgaagggagctctgctagtgttcctaatcagcgagtctctgtaaaatccgaggaaacacctcttcctcaccagtcgaaacagtcaagttcacagcattcaacaggtgctccaagtcatcatggtgtcgagcactcaaatctagaaaagcaaactgtggaccagaaaatgcttcaaaatgacaatggtgaccatgggagcaacaaaacaagaagcaatcagagtggaagtagagttgattttggtgccaacgatggtttacatcatgacaaacagtccatgacagaaaataagaatcttccatcacatggcaactccagtgaaatcagagatgtcaaccgcaatggcaatgatggtacgaatgtgacatccttgatggtaaataaaattgacaaggataaggtgaaagcacaaatggaaaagcaaaggaaactgaaaggtgatgttgctaggaaggtagaggtaatagatgatgatgatgatcttgagaggcaactagaacatgacattgaattggctgttgaggataataagataaagcaggagaggaagcagagttcccctcatgttatgcatcggggggatcatagaaatgctgatcaagttacaggcaatgggcaccttggcaagcagaatacaccagagactgctcaagatgccccaatggacgacattaaagaacagcgcaattcccatggctcaaagcaccatgacagtcatgatactgctcatgagcgaggtgaaagagactataaaaggcctcggcctgaaggttagttttgatgacattgagagatcatttgtgattttgagcgatgtgctggaaagtgagcacttggcttggaacttaacatattaagatcagcatatgttactcgaacatatgcattttctgcctgagatcgctgccatgtgacatcaaagtgggcatatgctgtggagtgacaggcataaggatgctcatgtttttacccagctgtatacaacctcgcaactgactgcaacgggtgttttgccctcgatttgtactgggggacagtttgggaagaaactcatgatgataaaatctgtgtttcaacaagtattggagtaaatacactggagaaagcctctagttccatttgcgttgagttctttctttctttttttgtttttaggcgaattttcagcgacgttccgtagattagctagggttcaactttgtccactagatgaattgaatatgcttttgcaggctgtctgccccttaactagctcgagaagttggcattggttcataactttgaaatattttagcttgttcaggtggcggtttcttcccaacattgaacctggattctcgaatggaatggcgttcaaatgtcc

SEQ ID NO: 24603 - DNA, 2193 bp, Oryza sativa
  ref <308>: DATABASE ACCESSION NUMBER: AK100045
  ref <309>: DATABASE ENTRY DATE: 2002-08-28
gacccacgttaacactcaccacaggatgtctcgccgccgtctgcagctgctgcttctcgccgccgtcgtgctcgtccacgccgccgccgacggttgccgagtgttccagatcgaggaggccaccgtcgacgacatccagctcggcttcaacaacggcagcctcacctccaggcagctcgtgttcttctacctcgaccgcatcgcccgcctcaacccgctcctccacgccgtcatcgaggtcaaccccgacgcgctcgcgcaggcggcgcgcggcgtcgccgtcgtcgtcgtcgtcgggcagctgctgcggcgggctccacggcgtccccgtgctcctcaaggacagcatcgcgacgcgcgaccggctcaacacgacggccgggtcgctggcgctgctgggctccgtcgtcaggcgggacgccggcgtggtgcggcggctccggcgagccggcgcggtggtgctcggcaaggccaacctcgacgagtgggccaacttccgcaccatccaaggcaccggtggctggagcgctcgcggtggccaaagccgggtaaggctaagctacctcctctcactcgctaacttcgccattggtttctccatcacaaaagtcaatgctgaatatcgatctctttagttcaaaaaattagcttgtatattccatgccaagttcttggagaattcttttaggaaaataaccatcaatgcaattctgcaaattcttttgtagcttgtcgaaacataatccacactaaaatttagtgtgaattctgtaaggtcgtcactgggtttatcacttatcacctttgtatttttcagacaggaaagcatatttttgtgttgcaaaattattcaaaactcaagcaattatatatggcatatactgtacattagtaaatatttggcatgtatatgtagaatccatatgttctatcagctgctccatgcggttcaagcacaggatcagccattgcagctgcagcgaacatggcggccgtgacactagggaccgaaaccgatggatccatactctgcccatcgtcgttgaattcagtggttgggatcaaaccaacggttggattgacaagcagggctggtgttgttcctatctcccctaggcaggacactatcgggccaatttgtcggacagtaacagatgccgtccacgtgctggatgcgattgttggctacgacagccgtgacgcaaaagccacacgggcagcatcaaagtacatcccaccgggtggatataggcagtttttgaagcctgatggattaaaaggcaagagaataggcatcccaaatggatttttcaacttcccaaatgggacagtgcaacagattgtttaccagcaacttctcgacacagtgaggaaacaaggagcggttgtgattgagaacctagacatagcaaacttggctgttatacaagatgtccttaacaatggggaacagattgtgttagcagcagagttcaagtcaagccttaacacttatctgtcagacttatcctactccccagttcgttcacttgcagatataattgctttcaacaacgcacatccgattgaggagaggctaaagaattttgggcagctcatcttcctggtagctgagaatactactggcatcggtgcactcgagggagctgtgatccgtcaactaaacgagctttcagctgacggactggagaagctgatgcaggatgagcagcttgatgcaattatcactcccaatgacctagtttccactgttctcgccattggcggcatgccggcaatcaccgtaccagctggatacggtaagatgggagtccccttcggaatttgctttggtggattgaagggctatgagccgaggctaattgagatggcttatgcatttgagcaagctaccaaggtcagaaaggcccctaagttcttgcacggaacattttagcaacatggcagacatgtttttaactagtaaaaagtaattcattgggctgatcgtttatcgcaactactattgttgagcttgggaatgcaatttaaaacactgttgcagtgaaaacttagtggattgtgaaaaaaatattggagggagaggtatccctccaaacattgtctccggactcaggttgaaaccacacacccattgccactgtactatcaagtgattatgatctttatatggaaagccaaatctttatatgc

SEQ ID NO: 24604 - DNA, 3763 bp, Oryza sativa
  ref <308>: DATABASE ACCESSION NUMBER: AK100046
  ref <309>: DATABASE ENTRY DATE: 2002-08-28
tcgaggttcgtggctcgtgtttgttcgcctccgcgcggctgcgtttcggcggattgggggtatgcgagggctgtgaggttggtggtggtgcttgtccggtcatggagcagaagccgtcgccgccgccgccgccgaggagcgacgaggaggaggatggattgatgggatgcgggatgggcgggacgggggatatcgccggcggtgacctggatctcatggaggggttcttgctggcgacgccggggttcgatttgtcggagttctggcatccgggggcggcgagccccttctccccgctgttcgacatcggcagcagcgtcactaccttgactacccccgcgccggcggccggcgaggacgacagggacgaggcggagatgcccagccgtggcggcggcggcctcgaggtgagccccgcgcaccgcggctggacgttccagacggcgccgcaggaggtggccgtggagccgacggtgaaggagcggctgcgccgcgcgctggagcgcatcgcgtcgcagtcgcagtcgcaggcgcagcggggcgacggggagctgctcgtccaggtctgggtgccgacgcggatcggcgaccggcaggtgctgacgacttgcgggcagccgttctggctggaccgccggaacaagcgcctcgccaactaccggacggtgtcgatgaagtaccagttctccgccgacgagagcgcgcgcgccgacctggggctccccggccgggtcttcgtcggccgcgtccccgagtggacgccggacgtccgctacttctccaccgaggagtacccgcgcgtccagcacgcgcaatacttcgacatccgcggcagcgtcgcgctgccggtcttcgagccgcggagccgagcctgcctcggcgtcgtcgagctcgtcatgaccacgcagaaggtcaactacagtgcggagatcgagaacatctgcaatgctctcaaggaagttgatctcaggagctctgatgtttcaagtgatcctcgttccaaggttgttgatgcttcttaccgagcaattatacctgagatcatggatgttctcagagctgtttgtgatacccacaatctgccactagcccagacatggataccgtgcatctgccaggccaagaggggaagccgccactctgatgaaagctacaaacattgtgtgtccactgttgatgaggcatgttatgtccgtgattgttccgtattaggctttcaccaggcttgctccgagcatcatctgttcagaggtgagggtgttgtcggcagggcatttgggacgaatgagccatgtttctccccagacattaccacctacagcaagacccagtaccctctctcgcatcatgccaaactttttggcttgagggcagcagttgccatccagctgcgaagtgtcaagactggaagcctggactttgtcttggagtttttcttgccaatgaagtgcataaatactgaagagcaaagggccatgctcaattctttatctaataccatacaacaagtatgctatacattaagagttgtgaagccaaaagagctggtaaatgatggaccatttgaaattagtcaaccaaccaggccagaattttatgccaagtctgtgcatgaagacttggatgagctctgtagtggtattaatgttcctggaaggacaacatcattggaagcatctgaggaggtatcatcatggatagcgagcttagtggatgctcagaataagggaggaaagggagaaatagatgttgacttgccattcggattcagcaaacaagatgatgaaggatttagtgttacagctggctggcatacttctccagttatggcacctgacggtagcatgttttcagggtttaagcggcatgaagattatgatgtcaaagaaaatacttgttccagtgatccaagcaattcaaactcggacaaagcagtagaaaaacggcgcactaagacggagaaaacagttagcctgcaagatcttcggaagcattttgctggtagcctgaaagaagctgcaaagaatttaggagtgtgcccgactacactgaagagaatatgcaggcagcatggaattaatcgttggccatcacgaaagatcaagaaagttgggcactccctgaagaaattgcaaatggtcattgattcagtacatggtcctgaaggaacagttcagctcagttcactctatgaaaattttaccaagaccacatggtcagaaagagagttacaaggagatgtccattttccagcatctgagcaaaactttcagctggaaccttcagttcctgatcgtccatgtgagggcagattcacttcacatacttctggctctaattccatctccccatcctgcagccagagctcaaattctagccttggttgttccagtgttccaaagactcagcaacagcatggtagtgctcctcagcttgcagtcaaagaggaaatatctatggatgagaatcagtgctccacactaatcaaatctgctagccatgcagaggcagagctgcaaatgtttgttgaagaaagacctaccatgctatttaggtctcagagtcaagtacttttaagtgaacacaaaccgatagaaaacatgtcaaacgtgcaaaaggctaggtctgattctctcaaaataaaagccatctatggcgaggaaagatgtatattccgtcttcagcctagttggggctttcaaaggctaaaagaagagatcgtaaagcggttcggcatttctcaggatactcacgtggacctcaagtatttggacgatgaatctgagtgggttcttttaacctgtgatgcagacctgctggagtgtattgatgtatacaagtcatcaagtaatcaaacagttagaatattggttaatcctagcattcaaccgttgctcaatgcttccttcggtcaaactggtctgtcttgacagtggtgttgcagcactgaaaacaatcatctcattgctccttcaggtaaagaatgcctgacgctgcctttggttgtaagtcaagatggcgtatgcaggcttcagatttggatacttgggctgaggtgcaaattaatggacagctgcctgttgatgttgcagttgaaccgtgctgtgttcttgaattggaaatgaagtaattgttgatgttccctgtcggtgcttggtattgatttgcatgctgaagttcatgcagtggagtccacgggaatagaaggtggagctgtatgccttttgttcagtttcataaccataggaactttgtgtaggcagactaaactagtgtacataattgtaggtgagtaggtcagaggatgaaaataattggcatttgtcgaaatgaagctttgggatagatttagcagtcagttacagttcaaaagtttgtagctcttttggggtttcatctgactcaatagttctcaagtgttcacttcaaggtttcagcatttgaaagcctgcctcaggttacccgttacagcgtgtctgttcagccttcatgggagcatttttgcaattctgaaatgtcttcccaccagtaagcgaaagggttcacaagaaagcagttgcagtgctggcaatgaaacaagatcatcatcaaagtcgagatgaattctgttgtttttagatcagtgttagcattattgttaatacaatgttatttatatgtttgagtagtttcgatgttgctcgtgtaaacctgctcttttacgggtgaagatttttttttttgtatatcatgtacagtacggtagaaatgtaagaattgtgct

SEQ ID NO: 24605 - DNA, 1796 bp, Oryza sativa
  ref <308>: DATABASE ACCESSION NUMBER: AK100047
  ref <309>: DATABASE ENTRY DATE: 2002-08-28
gcctcttccttttcctcttttcccatcccatcgattcccctcctcccgctccggctccggcggccgcagatccatccggtgtgtggggggagaacctctccctcctccctccctcgccgccggccgccgcccgcagattggattggattgggttggattggattggatgaggtcgtcggagtcgtcgcggttcgtgcaggagctggtgctctacgccgccagcgccgccctcagctgcctcgtcctcttcgccggcctccgccagctcgaccccaaccgcgccgcctcccagaaggccctccagcacaagaaggagatcgccaagcgcctcggccgccccctcgtctccaccaccccctacgaggatgtgattgcttgcgatgtcatcaaccccgaccacatcgacgtcgagttcgattccatcggcggcctcgaccacgtcaagcaggcgctctacgagctcgtcatcctccccctccgccgccccgagctcttcaccttcggcaagctcctcagcccgcagaagggcgtcctcctctacggcccccccggcaccggcaagaccatgctcgccaaggccatcgccaaggagtcaggcgccgtcttcatcaatgtcaggatttccaacctcatgagcaagtggttcggcgacgcccagaagctcgtgtctgctgtatttagtctcgcacacaagctgcagccggctattatctttatcgacgaggtcgatagtttcttgggccagcgacggacaacggaccacgaagctatgactaatatgaagactgagttcatgtccctctgggatggcttcaccactgatcaaaatgcccgtgttatggtccttgctgctactaacagaccctctgagctagatgaggctatcctcaggcgctttactcagatatttgaaattgggattcctgttcagagtgaaagaagcaagatacttagggttgtattgaagggagaaaatgtcgagcctaacattaattacgattacatcgccggtctatgcgagggatttactggatcagacattctagaactgtgcaagcaagcagcattctaccctatcagggagctgttgaacaatgagaaagatgggcgaaaagcagataaaccaagacccttgaggcaatcggatctggagaaagctttatcaacgtctagaaaggggaaaagggccgcgaatggaacatctacggggttgcagtcaccggtgtggattcggccctctgattcagaagacgatcaggtacagagcgcaatttttgagatatctaagctgatgtctcgaatagttcagaacagtcagtcggaaccgcaagagccatcttcaccttaatctaatccttttgctagatctcatgaaaatccaaaggagtaagcgcaggcattacctcgatatcgttaggttttctaatgcagcttgcaagattcagggtttgtatggattcatttagcgtcgcgaggctgcgctggtttttgaagttaatggcagctggcaatgctttgcactgatgttataagttaaattcagaattatatggcccgagtcaggattctatggttctgtgaaatttgttatcatcaccttgtattttaatttaattaaactactttagggtagactctatacataacgaagaaaagaaaggcccgcttgcatggtttacaaacaatcttgtttttttgtcggagcactctgctgtgacttgaaatagatacacgatgagatgaaactaacgcttgcttgtcacccaagagctgaattaatatatacttttccctcc

SEQ ID NO: 24606 - DNA, 2441 bp, Oryza sativa
  ref <308>: DATABASE ACCESSION NUMBER: AK100048
  ref <309>: DATABASE ENTRY DATE: 2002-08-28
ttgggagagagagagagtgagagcatacagggcgagaaaatttcttgctctcatcgtcccacgcgatgcggcgattgtggaaggcgacacaacatcgattcgccgtggtgggtttttgacgctgatttgtgggagtcatcgacgattcgttggcaatatcgttcttcctttctccgggaagttgatttgaattggtgtcctaagagggaagccatgaatgcgaaaaagataagtactgcacactaactttttgatatgttaagagttttgaattttgttgatatcgatacgttacactgactagttcgttgaaattatctaaaaaaaatgtaaggtaaaattatcatgacattacaacaattctgaattttttaggtctagttctatttctaaaatgactttttttgatattcaggtttgcatttatctgcctgatgtgaggccacttttttttatagagaatacttcctgatctgtatgtttgaaactttatcaatttacttccatgttacttctgaaatttaactctagatatagtattgtgttaaataatgaactgagttagtagtttgtgttagttacaggaatttactattgaaatttcaccttttttgtgtaattttttaactaaataactgtaatatcttacctgatcagtttctgtttttgaattgaaactgtgtaacttaaatttgttctatcaatctgtgaaacatgtatgatggattgagatcacttcacatggtagatttcagatgattgatttgttttctatacagaattttacacagtcagattaataaatgcagaagtaaacatgatcttttatctccttttactttatactgatgtctttaacattgtctatttggaaattgtccacaataactagagttcaggtatatattagggcctattgatgtatttaggtttaagtttatttctgaagtgactttttctgatatttagattttgtttttatctgccttatttgagacaatgaactctagatgtagtactgtgttaaatgatgaactgagttagtaatttgtgtcagttacaggaatgtactattgaaattacaaaatttttttggtgtaattctttaactaaaaaaactgtaatatatttgcaaacatgtaaaacagttcatagtttgctataatgaatgtttttttgcttttttgtaagtatgttactcttttaatatttttgtttgtaactttgaataattgactttgctgtccttggctacttttgtgtgttcttcttgatcttgtccagtttgtttgtttgtatgtaaattagaggacttgtttcttgaaaatgaaaatgaaaatggtggctaatatcttcactaggagaaatatgatgtgcattttttattcttttttatgtcaccaagttaaatgcatggtttgaaattagtatgcatgtgtactttatcattttgcactataaatactatatctattactattactatagtgcattaattcatcaattacagtaatttattactgaaattacactctttcttttgttgtaattccttaactaaataactgtaatatgttttgaaacatgtaaaataatacatagttaactgtaatggatgcatttttttaatttggaatgaaggtgttgaaccagagaatgaaattaatgatgatgttaatgaagctgttcaagataatgataattttacatcatctccaatggtataattttttaactcacttttttattaattacatcatctccaatggtataattacaatgtaattttgtacaatgtgtgtatttgaatagttttatgcttcagttgtataatagctgaaaaccttgaaattgttagggtgtacagtgtgtgcatttgaacagttttatgtaatctgcaaatggttaaatagggttttctaattgaaagattgattatggtgacaatttgcattgctacctaatttgtgttgatgacaagaatgtgcaattcttgctagaccaggtagaaatataattgatgttctgaatttttatgattgatgacagttactaattctattgaagcattcagggtgtttttgaggctataattttgcaaatgctatatgctatgtgcaatttagttaggtatttttaatctttcagtgacaatcttgcatgagtaaagaacaaaagttattgacgatttcaaaatgagtcatagaggctgatttcctgatgctcgtagatatttttcatattagtttcaaattgattttagattgttacatgactaagacaggctgacttttactaagtttcagattgttctctgtatttcaatttacagtacaaacatattgcagttacagtttaatagtactgtaattctattagaaatttactgtaatttttgaatttgtcctgttaattcaaagaattaagcattttactttttc

SEQ ID NO: 24607 - DNA, 1876 bp, Oryza sativa
  ref <308>: DATABASE ACCESSION NUMBER: AK100049
  ref <309>: DATABASE ENTRY DATE: 2002-08-28
gctctctctcgagctcatctccattttcaaatctctctttgcttgctcgaggtgagccatggcggagctgccgctggcggcggggctgctcgacctgcgcccctgcaagctcgcccctccccctcccccgcccctccccgtctccccctcccctcgccaccaccggcgaccccactccaccgccaccgcctgccgcgccgcccccgacctccactcctccaccgagctcgccgacgggagcatcgtcttccgcttcgcgcgcccccgggacgacgacgacgaggagcagcagcagcggcgggcggacgccgtggctcccgaggccgcggccgtcgtcgaatcagggctcgacggtgacgccgccgcagctgctgaacctgaggcccgggatggcggtggagaaggggaggtgacggcgacggcgacgggcttggacgcggaggaggtggtggcgagtggaggagcggaggcgacggcgacctccggtttggaggatgcgggggaggaggcctcggatggctccaccgcgcgggattccgacaccgacgtcgacaccgagtccagcgcctccaccgccgccgacgacgaccagcccgccgagttcgccgtcccgccgccaccggcggaagaagtttgtaacaaggtagattgggaaaaggacacttcagaggtgaagaatactgataggatggttccagtagcctcatcaacgcttgtgttggcatcaggtgctgcgatcttgcctcatccttctaaggcagcaacaggtggagaagatgcatattttattgcgtgtgatggctggtttggtgtggctgatggagttggccagtggtcatttgaaggtatcaatgcagggctttatgcaagggagctaatggatggttgtaaaaagttcattatggagaatcaaggcgctgcagatattaaacccgaacaagttctttccaaggctgcagatgaagcgcactctcctggttcttccactgttttggttgctcactttgatggccagttcctcaatgcatcgaatattggagactctggatttctggtgataagaaatggagaggtgtaccaaaaatcaaaaccaatggtttatggtttcaactttccactgcaaattgagaagggcgataatcccctgaaacttgtacagaattatacaattgagctggaggatggtgatgtcattgtaacagcaagtgatggtctttttgacaatgtgtatgagcaagaagtagccaccatggtctcgaaatctttacaagccgatctcaaaccaacggagattgctgaacacctggctgccaaggcgcaggaagttggtagatctgcagccggaagtaccccattctcagatgccgctcttgcagtggggtacctgggtttcagcgggggcaaactcgatgacatagccgtcgtcgtgtccattgtcaggaaatctgaaatctaaattgtaaaagacatccatgatccatgatgtccccctctcaagtttggttgaagctgcactcctagcctcctagcaaggtgcaccacactcatcaatatattgtacaaccagaagtgcagctgctgaaaaagactatctgtgagcgaggagcaagaggccattaacctgtgtaagtatctttgagccgaattgctcgcggtttttgggctaatttagcattggaaagtaatattgtgatccttggttcgagttgtaaaccggtggaagaaatctgccgtgtgtgtgagagacaaccgtgcataggaaaggaacatacattgattatgtgacatgaactggaaattgccgcaagacacctcctggcactggcaactgtaaccatcacacctcatttcacattaacctgatgtttacccatgg

SEQ ID NO: 24608 - DNA, 2490 bp, Oryza sativa
  ref <308>: DATABASE ACCESSION NUMBER: AK100050
  ref <309>: DATABASE ENTRY DATE: 2002-08-28
gcgcgccctcctcaacgccgacctcgtcggcttccacaccttcgactacgcgcgccacttcctctccgcctgctcgcggctgctcggcctggattaccagtccaagcgcggctacatcggcatcgagtactatggtcgcaccgtcacggtcaagattctgcccgtcgggatcgacatgggccagctgaggtcggtggtgtcggcgccggagacgggggacctggtgcggcggctcaccgagtcgtacaaggggcggcgcctgatggtcggcgtcgacgacgtcgacctgttcaagggaatcgggctcaagttcctggcgatggagcagctgctggtggagcacccggagctgcgcggccgcgcggtgctcgtgcagatcgcgaacccggcgcgcagcgaggggcgcgacatccaggaggttcagggagaagccagggcgatcagcgcccgcgtcaatgcgcggttcggcacgccggggtacacccctatcgtgctgatcgaccgcggtgtgtcggtgcacgagaaggcggcgtactacgcggcggccgagtgctgcgtggtgagcgccgtgcgggacggcctcaaccggataccctacatctacacggtgtgccggcaggagagcactggcctggatgatgcggccaagcgcagcgtcattgtgctgtcggagttcgtcgggtgctccccgtcgctcagcggcgcaatccgggtcaacccatggagtgtggagtctatggcagaggccatgaatgcagccctgaggatgcctgagccagagcagcggctgcgacatgagaagcactacaagtatgtgagcacccatgatgttgcctactgggcgaaatctttcgaccaggacctgcagcgagcttgcaaggatcatttctcgcggcggcattggggtattgggtttgggatgagtttcaaggtggtggcacttggcccgaatttcaggcggctgtctgtcgatcacattgtgccgtcataccggaagtctgataatcgcttaattctcttggactatgatggcacagtgatgccagagggttcaattgataaggcaccgagcaatgaggtcatctctgtattgaatcgtctgtgcgaggaccccaagaacagagtgttcatcgtgagcggtagagggaaggatgaacttggcagatggtttgcaccttgtgagaagctggggattgctgcagagcatggttacttcacaaggtggagcagggactcagcttgggagacctgcgggttggccgtggactttgattggaagaagactgcagaaccagtgatgaggctttacaaggaggcaacagatggttcaaccatcgaagacaaggaaagcgcgttagtttggcaccacgatgaggcagatccagattttggttcatgccaggcaaaggaactgcttgaccacctcgaaaacgttcttgcaaatgaaccagtcgttgttaagaggggccagcatatcgtcgaagtaaatccacaggtaagcgcctgccatcttccttccttcctctagttgtttgacagtatatgtttgattagttctggttgtagacttgtatgcacaacatgttgatcaactagatgtcgctgtcaaactaaaggcaacggataaggattgctctaatccaatccagtcttcatccaccacatacttggggacaatctatatctgctcgacaaataggatatgaatcagcatggaccatgtcccgtgtggactggaaaattcgcgaaaagagtccccggtctttttaatatttatccctgttaggaaccaactcaatctcaatctcgccacccaaaccaccaacctcgaaatttctgtagtgataacatactaaaatcatctctcatgacaaattatctttcatgtcatgcagggcatcagcaaaggtgtggttgtggacaacctcttgtcatccatggtgagccgagggaaggcgcccgatttcgtgctgtgcattggggacgaccggtcggacgaggacatgttcgagagcatcgtttgcccgtcgaacagcagcgtcaagctcccggcgagcagcgaggtgttcgcctgcacggtcggcaagaagccgagcatggccaagtactacctcgacgacacggtcgacgtgatcaagatgctgcagggtctcgccaatgcgccatcgcagcggccaaggcaagtgcagctgcgggtctcgttcgaaggctcactgtgacggagacagggattattctgcacagtataaaaaccaaggaggaaattccaataacaaatggaaaagatgatgatgattcagttcgtgtggtttaggggttagctgcagaagttacaggataaacaggtttttttttgttttttttttcttctttttctttcaacattttcagccttcttccatgcttgtatatgccccgtatgataaaaatatgcgagaaggtttcagccaccttgtatatgtagttgacgatgacgatgaaatcagaacc

SEQ ID NO: 24609 - DNA, 2509 bp, Oryza sativa
  ref <308>: DATABASE ACCESSION NUMBER: AK100051
  ref <309>: DATABASE ENTRY DATE: 2002-08-28
gatccgcgagaagcacccgaaccgccgccgccgcccctcctcctctcttcccccttccgccctctcagccctcgccgacgacgaggaggagaaggcggcggccgcacgcacgccgcgcgagaggggcaagcaaagctcggtggtggtggtggggggggggggcggagccgcgtcgcgcccccggcgcctcggcgccatccgccccgccgcgggcgggctcaggcggaggaggaggaggaggaggcgaaaccctagcgcggggggagacgagtgctgctcaggccactttcaatagataaagaagtaatatcttcatcagtcctttctcaatatagttgagagcgagtttacatggctatgatgccaagtgattcatcacatcatggaattgtagaaaatagcccatacagaactacccagggcaggaatgaggagactggtgaacttggtgcttcatggtatttcagtagaaaggaaatagaagagaattctccatccaggagggatggcattgatttgaagaaagagtcttacctccgaaaatcatattgtacttttctacaagatttgggcatgaggcttaaagtgccacaagtcactattgctacagctattgtgttctgtcaccgtttttaccttcgtcagtcccatgcaaaaaatgatagacgaacaattgccacagtttgcatgttcttggctggaaaagttgaagagacgcctaggcctttgaaagatgttattctggtttcttatgagattattcataaaaaggatcctgctgctggtcagagaatcaagcagaaggaagtatatgatcaacaaaaagaacttattttacttgcggagcgagttgtacttgcaactcttgggtttgatttgaatgtgcatcatccatacaagcctttggttgaagcaataagaaaatttaaagttgctcaaaatgcgcttgctcaggttgcatggaattttgtcaatgatgggctgcgtacttcgctttgcctgcagttcaagcctcatcatattgcagcaggtgctatctttttggctgctaaatttctcaaagtgaagcttccatctgatggtgagaaggtttggtggcaggagtttgatgtgactccaagacagctggaagaagttagcaatcaaatgttggagctgtatgagcaaaactgtgcagcacaggcacaaccgtcccatggaaatgaagctgaagggagctctgctagtgttcctaatcagcgagtctctgtaaaatccgaggaaacacctcttcctcaccagtcgaaacagtcaagttcacagcattcaacaggtgctccaagtcatcatggtgtcgagcactcaaatctagaaaagcaaactgtggaccagaaaatgcttcaaaatgacaatggtgaccatgggagcaacaaaacaagaagcaatcagagtggaagtagagttgattttggtgccaacgatggtttacatcatgacaaacagtccatgacagaaaataagaatcttccatcacatggcaactccagtgaaatcagagatgtcaaccgcaatggcaatgatggtacgaatgtgacatccttgatggtaaataaaattgacaaggataaggtgaaagcacaaatggaaaagcaaaggaaactgaaaggtgatgttgctaggaaggtagaggtaatagatgatgatgatgatcttgagaggcaactagaacatgacattgaattggctgttgaggataataagataaagcaggagaggaagcagagttcccctcatgttatgcatcggggggatcatagaaatgctgatcaagttacaggcaatgggcaccttggcaagcagaatacaccagagactgctcaagatgccccaatggacgacattaaagaacagcgcaattcccatggctcaaagcaccatgacagtcatgatactgctcatgagcgaggtgaaagagactataaaaggcctcggcctgaaggttagttttgatgacattgagagatcatttgtgattttgagcgatgtgctggaaagtgagcacttggcttggaacttaacatattaagatcagcatatgttactcgaacatatgcattttctgcctgagatcgctgccatgtgacatcaaagtgggcatatgctgtggagtgacaggcataaggatgctcatgtttttacccagctgtatacaacctcgcaactgactgcaacgggtgttttgccctcgatttgtactgggggacagtttgggaagaaactcatgatgataaaatctgtgtttcaacaagtattggagtaaatacactggagaaagcctctagttccatttgcgttgagttctttctttctttttttgtttttaggcgaattttcagcgacgttccgtagattagctagggttcaactttgtccactagatgaattgaatatgcttttgcaggctgtctgccccttaactagctcgagaagttggcattggttcataactttgaaatattttagcttgtcc

SEQ ID NO: 24610 - DNA, 1854 bp, Oryza sativa
  ref <308>: DATABASE ACCESSION NUMBER: AK100052
  ref <309>: DATABASE ENTRY DATE: 2002-08-28
gagtaacaaaccaaccaaccctcctcgccgcggccgccgccaccgcgaagtcggcgacccgtattacgctgccggcagcggaagccctccctaacccctcccctctcctcctgccccgtcgaattgggcgcggggcctcgagatgatggcgtcccggcggggcagcggcggcaacaccagcagctgctgcgcgctctgcgagggatccaacctcccgtcctgctgctcggcctgcgtgaactccaagctggcggaataccacgcgaagctgcggatgatgaagaatctccgcgactccctcaacgcccgtatagccacgcgcctcgatgccaagaggaaaggggacgagcagagaaactggagggtgagcaaggcacacgatatcaaggagctgagggatcatctcgctgaactgaaaaggcgaaatgcgatagagaagaagaaagctgagcaggcatcacgtgatctcagagagagaacggcattgttgaatttggcttttgtcacgctgaaaaagaagcgaaatgattcatcggtgatgcacaccaatgccatgaaagcagcacagatgggtcttatggcaactacctcagagcatttaaaaatgcagtcaaaagctatgaagcaactttgcagattgttcccattgcgacgagttattaaggatggcgaacagaatgatggctacaatggtccatatgatgtaatatgcaacgctcgtctacctcgtggtctcgacccacattcagttccatccgaagaattatcagcttctttggggtacatgttacagctcctcagtattgtagttcctatcctagccgcacctgtcctccacatatctggctttggggcttcgtgttcacgtgtatggcagcgtagttcctactggagcacacgacagtcccaaagcaaagtctacccactttttatacctaggaaaaataattgctctgttggtgaggataattcatggacggaaagtggttcgggtaactttggtgttcaatctgttgattcagacaacaaatcggttcttgactccaagagaagcaatagctttaacttctctattgcatcttctcactccatggagaggcaccaagatttgcaaagaggaatatcattactaaagacaagtgttactgccattactacctattactataactcattgggtatggatgtgccatccaatctttctacttttgaagcatttgcaaagttgctccatatgctatcatcattaaaggtccttcgcacaactcttcaatcgaacgttgcttcaaggtcagagaagcaaggacagcaactaaatagatctatatggaaagcgagctccgctatctcatctaacagcagcctgatggacagtgtgaacacagctataatgttctctggacaacctcctgctgaactccaacacgagcttcctgtatagcggtaaaccgacgaagcatggtggagttccagacaacattttagaaggctgggatatggtagagcgcgacgtcctaccaccaccaccgtcgcgggttgaagacgttgcgcaatgggaaagagcccacaccttcaatcgcactggctccaaaaagaagtgatggttaggcgctcatgtattctctgaagccaggctgttaatttaggacactgcaagcctctgcataggctttcagctgatcataaggtttttggttgatgtacagaactgaccataacctgtgacaatgaatatgcagagaagagggtgtaattgatcagctggcatctgtaaagcaccttcaatttgtaaatatacatgtaattgtacagtacttcctatccaataaaaaaatatagttgaaatgtgcctgc

SEQ ID NO: 24611 - DNA, 1546 bp, Oryza sativa
  ref <308>: DATABASE ACCESSION NUMBER: AK100053
  ref <309>: DATABASE ENTRY DATE: 2002-08-28
gagcgagagcgagttagcgagcagagatccacggcccgcagcggcggcggcggcggcggcggccgaagcccatctggttacgcgagggagatggcagcggcggcgggaggagtcgccggcgagccgtcggggacgaggacgaagcagcttaaggtcgccgtgatccaccccgatctcgggataggtggtgctgagagattgatagtcgatgcggcttgtcagcttgcggtccatggtcatgatgttcatgttttcacatcacatcatgacaaaaaccgatgctttgaagagactgtttctggtccatttgaagttaaagtatatggagatttcttgcctcgccatattttttaccgcttccacgctatctgtgcatatcttcgctgcatttttgttgcaatgtgtgtgctactttggtggccctcatttgacatcatattagtagaccaggtttcggttgtgattccactgcttaaactgaaggcaaaatccaagatagtattttattgtcactttcctgatatgttgcttgctcaacatactaccatgcttcggaggttgtatcgcaagccaattgacatgattgaagaaacaactactggtatggcagatttgattctagtaaacagcaagttcactgcaacaacatttgccaggaccttttgcagccttcatgctagaggagtcgagcctgctgttctatatccagctgtctctgttgaacagtttcaggaacctcatgcttataagttgaatttcctctcaattaaccggtttgagagaaaaaagaatcttggtcttgccatttcagcattttctctgcttcgctctgttgcttctatgctacctggtgatgctcgacaggaagtaaccttaacagtagcaggtggatatgataagcgtctcagagaaaatgttgaataccttgaggagctcaaaagattggcagcgagtgaaggggtttctgaacatgtcaaatttgtgacatcttgttcaacttctgaaaggaacgaacttctctccaactgcctttgtgtgttatacactccaaaggatgaacatttcggtattgttcctctggaagccatggccgcatataaacctgtaattgcatgcaacagtggtggtccagtggaaacagtcataaatgacgagacagggtttctctgtgagccctctgcccctgaattttcaaaagccatgctgaagctcgtgaacgatcacgatctagcagttaagatgggtaaacaagcaaggggccatgttgtgcagaagttctcaaccaagacatttggtgaccttctgaacagctatgtccttaatgtgtaccatcagaggattgagtgatccccaattcggtgtcggcaatgccgtggaacacttggaatagaccatcattttcatgttttttccttttcttttgttacttctgacttcgatgtacacgcatgcgatagagtattatatacggatgaatagtgaaaacgactttgtaatgttaccatttgtggcaatgacaggaaaaaatatatatttgggccgtctc

SEQ ID NO: 24612 - DNA, 2141 bp, Oryza sativa
  ref <308>: DATABASE ACCESSION NUMBER: AK100054
  ref <309>: DATABASE ENTRY DATE: 2002-08-28
gacgcgatgcggatgcgcctcctcgtcgtcgtcgtcactccctcctccaccccgccatgccttccccgacctgctacttgctcctcaaccccaccgcctccaggtcccaccaccgtccccgcctccccctccccgccgccgcgccgccgcgcaggcgggtccatgtctcctgcgacgcgcggaggacgggcggcggtggcggtggcggtggggtgaagcgcgaggccatacctgctggaaccggcaaggccaagaagcaggtcgtgttcttcgacgccgcgccaccggtctcgcagcggggcggcggcggcggcggggagggggagggggagggggagggggaggggaaggtggcgaggaggaaggagaacgccgcgttggggttggttaggaggttgacgaagaggacgctgtcgctgctctccaacctcccgctcgccatctccgagatgttcgccattgccgcgctcatggccttaggcacggtgattgatcaaggggaggcgccgagctactacttcgagaagttccccgaggacaacccggtgttcgggttcatcacgtggaggtggatcctcactcccgggttcgatcacatgttctcctcgccggtgttcctcggcctcctcgcgctgctcgcggcgtcgctcatggcctgcacttacaccactcaaatacccattgtcaaggttgccagaagatggtcgttcatgcgttcagcaggaagcatccggaagcaagaatttgcggagtcacttccccgcgcatccatccaggatttaggagttatattgatgggttatggatatgaggtattcactaagggtccatctctgtatgctttcaaaggactggctggtcggtttgcgcctatcggtgtgcacatagctatgattttcatcatggcaggtgccacgcttagcgcaacagggagctttaaaggatcggtggatgtaccccaagggttgaactttgtaatcggagatgtgatgaaacctaaaggagttctctcttttgtgcctgatgtttttaatactgaagtccatgtcaatcggttctacatggagtactatgatagtggagaggtttcacaattctatagcgatctttcacttttcgaccttgatggcaaagaggtcatgaggaagactatcaaagtgaacgaccccttgaggtatggtggggtcacaatctaccaaaccgattggggattttcagcattgcaagtaaagaaaaatggtgaaggtcctttcaatttggccatggcccccttgaaattgaatggtgataagaagttatttggaacattgttgccacttgaaaactccggttcttccaatgtcaaaggaatatcgatgcttgctcgagatctgcagtctattgtgttgtatgatcaagagggtaagtttgtgggggttcgtcggccaagctcaaaactaccgattgaaatagatggtaacgaaatagttattgaagatgccatcggtagcaccggtctcgatcttaagactgatccaggaattcctattgtgtatgctggatttggtgcactcatgttaacgacctgcattagttatctttcacattctcagatatgggcattgcaagacggaagtacagtagtcatcggaggaaagacaaatcgagccaagcttgaattttcagaagagatgaacagattacttgataaggtgccagaattgattagcgtcaatgagaaaaaaatcgatagtaaacaaagtgctacttaaggaatttttattttgagattgggctgttcgaaaaaatttgcaaatgttcacttgtggttgaggctggatttcacaaatcatcttcgaggacataaaattataccgtcttttcggtggaagataggctatgattcaactgatcccactctgtatacaacccaaaacggcacacagcaatattttgtttatcagacggtcatgatacaatataccgagaagaaactgaactgacaatgtaactacataacaaatttacaacagaacaatgtgccaaattactagatgtaccctccttgagctggttttgtaactgtttttgggagcctatttgtagaaaatcatacaaacttatatattacaatagatgcttgattggttggttggtttttg

SEQ ID NO: 24613 - DNA, 2782 bp, Oryza sativa
  ref <308>: DATABASE ACCESSION NUMBER: AK100055
  ref <309>: DATABASE ENTRY DATE: 2002-08-28
ggctgctaagctctcaccacagccaccagtccacggcctccccccgcctgcctcgccgccgcagccgcctcccgcccgccgcagccgacgccacgcgcgcgatctccccccctcccccccccccaccttccaccgttccacgcctcgccgccgacccgttcggcgatgcagctcctcaccgccgcctccgcctccgcctcctccgccgcggcgtcgccgccctccgcgcacctcctccgcctctcgcggccccctcccttcccccacctccgccgccgctgcgctccccacctcccttccaaacccctcaacctagccgctaggtcccctctcctcctcgcgcgtcgctccttgcccttcgccccccgcgcccacggcgatcaccaccacggccaccaccaccaccaccatggccacgggcacagtcatcatcatgggccggaggtgcacgggagtggcgggggcgcggcggtcatgcgggtggcgaaggcgatcggttgggcggacgtcgccgacgcgctgcgggagcacctgcaactctgctgcatctccctcggcctcctcctgattgccgccgcctgcccgcacatcccggtgctcaactccgtcaggcgtctgcaggatgcgctaatcgccgtagccttcccacttgtcggggtttctgcagcacttgatgctcttgtaaatattgcagacggaaaaataaatatccatgtcctcatggccctggcagcatttgcgtctatattcatgggaaactcattggagggcggtctgcttcttgcaatgtttaacttagctcatattgctgaagaacactttacaagcaagtcaatgatagatgtgagggaactgaaagaaaatcatccagaatttgcactattattagaaacatgtggagaccagtcagcacagtttgcaaatttatgttacaccaaggttcctgtgcatgacctggaagtgggttctcatattttggttagagcgggcgaggctgtgcctgttgatggagaagtttaccaaggttcatcgacagttactattgaacaccttactggtgaaacaaaacctctggaaaggacagttggggatgctatacctggtggtgccaggaacttggaaggaatgatgattgtgaaggtcaccaagtcgtgggaggattcaacactcaacagaatcgtccagttgacagaagaaggccagctaaacaagcccaaattgcaaagatggctagatgagtttggagagcactatagcagagttgttgtggtcctgtctttagttgtcgcacttctgggaccattactctttaagtggcccttttttggcaactcagtttgtaggggctcaatttaccgtgggctaggacttatggttgctgcatctccatgtgcattggctgtagctccattagcatatgcaactgcgatcagttctcttgcaagcaagggaattttgttgaaaggcggacatgtgctggatgctctttctgcttgtcagtctattgcttttgacaagacaggaacattaacaacagggaagctcatgtgcaaagctatcgaacccattcatgggcattcagatgtgacaaatgattttagtgatcaggcttgttgtactcctaactgtgaaagtgaagctctagctgttgctgcagctatggagaagggaacaactcatcctattggaagggcagttttagatcattctgttgggaaggacctcccactggttgctgtagaaagctttgagtgcttacctggtagaggagttgttgctactttgagcggtgtaaaggctggaaacaatgaagatgaactttctaaggcatcaattggttctgtggaatacatttcttcgctatacagatccagtggtgaatctgagcagataaaagaggctgtaaaagcttctgcatttgggcctgaatttgtccaggctgctctaacagtggataaaaaggtcacccttttttcactttgaggatgaaccccgttctggtgtatgtgaagttatatctaccttaagagacaaggctaaacttcgcatcatgatgcttacgggagatcatgaatcaagtgctctaagagttgctaaagctgtttgtatcgacgaagttcactgctgtttaaagccagaggacaagttgaataaagtaaaagcagtttcaagggagggaggtggaggtctaataatggttggtgatggcataaatgatgcaccagctcttgcagctgcaacggttggtatagttctagcccagcgtgccagtgcaacagcggtggctgttgcagatgttcttttgttgcaggataatatatgtggggtgccattttgtatagctaaagctcgtcaaacaacttctttggtcaagcaaagtgtagctcttgcattgtcttgtattgtttttgcggcacttccttctgttttgggatttcttcctctttggttgacggtgctgcttcacgagggaggaactcttctcgtttgcttgaactcaatacgagcactcaacagtccgacatggtcttgggtagatgatattcggcaactcattaatagcctaagaaagtacatctcgtcaaagttacagagtacttcgtcaaactatgtagttgatgctgttccgttgtagatattatgtacagcaacagttttctgtcagctttgtatgtatggtactgttggaattttgacgaggagttctaagttgtaaccaaatttttgtaggatgtacatgtactcgtatcactatcgtgtaaagaattttttttcaagttct

SEQ ID NO: 24614 - DNA, 2722 bp, Oryza sativa
  ref <308>: DATABASE ACCESSION NUMBER: AK100056
  ref <309>: DATABASE ENTRY DATE: 2002-08-28
aagccgtggtggaggcaaaggcgccgcgggcttggcttggctggcaccctctccttctcgtcttcggcttcgtcttcccccgtcaaacccacccacgccggccgccgacgccgccgccgttgcggcgggtgcttcccccgctcgcgtcggtgccggggggctgaggggaagagggggagggggagggaaggcacgcggctgacctcgtgggggaggggagggggggaacggggcgacaccacccacccaccgccaccatgtgctcgttgcccgcctggtaagattggaccagctgtgatttggggagcttaaagttttgatcagagacatggaaaaagtgatcttctgggcacatctccttaaatgcaagctttttctttcaaaagaaactcttgattggtgtgttttagctcgtgggaacacccaccacttctctctggtgaactacacatagtggttttatgctcctttatgctcaagaacatttggctgattcaatctttttcctgaagccatatttcaagtctgccaaacatctacatcacgtcatctctaaagaagcttcctttaagttgtagatgctgatcatataagctggggttaatacctttgctcatttgtttgtcatctgttgctccctagttaattaccactagtgttgcattgaggtcagggttcatccttgctatagtatgcaactatatactatggttgctgcttgatcttctgagtgaaccaagatccaagaaaacataaggtgctggggctactgttcaattgactggttgcatatatttgttcgtgctaatcgatagactagtcaattggaagtggtggcaaacacctgtctttgtgacttggctgtccaacaggaaaaggctagcacaaggctgacattgaccggcataatggacagattcaaaatgattaaggaagttggtgacgggactttcgggagtgtatggcgtgctataaataaacaaaatggtgaagttgtggcagttaagaaaatgaagaggaaatattattcttttgaggaatgcatgagtctacgtgaagtaaagtctttgcggcgcatgaatcaccctaacatcgtgaagctcaaggaggttataagggaaaatgacatattatacttcataatggaatacatggagtgcaatctctaccaacttatgaaggatagagtcaagcctttctcagaggcagaagtccggaattggtgctttcagatttttcaggctcttgcatacatgcaccagaggggttactttcatcgtgacctgaaacctgagaatctgttggttagcaaagatgtcataaagctggcggactttggtcttgcaagggaagttacatccgtgccaccatacacagaatatgtgtcaactcgctggtaccgagcacctgaagtattgctccagtcatctatctatgattctgcagttgatatgtgggctatgggtgccataatggccgagctgttgacacttcatcctctttttcctggcacaagtgaggctgatgagattctgaagatttgcaatgttatcggtagcccagatgaacaatcatggccacaaggattgtctcttgcagagaccatgaagtttcagttccctcaggtcagtggcaatcaactggcagaggtaatgacatcagtcagtagtgaggcagtcgacctgatttcatcactgtgctcatgggacccttgcaagagaccaaaggctgcagaagttctccagcatactttctttcagggctgtacatttgttccacctactgtccggtcaaaagctggagtgctccctaaaacgcctccatgtgttggagtaaaaggagtttcggagcacggcatgcctcgaagatactctacaggaactctatcaacaaccaaacctcatagtaatgcatctctgaaatcaagtggcttatctaagaccggtgtacaaagaaaacttcaaatggatcgtcaggcgccacagaagattaaaaaacctactgagagtaataataaactaaccactaatcgagtacctgcaaggaatagcccaggtcaccctgtattaaggcattcacgcagtttacctgaaactggccgggcaacaatgcacaaggtttcaacccttaccgagagattaactcatatgtctgttacctctcgaacgcgtactactcccaagcctgctgccccgttactgaaggctgggctcggcaagtctgacttactgggaaaaacagacgaaatacctcctgcaaagaggttgacaagaaaattagtaagctaacgtagcagcatccatacagtggaagctggttagctggtgcagagaggtgttataagctacagagcaaaatcccggtctgctgaaaatgatggcactgccggagtgtttgccaaatttgctgcatccaagtgccatagtagaataagtcgagcctgccgatccacgtggatctgcttttgccccaagtttgttccatgtttgaatagaacatgagtgtgctatatcgatttgaattgttgtcgaccagtgttcactcgcatatgcggtctgacaaacgatagacccgcgagcaggaggatgtttggcttttgcttgtacagtttatgagcttttgggtggcggtcaagtctttgtcgggtccttggcaaatgatacaatgcatagtctggttttgacttcgtctgtggctctattcaggtctttgtttgaagatg

SEQ ID NO: 24615 - DNA, 2917 bp, Oryza sativa
  ref <308>: DATABASE ACCESSION NUMBER: AK100057
  ref <309>: DATABASE ENTRY DATE: 2002-08-28
ggtcctagtcatcggacgccgcccacctacccgactacccgaggcagcctctctctcctccctcgcccaccaccacacgacacgagacgagaagactgattcattcgctcgcgtacacgcctaggcgctccgagaattcgtgagggaatcccgcatcgccggagccgatcggcggcgccgcgggcgggtggggggggggggttagggttagggttttgggggtggcccaccggggatggacgcccccggcggcggcggcggcggcggcggcggcggaggtggggtggatgccggcgagcccgtctgggactgggggaacctcctcgacttcgccgtccatgacgacgactcgctggtcctcccgtggggggacgattcgattgggatcgaggccgatcccgccgaggcggcgctgctcccccctgccccgtcgccgcagccggcggaggcggaggcggaggccgcggggccggcgtcgctgccgtcgtctatgcaggcggagggaagcaagcggcgcgtgaggaagcgcgacccgcggctggtttgcccgaactacctcgccgggagggtgccgtgcgcgtgccccgagattgacgagatggcggccgccttggaggtcgaggacgtggccacagagttgctggcaggggcgcggaagaagccgaagggtgccggccgtggtagtggtgcggcagtcggcggaagtggtggaggggctagccgtgggacaccggccgagatgaagtgccaggtgcctggttgtgaggcggacatacgtgagctgaagggataccaccgccggcacagggtgtgtttgcgctgcgcgcacgccgccgctgtcatgcttgatggtgtccagaagcgctattgccagcagtgtggcaagtttcatatattactagatttcgatgaagataaaaggagttgtagaaggaaattggagcggcacaacaaaagaagacgaagaaaacctgattccaaaggcatattggagaaagatatagatgaccagttggatttttcagcagatggtagtggtgatggtgaactaagagaagagaacatagatgtcactaccagtgagacgcttgagactgttctgagcaataaggttttggacagggaaacacctgtgggttccgatgatgtgcttagttctccaacatgtgcacaacccagtttgcaaatcgaccaaagtaaaagcttagtgactttcgctgcttctgttgaagcctgccttggcactaaacaggaaaacaccaaacttaccaattctcctgtgcatgacacaaagagtacttactcatcctcgtgtcccacaggacgtgtatcattcaagttgtacgattggaatcctgctgaatttcctcgacgcttacgccaccaaatatttgagtggctttctagcatgcctgttgaactggagggctatattcgtcctggttgtacaattttaactgtatttgttgcaatgccacaacatatgtgggacaagttatccgaagacacaggaaatcttgtcaaaagcttggtaaatgctccaaatagtctcctgttgggtaaaggggccttctttatccatgtcaataatatgatatttcaagtattgaaagatggtgcaacattgaccagtaccagattagaggtacagtccccgaggattcactatgttcatccatcatggtttgaagcaggaaagcccatcgatcttattctttgtggaagttctcttgatcagcctaaattcaggtcacttgtgtcatttgatgggctgtacttgaagcatgattgtcgccgtatactgtcacatgagacctttgattgtattggaagtggggaacatatacttgattctcaacatgaaatattccggataaatattaccacatcaaagctggatactcatggacccgcatttgtggaagtggaaaacatgtttgggctatcaaattttgttcctatccttgttggtagcaagcatttatgttctgaactagagcagatacatgatgctctgtgtggttcttcggacataagttctgatccttgtgagcttcgaggacttcgacagactgcaatgttgggattcctcatcgacattggatggctaataaggaagccatccatagatgaatttcaaaacctactgagtttagcaaatatccagagatggatatgcatgatgaaattcctgatacagaacgattttatcaatgttctggaaataatagtgaactcgttggacaacatcatagggtcagagcttctttctaacttggaaaagggtagactggaaaatcatgtaacagaatttcttgggtatgcaagcgaagctcgaaacattgttgataatagacctaaatatgacaagcagagacaggttgatacaagatgggcaggtgattatgctccaaaccagccaaagttgggcatttctgtgccacttgctgaaagtactggaaccagtggagaacatgatttgcactcaaccaatgcagcttctggagaggaggaaaatatgcctctagtgactaaagctctcccacacaggcaatgctgtcaccctgagactagtgctagatggcttaacgctgcctccattggtgcttttccaggtggtgccatgagaatgcgtcttgccaccactgtggtaattggtgctgtggtatgttttgcagcttgtgttgtccttttccacccacacagagtaggggtgcttgccgcgccagtaaagaggtacttgtctaggaactactcatcatagttgaagctagattagattaaccttcctgttgcttttcccctgtatcatatgcatgtacctttctaatttgaggcttagcttgtgcatccgatgttcaaatatttgtaagaggacccacagacataaatgcaaatttttgcagctttttttggc

SEQ ID NO: 24616 - DNA, 1099 bp, Oryza sativa
  ref <308>: DATABASE ACCESSION NUMBER: AK100058
  ref <309>: DATABASE ENTRY DATE: 2002-08-28
gacgagggagagttaagtttgttgtcagcgcatttttttttctggcacgagaagtactttggagaaaacatgggaaagataaaggtggagataaaggtgccaatgacggatgaaaggaagaaatctaaagttatgcaaataattgctaaacatagtggtaatacttcgatcgcatcttgttccaagtactatataatactatgcatcatggtttttgtatactgaattatacttgctctcgcgctgcttaaccctcaaaaaataaagttgtcgatggagatgaatgagcattttgtccctttcttatgggcatttttgcctttccgggaggaaatgcaactgtgaatatttgaggcaacatatatataaccttaataattaatctgcaagcctccgttttaacatttattcttagcaaataaacattaatggtacacgaaaactacacacctattccttacaccttagttcattaggattattattgtcttggatataggaatcttgtcaatcacagccgatcgagataaagataaggtgaccatagttggcaatgaaaacatggatgtcacgtgtttgacaatggagttgaggaaacagatgcggcgtactcacattgtcattgacacggtcacaccggttgatgagaagaaggaaaaggaggagaaggaaaagaaggagaaagaggagaaggagaagaaagagaaagaggagaaggagaagaagaagaaggaagaagagcaaaacaatcccaagattgtttgtacgccgtactatgtgcacatggtggacgagcccagtccatcatgctgccagatgtagctatattgtatgaaatcactatgagtgtgttgtggagaattttggaagatttattatcagccatttgctgcaaattgatacatgtatagttaatgagttcaaataactttagttttctgttttgtttttccttattcttctacaacgcaagtatgaagaactgaattgtacttaaattgggtaggaaactggtggtttttgctactccctacatatggaattggtcatgggatcagatccaatatatatgcaccctgttatcaaatgttggttgcgc

SEQ ID NO: 24617 - DNA, 1646 bp, Oryza sativa
  ref <308>: DATABASE ACCESSION NUMBER: AK100059
  ref <309>: DATABASE ENTRY DATE: 2002-08-28
gagcaagaacttgatgtctcattttactcggtcaaactgggctaggcactaacaaaatagggcgtactaagccattaaagcgacgcccggttgctctgcctcgggggcgacgcgggcggcgaaacaagccgcgccgcccccgtccctctcctcccctcccacgccgagccgccgccggcaaagccgggcggctgcaaggacagcggcggcggggctctctctctctctctccaccgctcgcagtggagctggacggggcgccggcaagacggagcggcaaggcgccgacgacgacgaccagatccagcgccaggatgcacggatccggtacccctatggccggatctgctgcttccgggcggcggcgacccgggtcggcaagtcgcggcgtcggcggcgtggaggtggcggtgtcagcggccggagggcggcgtcgacaactggagggcggcctcggcggcgtggagttggcagcgaggcggaggacacggcggcatgaccgtggctgcggtgacaaacggcgggcgtgaccagttctggccggacggctagcggcggtgcttgcggccgtggtgcagctgcggcggaggtggatggcgacggtggcggcggaggctggtgagggcgacgacggctgaggcagccgctgcggtggctggcgatggtggcgacggctgaggcagccgtggtggcggcaacggctgaggcagctgcgacagcgaggtggcggcggcggttgaggcagccgcagctgtggtggtggctacacgcagtgtcgaccgtggatgagggggaggaggcacggcggcctcggacggctagctgaaggcgtggtagacggctgcatctggccggcgcagtagcgtttggaggaggggtcggaggccgccttggtacagagaggcgcagcggatggcagtggaggtcggctcagcgcgagaggcgcgggcggcggagatggaggccggcttggcgcgagaggcgcggccgatggagggaggccagattggcgcgagagacgcgtccggtggaggaggccggctcggcgcgagaggcgcggccggcggtggaggaggcgaccttggtgagtggaggagctgctggtgggtgtggtgcggtcttcggcgcacgaaggctagccgatggagggcgccggtgcaggggtcccacatgtcggcagaggttgattggcggtggagcatcggtgtgtcagccgtggtttcgcaggtggtgagcggcaggtgaaaacccagcccggccttggctggaccgacaacgatggttaattccccctcctgagggcgttgtcgtgctgtctcgccccttaagggtggttgccgggcagaagcctagtcctggctcctttgagccttgacggatggctgcggcggttttccgtcgcttctcttcttgaagacgtcgttttggcaccctcttgctgtgtggcgatctcgtctgtgttcctttgttggtctagcggcggtcggtccggtgctagccttctcccggacttgtgtttaggcgctgtcggtgtgtgggtggtggtattttttttctttttcctggttacgaccctccagggttgtaatcttgtaattttttcctgctatgtcaatagaacttcgcaccgtcttgtgcgagttgtt

SEQ ID NO: 24618 - DNA, 1510 bp, Oryza sativa
  ref <308>: DATABASE ACCESSION NUMBER: AK100060
  ref <309>: DATABASE ENTRY DATE: 2002-08-28
gagtaaacccaaagccgccaactgcttctctcgccgccgccgccgccgccgccgccgctcaccgtcgccggagaagagggcaggaggaggaggaggaggaggaggggggagccatggcgccggagcccgaggacgacatcatgaacgagaagaacccgcgcccgctcgacgaggacgacatcgccctcctcaagacctacggtcttggaccttactcgaccagcattaagaaggttgagaaggaaatcaaagagatggcgaagaagataaatgatctctgtggaattaaagagtctgacactggattggctccacctagccagtgggaccttgtatccgataagcagatgatgcaggaggagcaacccctgcaggttgcaagatgcacaaagatcatcagccctaacacggacgatgctaaatatgtcatcaatgtaagcaaattgcgaagtttgtggttgggttgggcgacaaggtctcccccactgatatcgaggaaggaatgcgggttggagttgatcgaaacaagtaccaaattcaaattcctttgccaccaaagattgatcccagcgttaccatgatgactgtggaagaaaaaccagatgtgacttacaatgatgttggtggatgcaaggagcagattgagaagatgcgtgaggtggttgagcttcctatgcttcacccagaaaagtttgtcaaacttggtatcgatcctcctaagggagtactgtgttatggccctcctggaactgggaaaacacttcttgctagggcagtggccaaccgcacggatgcttgctttattcgagtcataggaagtgagctagttcagaagtatgttggtgagggggcccgcatggttcgggaactcttccaaatggcacgatcgaagaaggcttgcattgtcttctttgatgaagtcgatgccatcggtggtgctcgctttgacgatggtgttggtggtgacaatgaggtccagcgcactatgcttgagattgttaatcagcttgatggatttgatgccaggggaaacatcaaggtcctcatggccaccaacaggcccgataccttggaccctgcattactacgtccagggcgtctggacaggaaagttgagtttggcctgccagacctggagggccggacccagatcttcaagatccacactcgcaccatgaactgcgagcgggacatccggtttgagctgctcgctcgcctctgccccaactccactggggccgacatacggagtgtgtgcacggaggctggcatgtacgccatccgcgctcgcaggaagacggtgacagagaaggatttcttggacgcggtgaataaggtgatcaagggttaccaaaagttcagcgcaacgcccaagtatatggtgtacaactagagggcactgaccttgatttcccgtttcttcctgtgcccctcctttggaccttcagaaagattgagcctgtttgtttccctttcttactcaaaagaaacctgggctgttttctgcacc

SEQ ID NO: 24619 - DNA, 2402 bp, Oryza sativa
  ref <308>: DATABASE ACCESSION NUMBER: AK100061
  ref <309>: DATABASE ENTRY DATE: 2002-08-28
gatatagtcctctcccctctcccctttgcttctcctttactctctctctctctctctctctctctctctctctctagcttcatcttgtctctcttcatgtgtgcatgtgtgctgtagtgctcgtctttccgtctcctccatctctctctctctctctctctctctctctctctctcttgcaaagaagcaaaggcagctcgcccttcttgcgcattccggtgcacgccactccacactccacacacacacacacacacacacacgggcaagaactgccctttcttttgcagctctgacgacgggtttgggggtggttcttgatgggattcttggccaatggggatgagctgaaggcgctgcagagataaaagcaaaccaggataagtttgtaaattcagctggcaaatccgtgcaagattctgaatttgtgagagcatctctgatacaattcttgatcttagatagactgaaggatagatatgtcgtccgacagcaactccatcagttcagcactgtcacagacaacacccgtgcttcgcttgagagtttgggtcctgattgccatcggcattgggatactgatggcaattttgttcatcatagcattgtggctctctatgcggaggaaaaagaagacggcggttggattcgacgggagatcacatatggagatccctattgtgtcgaaagatatcaatgttgacagagttgatgcacagagcctgcatgacagtggaacacctatcatgccagtgcaggataaatatgaacagatgaagggtgtttcgcacttggcagagagtagatctgtcgatgtcgacgcgttcagccaatgcagctcagtgtacaacatagagaaggctgggagctcatattctgaagattacagcagctctgggcctggtaggaaaggcagttcatcgtatgggtatgcgtccgcttcaccgctggttgggttgcctgagctatcacatttgggatggggtcactggtttaccttgagggacctcgagtacgcaacgaaccggtttgcaaagagtaatgtccttggagagggtggctatggaattgtctacaagggtcgactgatgaatgggactgaagttgccgtgaagaagatccttaacaatgtggggcaagcagagaaggaatttagagtcgaagttgaagccatcggtcacgttcggcataagaatctggtgcgacttctggggtactgtgtggaagggatacacaggatgcttgtctatgaatatgtcaacaatggaaacctagaacaatggcttcatggggccatgagtgggggcatccttacttgggaaaaccgtatgaagattctccttggcactgcaaaagcgcttgcatatcttcatgaagctatagaccccaaagttgtacaccgagatattaagtcaagtaatatactaattgatgatgaatttaacagcaaggtttctgattttgggttggccaaactactgaattctgatagtagctacatcaatacaagagtgatgggaacatatgggtacgttgcacctgaatatgcgaatagcgggatgctaaatgaaaagagtgatatttacagttttggcgttgtgctcttggaatctgtgactgctagagacccagttgattacagtaaacctgcagatgagacaaatctggtagaatggcttaaaatgatgatcagcagcaagagggcggaggaagtagtggatccaaaccttgagattaagcccccaaaacgtgcccttaagcgggcaatcttggttggcctgaagtgtgttgatccagatgctgacaaaaggccaaaaatgagtcatgttgtccaaatgcttgaagcagttcagaatgcatatcgacaagatcagaaaaggcccagcagccagatgggaagcgtcgatgtcgagtcacagcaatctgcggaggagatctcaaacagtgccgattcctgaggctccaatgctgaacagatacagaaaataggacatgaaaacatttcattatcctgtctggtttggtcaaatattcaatatagttcaataccgtgattgcaacaggtttacatttagcaaagactggaagacataaaggcataggaatcgttcgtttccctttcttttcttcttcttcttcttttcgagaagtgcttctatgctcccctaaaatatccgccgtactatgttttctgtagatgagtcctccaactcgtttactctacgatatgtgtagttttgttttaggggagcacagaagcaccttcttcatctataccgtttaagttatcaggaggagctgacctcgaaggcatgaatgactagtaaccagattttgttacccttgtaaagaacccttgtcgatcctcagttttaccatgaagtacaaagttttgttggtgt

SEQ ID NO: 24620 - DNA, 1760 bp, Oryza sativa
  ref <308>: DATABASE ACCESSION NUMBER: AK100062
  ref <309>: DATABASE ENTRY DATE: 2002-08-28
ggttgcactgcaaacagccatggaacaagcagctggactagtgtaccaactcttccaaaacgaaatgtttccctggatcctagccttgttcccattccttctcctagcactgcactacttggcaacaaatcatagaacaccaacaacctgcaaggaaacgaggaatcatctttccccaccttcacctccgaggttacccatcatagggcacctgcacctcatcggtgacctcccgcacgtctctcttcgtgagctcgctcatcggtacggccccaacctcatgctcctccacctcggccaggtccagaacctcgtcgtctcctccccacacgccgcagaggctgtcttgcgcacgcatgaccatgtctttgcgtcacggccacactctttaatcggcgacatactcctctacggcccgtccgatgtcgggctttcgccttacggcgagcagtggcggcggagcaggaggatcgtcacaacgcacctgctgaccaacaagaaggtgcggtcgtaccatgtagcacgagaagaggaggtgcataaggtaatgaccaaagtccatgagttatccaccaagggtatgggagtggacatgtttgagctcttcagcacctactcgaatgacctcatatgccgccttgtgtcggggaagaacttccaaggggacaaaggtcgaaacaaaatgttccgtcaactgttcaaagcaaattatgtactcctcgcagggtttaacctagaggactactacccaggcttggcaaggctcaaagctgtgtcgtgggtgatgtgtgccaaggccaggaacacgaggaagttgtgggatgaattgctcgacgagattatcaatgatcgtatgagcaaacaaccatgtgagcatgatagaggcaatgatgatcaagatgagatggacttcgtagatgttttgctccttcaagagcgaggcatcaccagagatcaccttaaagcaattctagtagacatgtttcaagccggtacggagacgacatcagtggtgctagtattcgccatggccgagcttatgcagaagccacatctcatggccaagttgcaggccgaactaagaacgaacatacccaagtagggacgagaattgatcactgaatgtgatcagaccaacatgacctacctcaaggctgtcatcaaggagacacttcggttgcatccaccaagtcctcttctcgtcccacatctcgcgatggctgactgtgatattgatggctacacagttcgctcggggacacgtgtcatcgtcaatgcatgggctattggaaggaactctgaatcttgggaagctgcagaggagtttttgcctgagaggtttgttgatggtggaagtgccgcgaacgtagacttcatagggacagacttccagttcttgccgtttggcgcaagcggcggatctgtcctggaataaactttgcttctgcgagcatggagatcatcctagcaaaccttctgtaccattttgactgggatgtttcagctgaagcagccatagataaagatggcattgatatggctgaagcgttcgggttgtcagtgcagctaaaggaaaagctactgcttgtaccggtagagtataagggtagcgtgcaggattcggctgttatattatgataggattagtttctgtcgtatttatttgggattatgtaaaatccaagttatgtataactctatttgtacgccggtctctgagtctgaggttcaatatatcgaaccatatatagttacgtggt

SEQ ID NO: 24621 - DNA, 1054 bp, Oryza sativa
  ref <308>: DATABASE ACCESSION NUMBER: AK100063
  ref <309>: DATABASE ENTRY DATE: 2002-08-28
gagggctagggctagggtttgaggtcgggcgcgcgcggcatggcggggatacggtggccgcccgaggacccggagatcttcccgccgcctccggccccgccgccgccacgacggcgtcggtcgccgccaacccctccggagatttcagctttgacaaggacgtgccagactccgccgatatggagccgccgttgctgggcctgccgaattatcatcaggatggttcttatgcagaataccttgctaattttcaagaacggagccacacagatgactggtttggcacggagaacatggatgtcctcgtaagctggacgaaaaacttatgttccaacaaggatttgcgtagctgcagtgtactcgacataggaactgggagcggtcgactctcgcaacagcttgcaaagcaagggttctctgatctgactgggatcgaccacagtgaaggtgcaattgaggttgctcgtaatcttgctatccgtgatgggtttgagcacattaatttcttggttgatgatgtgttagagtcaaagttggagaggagatttgaacttgtgatggatgaaggaactctggacacgattgggttgcaccccgatggacctgtaaagagaatgatgtattggcagtcggttgcagggctggtttctcctggtggcatactggtcatcacatcatgtagcagaaccaaggatgagttggtccaggaggtagagagcttcaaccagagaaagctcagtgctatgggctccgaaggtgcgcaggccagtgatactgcggtgttcaagtacatcgaccatgtccaaacgtaccccatcgtggatagttcctgcatcacgaccgttgctttctcgcatagctgaaacatatatgtatgctctctctttttctccctaactttgccatcccagtgtgtatcccctttaccctagttctcttcgggtgatagtctactttgccagataggttattcagttgtaacgttgctttgttacgtcttgaattcttgatggatgtactcttttgaaagcgtgacaagcaacactattacacc

SEQ ID NO: 24622 - DNA, 1425 bp, Oryza sativa
  ref <308>: DATABASE ACCESSION NUMBER: AK100064
  ref <309>: DATABASE ENTRY DATE: 2002-08-28
gagagcaacaatccccgttaccccacgggatccaaccggattctccttgtccttctcccttcctccctcgccggagcccgatcgaaggtacgccgcttcccatcggatggctcctctcctgtcaccaccgctgcttgccgactcggttgccaagttccattgctcctccacacccaccccctgctccggcagtgtccggcgatgggcaatcacaaggttcgccggggccgggaggaggagagactggcaccggagacggcggacgtccggaaggggggtcctgacggtttccgcggtggcggcggagtcgcccagctccggtggtggcgtcgccgaagactactacgctgttcttggcgttatgccggatgcaacacctcagcagatcaagaaagcgtactacaattgcatgaaagcatgccatcctgatctcagtggcaatgaccccgatgtgacgaacttctgcatgttcatcaatgaagtttacacggtacttaccgatcccatccagcgagcggtgtatgatgagattcatggctatgccgcaacagcaaccaaccccttcttcgatgacagtgcccctagggatcatgtgtttgtcgatgagtttagctgcataggatgtaaaaactgtgctaatgtgtgttctaaggtcttcgaaattgaggaagattttggtcgggcaagagtttacaatcaatcaggcaatgccgaactaattcaagaagctattgacacttgtccagttgactgcatccattggacatcagctgcacaactttcactccttgaagatgaaatgcgaagagtagaaagagtgaatgttggtttgatgctagctgggatgggaagttcagttgatgtgtttcggatggcaagtacacgatgggagaaaagacaggctaaagtcttggaaaaggtcagaagacgtgtgagccaagaagattctggtaagggcagctcatggagtgatgtctggggagcaccaacaagatatcgaaagaacgaggacgaagcaagggagagagcaaagcgagcagcggcggcagcgaggaggtggagagaatactcgaggaaaggtgcagacaagcctcccacattcaaacttccagaggcagtgtccaacaaggagtgagagaaccgaacacaatcaaatgagagtttttatcaaagcagtgctacctaaccccattgaaatcatgtatagtctaattatttgcagagagctgtatagcatttatgctctctcgccctccattccacatgatgaccaatatcttccaatattctgcttgagatagttggtgttggtcaccatatagaatacagaactacagattccaagtgtagaaagatactgtaccattgctactcatacagttatgtacttatgttatgatgaaacttagaaacttggtttatact

SEQ ID NO: 24623 - DNA, 1941 bp, Oryza sativa
  ref <308>: DATABASE ACCESSION NUMBER: AK100065
  ref <309>: DATABASE ENTRY DATE: 2002-08-28
gcctcgcttctctctctatcgcaggcgaaggcgaaggcgaaggattcgggctcagctcctccgcctccgccgatctctcgccggagatgtgtcagccctaggagaggagaagctttctttttttggaaaatcgagtcaacaaaaggtcttgccaattaacacagtgaaggataattctggcttgagtgtttgtaaatggagagaataagcaccaatcagctctacaattctggaattccggtgactgtgccatcgcctctgcctgctataccagctaccctggatgaaaacattcccaggattccagatgggcagaatgttccgcgggagagagaattgagaagcacacctatgccacctcatcagaatcagagtactgttgctcctcttcatgggcattttcagtccagtaccgggtctgttgggcctctgcgttcgtcccaggcgataaggttctcttcagtttcaagcaatgagcaatatacaaatgccaatccttacaattctcaaccgccgagtagtgggagttcttcaacgctcaattatggatcacaatatggaggctttgaaccttccttgactgattttccaagagatgctgggccgacgtggtgtcctgatccagttgatggcttgcttggatatacagatgatgtccctgctgggaacaatttgactgaaaacagttctattgcagctggtgatgaacttgccaagcaaagtgaatggtggaatgattttatgaattatgactggaaagatattgataacacagcttgtactgaaactcaaccacaggttggaccagctgcgcaatcatctgtcgcagttcaccaatcagctgcccaacaatcagtttcatctcaatcaggagaaccttctgcagttgctataccctcgccctctggtgcctccaatacctccaactccaagacacgaatgagatggactcctgaacttcatgagcgctttgtagatgctgtcaatctacttggtggcagtgaaaaagctactcccaagggtgtgttaaagctaatgaaggcagacaatttgaccatttatcatgttaaaagtcaccttcagaaatacagaacagctcgatacagaccagaattgtctgaaggttcttcagaaaagaaggcagcctcaaaagaggacataccatcaatagatctgaaaggagggaactttgatctcactgaggcattgcgtctccagttagaactccaaaagaggcttcatgaacagcttgagatccaaagaagtttgcagctgagaattgaggagcaagggaagtgccttcagatgatgctcgagcagcagtgcatacctgggacagacaaggcggtggatgcttcaacctcagcagaaggaacaaagccatcttctgatcttccagaatcttctgccgtgaaggatgttccagagaacagtcagaacggaatagccaaacaaacagaatcaggtgacagataatgaggatgtgatgagggtctctccaagatgtggacccaagtggccattgaatgggctcgatggctatctgactgatgtttggcaaagctaaaattaaatcgtttttgccttttcacggggaacagaacattgttgtgaacagcatatcaaagcttgccccagcgcttgtagctagactttagttgtacagtaccccaaacacggcagcgacgattccgtgttaatgggatgatctttaggtttcagaaggcagcacaagcaaatttgcactgatgtactctttgtcaggtggtttgacttcttgctttctttgttgttagggactggatagcatggattaggaatttgattatgatgaactaattcaagaaattgccataatctttggtaccttgtgcgcctggaacatgtaaatggtaccaaacaacaatatgatatgtttaccttcatgttctatttggcttc

SEQ ID NO: 24624 - DNA, 996 bp, Oryza sativa
  ref <308>: DATABASE ACCESSION NUMBER: AK100066
  ref <309>: DATABASE ENTRY DATE: 2002-08-28
gtcaggagggttttcccttttccaccttgtcgccggcaaagccacagccacggcgatctgctccccctcacggcggcgatggcgctctcgacctcccggcctcaccacctcctgcgccctctcctccgcggcttccacgccacttctcaggccatggcgaggcctgagccccacgagttctccaagccgagcgactacctcgggagctgggagcccgcgggcgacccacgggaggcgtgggcgcggctggagcggcttcgcaagggctacgcgcgcgacgtgcggcagctgcggaggcagtactcgtacgagatgcagctgctggaggccgagcggcagcgcaaggcggaggcccgcgccgaggccgcccgcctcgccaacgaggagcgcaaggccaccaaggccgccgccgcgcagacgcgcgccgccgagcgccgcgccttcgagaaggacttccgccaagcccttatgaaagaaagagctgagaagctggagagctggagggagaaggagaagcttaaagtacagaagaaggcggatcacagggagctcttgcgcaagaaaagctctatgtgggttgctgaggataaactggaaacaacaattcttgacgctatcaaaaataccacagctctctgaggatacaagatggtgtattctgaaagcatgacggaggatggactgaaggaagcttatttgtgattcccttctggaactaatcacaactgcctaagcaataacaaccatatttgaaaattctgctgcaacactgtatgttatattgttagacttgaacgccaagctgaaattgtattttggcattgccttttttctgagagagacctctctcctcaaatttctgttaaaaatttgttgcacgattaaaattatcatggccaaattttgattttcctgcatgatctagttgcaaactgtgttttacgtttgggtacatttgtctacattttttgaatggaatattggagttcatcgttg

SEQ ID NO: 24625 - DNA, 2292 bp, Oryza sativa
  ref <308>: DATABASE ACCESSION NUMBER: AK100067
  ref <309>: DATABASE ENTRY DATE: 2002-08-28
ggcactagcacctgcgtcgaatcgctcgaccgcacgacgagagcctctcatcctctcgccaccgaaccccatccatcgcgtcgtctcttcctccccagctcagcgctctcgtcggtgcgcctatggcgtctcccttccactcctccttcccgctctccccgccatcctcctgccatggaggaggcgtcctccagtttgccactcgagccgcgactagtcctttcgcgtcctactgcagagcgccggcggcacgcgacggcggcgacgaccacgaccacgacgcggggatactgcaggcgctcgcgttcaacggcaacgggagcgtccatggcgttcttgatcctggtgtcgaggaggagaaggaggcgggtgacggcggcggcggcgggaggcggggcacgcggatccgggcgagggactgcgcgaagcggatcatgggactccccgtcgaggagcgggtcaaggtgctcgacctcctgcagcgcgacgacggggcgctcaccgtgtccgactacaacgacatcctctccgcgctcgccatggccggcgaccacgactccgcggtcgcgctcttccgggcgctccggcccaacggcgtcacgcccgacgcgcagtcctacgccaccgccgtgcagtgcctctgccggaagggcgcccccgacgaggccaaggaggcgctcgacgagatggtggcgcgcggcttccgccccaccgtcgccaccttctccgccgtcgtcggctgcctctgcaagcgcggacgcgtcaccagggccatggaggtgttcgacaccatgcgcgccgtcggctgcgagcccaccatccgcacctacaacagcctcatcggcgggctctgctacgtcgggcggctcgaggaggcgctggacctgctcaacaagctcaaggagtcgccgaagcagacgccggacatctacacgttcaccattgtcctcgacgggttctgcaaggtcgggcggacggacgaggccacgcccatcttccacgacgccgtcaggaatggcctctcgccgacgatattcacctacaacgccctgctcaacggccactgcaaggaagggaatccgctcaaggcgtacagcctgctcatggagatgtgcggcaacgccgcctgcccgccggacaggatcagcttcagcatcgtgctgcaggcgctgctgcgcgccggcgagacctccgcggcgtggcaggcgtacaagcggatggagcgcgccgggttcgaggccgacggccgcgccctggacacgctcgcgcggggcctgtgccgtcagtgcgcggcgaacgtcgcggcgctcgccgacgcgagggaggtgttcggcaagctggtggcgtccgggcacgagccggtgtcgtacacctactgcctgatggcgcaggcgctggcgcgcggcggcgaggtggacgcggccgtgtcgctcctgggtgagatggcgcgcaggggttacgcgctgcggaagcgcgcgtacaccgacgtcgtccgcgcgctgtgcgagcgtggccgggcgcgcgacgcgctgcgggtgctggcgctggtgatcgccagggacttcgtgcccggccggaacgcgttcgacgcgctgctcggcgagctcgcccggcaggggaggtggcccgacgcgatggccgtgtacgccgccgccgtgaagcgcggcgtcctcgtctccttgaagcggcatagcaaggaggccctgctggtgcaggagcagacggaaacgcgagaatcgtcggtgcaaccgtgcaactgagcgttccgcagtgaaaaattttgctgcaaaattcacacattttttggggggactctattgttggaagctccggaatctgcaccgatcaaaggcgtgccattgtttgcatgcgaatacacgaccagttttggattttcgttgacaattcgggaggggagatggcgaaaaccaatttctgcataatcgcttcgacatgatcggctcaaccggccggaccatcacgctacatcagcaccagtgcaccagcactttggccctggtagcaacgaacgccaccaccctttccggaggcaaactttgttcggtcattctccggtgaggctataacttgcttcagttgcttgttgtgacctgtaaggctgtataagtagaacataattgggattggagcggattctgattcttcacgctgattttttcgcagctagtacaaatttgtaaaaaatgcgctgatttatcagaagccgaaatgctcaactcagcaaaagaacatcaaagagcttaggacaactgtttataatcaggcacgatg

SEQ ID NO: 24626 - DNA, 3301 bp, Oryza sativa
  ref <308>: DATABASE ACCESSION NUMBER: AK100068
  ref <309>: DATABASE ENTRY DATE: 2002-08-28
gaatcaatcaactcccatcgggatcaatctatcaacacacagttctatccatcggcatccatctgtctctgcccagccatcttcaactcatatccatcgacaacacaccggccggcggcgaagcagtatcacgtacgccggtgtccctcgggaggggcagatcgccgagaggcggcatcagcgcacatcatcggcgtccggcgagctggtgtcagtccgatctactaccatagattgatcacggaggggaaaaccatcggcgcgttgctccggcagcctgtagactactcgtcaacatcggcatcaatacacatccattcgtcggcgagtacagctccatccttttgtttgttattgtctttttacagattgatcatggagcacagacaaaggagaagaagccatgatgtggagttggccggtggccggaggacgcgctggccgacgacgccacaccaacgtgtgcgccaccggtggctgccggccggcagcatctgacgctcggcgagggtacatgcagccacccaggagacggcgccaggcgatcggcatccatattcatctactccgatcccatctcatccacagcatatatcaaatagcagagaagcctccagcgcggcgggcgggcgtgcacagcctcaccggcgctcggcccggcagggaggccgaggccaaaggaggagaaagccatctacgtcgtacgcgcacgcgccgacggccagcatccatctaccggcccccacgaagcgaccttccgacggcaagcaacggcgtttgacctcggcagccggcgacctcactgctgcacctcggcgtctaagacaggaagtgtgcgctcggtggccaggttaccacggctgcagcacaccccagcgtccggcgtgaggacgcgcacgccaaggaggagacatgtgccaggaaggagcgaggcgatgtcgttccaatctgttgtcatggccagggagaagtcgggtgtattgccgtcgcccggggtcactgggccagccgatctattcacgtcacccgcaagcctccgtcgagattgacgtcacccgttcaagccactggtagtgtcactaccgtacccaacgctgtgacaccaccaacacccgtccgccagagaagaccatcgtgacgccactccgtcggggcgcgccggagatcgtcggagcagccgcggacgccgccaagtcatgttgatccagaagttcttgtcgagaacgacacagactccgctgagctgcccgcgtccgtgaacaacatatcctcatcacaccggtagccacccacgccatcctgatggagcagccccatcgtcaaccgggaggcatctcgtccaccttatcggcaacgcccagacgctcgccgtccccgtcaagctgctggtgacactgtccgccgagtgccaccccgtcaaagtttgccgttgtgccggcaccatcgcaccgacgccaggctctcaggatgtcggcgttgtgatctctactgtgtgaggacatctcaccgagactccactggccggcgacgccttcacgctcgccgcggtctcttaggtcaccattgatgtctactcaatcatcttcgacggtcctgccattttccttacactcgtcgttgagccgctcgaggagatcgcctgtcggagcgccgctacccggagcccgcacactgtcgtcgtgccgttcggctactacacctctgcttcatcgcgccggacttgtgatgccatccgtccgcgatgactattcttcgccgagtcgctgaggcgctgccaagcagcgctcatctccgtcaactaacaatcatctgccacctgccggagaaggccgttgtgacgccacccagccggagcgtgccgaagatcgcatctacctgatgctacgacgtcgccaagacgtcgagcgtccttactttgctggtcgcaacctatgagaatggcgacaccatcaacatctactcaacctatgcaatgccggagtgccactgctgggtgcccgcacgctgtcgtcaagtccgccggcccatgatcccttcacttcgtcatgccggagcatcatggtttgcagtcatcgcgccgttcgtccgcaatgtcttcacctcgtcaagccggcgtcgtcgtgacgtctcctctccacaccaacatgatatcgtgacgtccgttcgtgatgcgttctcttcattatgccgagatgagatgttgtccgtccatggtgcttttcccctctttgtcaagatctgtgtcgtccgtccgtggcgctttccccctcttgtcaagaatcgatgtcattcgttcgtgattctctccttcttcgtggagattgatgtcgctgttcgtccgtgtattggagtgttgctcatcttcatcaacataaagcaagaatggtgccgtctgtgatgctagggaaccgttcgtgctgaatctacaccaacaatgtcctcggccgttccgccgaagagacatttacttcttccaaggtcgccgtcgttaccggcgcccttatatagccccttttatgggctcgtcatcatatcaactggatcaatagtagatccatcatccgaaggtgctaaagccacgttcatccggctattgtctacattgacttcttcatcaacatcttcattgcaagtccatgttgtataagggacatgacgaaccaagaggtgcccagccatgtgtaatccagctaccgtctacaccaaccgtctttgtcaactcttcgtcactttgatctcacctagccaggaggtgcctagccaccgtatattcggctgttgtgtacaccaactgacttcaccaattcctcttccctttaacatcattccgacgctactactgtgacgtctctaccgtccaagctatgcgagtttcatgcatgttgaagatcaacctatctacaccaccacgtcgctcaagactgatgaggcggagcgacgagggtgggcgaagccgatggaaggctacgctaccaacatcggcgcacggaccgacgaggccgtggatgcgttgccggcgcccacatatatatatccaccatcttcaccaacattcatcatgcatggagaacgtgaagcgaagacgacgagatgaccacaagcaacttaatcggaggttctcctacaggtgtagatctgcggaggtaattaaatgggagtctttcgagaccccaggaaccagaagaccacaccgctgatgtcaagatctgtccaacgacaggcaatggcgcgcgtattttatattatacatggaaactgtatcttgttaattcaattaataaagatcacgtgtttctgtgtc

SEQ ID NO: 24627 - DNA, 1190 bp, Oryza sativa
  ref <308>: DATABASE ACCESSION NUMBER: AK100069
  ref <309>: DATABASE ENTRY DATE: 2002-08-28
gactcaagaagctgcaaccgcgtaatctcgagaaaacggtttactcggcctaagacagtgggagacgacggcgacggcggcggcgggaggaagccatggttctcgctctgctgttgggctcctcctcttcttctcttgcggcgccacaccctgcttgctcttccaggagaaaatgcagacccgctggacgaaataatttcagatgctctctgcatgacaaggtgccactgaatgctcatggagtattatccacaaaattgctctcatgccttgctgcttcgcttgttttcatctctccaccttgtcaggctatccctgcagagacctttgtacagccaaaattgtgccaggttgctgtggtagcagccatcgacaaggctgcggttcctctgaaattcgatagcccttctgatgatggcggcacaggtttgatgatgaagggtatgactgccaagaactttgacccaattcgctactctggtagatggttcgaagtagcatcgctgaaacgtggctttgctggtcagggacaagaggactgtcactgtactcagggggtgtattcatttgatgagaaatcacgctcaatccaggtggacacattctgtgttcatggtggacctgatggttacatcaccggtattcggggaagggtgcaatgcctgtccgaagaggacatggcgagtgctgagacagatcttgaaaggcaggagatgatcaaggggaaatgctttctccgtttccccacactaccattcatacccaaggaaccttatgatgtgcttgcaaccgattatgacaattacgccgttgtgtctggtgctaaagacacaagctttatccagatatactcaagaacacctaatcctggaccagaattcatcgagaagtacaagtcctacgctgccaacttcggttatgatccgagcaagatcaaggacaccccacaggattgcgaggtgatgtccacggaccagcttggtctgatgatgtcaatgcctgggatgactgaggctttgacgaatcagttcccagacctgaagctgagtgcacctgttgcattcaacccattcacaagtgtgtttgacaccctgaagaaacttgtagaactgtacttcaagtaaactccatattgtaaaacttgtgatcaatgttccctccacatgaagatgcagttgaataaaattctc

SEQ ID NO: 24628 - DNA, 2226 bp, Oryza sativa
  ref <308>: DATABASE ACCESSION NUMBER: AK100070
  ref <309>: DATABASE ENTRY DATE: 2002-08-28
cctctcccctgtttcgaagccccccccacaacacgggaaccccgaatctccccacctctcccctcccattcgactagggtttttctctagggcttggggaacctcggcgaggcgcgtcggcgatgtcgctccggccgagcgagcggatggggatccgccagaagggctacaaggcgtcgatggacgcggcggaggggcggcggcggcgggaggacatcaccgtgatactccgcaaggccgaccgcgatcgcgccctcaaggagaagaggcggcgccccacggccaccgccgccgccgaggggttgccgcaggcggcgcactcgtcggccatcgagaagaagttggagagcctgccgatgatggtgcaggggttgtactcggatgacagcagcatgcagttggagtcgaccacgcagttcaggaagctgctctctgtcgaccattgtcctccaattgatgaggtgattagatctggagtgctccctcgctttgtggaattcctcaccagggaggagtacccccagctccagtttgaggcagcatgggctctcaccaatattgcttcaggaacagcagccaacacaatggcagttattgaacatggtgctgtgcccatctttgtgaagctcctcagctcaccaagagaggatgtccgtgaacaggctgtctgggccctgggaaatgtggctggggattccacaaaatgccgtaacctggttcttatgcatggtgcaatgttaccgctactgcagcagctcaatgagcatgctaaactctcgatgctgaggaacagtgcctggaccctttctaacttctgccgtggcaagccgcagcctgacttcaagcatgttgaacctgcgcttccagtgctgcgggagctcatcctctctcaagatgaggagatcctaacggactcatgttgggcactctcttacctgtcagatggttctaatgacaatatacaagctgtgattgaaactggcgtgtgtgattggcttgttgagctccttagccatccttcacctgtggtgctcattcctgctctccgcacggttggcaacattgtaactggggatgatgcgcagacccagtgtattgttggtcatccccaagcacttccctgtcttttcaatcttttgacaacaactcaaaagaaaagcgtcaagagagaagcttgctggacaatctccaacatcacagctggaactaaagagcagattcaggctgtgatcgattcaaacataattgctcctctattgcatctgttgcaacatgctgagtttgatgtcaaaaaggaggctgtttgggcaatttctaatgccacatctggtgggacattcaatcagatagagtatcttgttagtcagggttgcatcaagccgctttgtgatttacttgttcaccaagattccaaaacagtgttaacttgtttggaggcccttgataatatcttgagggttggggaggctaagaagaacttgggggcttgtaatatgaacatatttgtgccgatggttgatgaagctgatggcttggacaaaattgaggatctccagaaccatgacaatgttgagatatataataaggcagtttatgtgcttgagtcatactgggtgcaggaggatgaccaacagccctttcttattccatctgtatctgaatctgaatctgacaatgaaatgtttcagtttggcagtttcggtaaaggtaaatttctattcactaatggttggaactgtgaatctgaatctgacaatgaaatgtttcagtttggcagtttcggtgaagtgcccgatttggatggaaatgcaccgtagctgtctgttcagggggctttccagaatcggagagtcaagttatccgagtcatggtttggtcctgctaacttgttatgaggcagcagtcagggttcgtccgataagagcaaggtcagggtatggcaattaggtacattgcttttgtgtggttcgggtgtcttgtgtatagcggttggttcatatggattatggttctccacacaagggggtgggtactggaaattggtcggtcggggaagggcatactcttgcttgtgttgtcgggttagctattacttttaccttcctttcagtagcgtaagctggtatgtctgtggaggtaaaaaaaaaagggaaaagacaaaaatacttggaagctgtaaagccatagtttacattgttgttaatcatgagaacccagtgggttttg

SEQ ID NO: 24629 - DNA, 2376 bp, Oryza sativa
  ref <308>: DATABASE ACCESSION NUMBER: AK100071
  ref <309>: DATABASE ENTRY DATE: 2002-08-28
gagaattccagggcgcaaaaaacaaaaaaaaaaaaaaaaaaaatctgcccctcctaaaacccttgcggccaggcggtgcgccgcacgcccatggcgcggccgccgtctccctcaccggtcgtccccgtcaagcgagagcccgacggagccaccgccgcggtctcggatgcctacacgccccgcccaccgctgcggaagaggcgccgcctcccgtccaccccgacccagcccctcctcctcacgccgcaggccatgagctcgacgcgcgactccttcgcgggggagcggagcggcctggctccggcgtccgtgcccacctccgtgaagcgcgaactcggcgccgacggtgacggcgatggcgacggcgaccgggacgcccgcgggaaggcggtcagcgtggcggagggcaacctccagccccggaaaaccgctctggcggagctccccaccctcttggccaaccgccgccgcctcgaccgcctcctccacgagctcgtccgctcgcaccgctggggcgacgcggccggcgtcatctccgcgctcgtctccggcacacggcaccccgaatccttcgatgagatgcgcagcgtgttcgcggtcgggatggagatccataggcggctcgctgagaacagcggcatccaacagaacaccaggagtcgctactacctcaggacgcaaaagttgtacgatgtttggatgcggaggctaatgtggttacccacttgtgaaagaaaatacatggttaaactcgagctagctcttttttatctttcacaaggttgtatcgacagcgcatacaacacaacaaaaactcttattgctaaggatggactaaagacaccaattgtaaatcttatacatggtctgatatcatatgataattggtattctggcctccctgaagatatgcaacttgaggagtttgatgtttactgtgaatcacacacagtttcaatggcaacacatcactgtgatgaaaatggtcagcaggatacttcagatgataattgcagcattgatgctgattccagttctcctggttgctcttcaaaaagttcaatcaataattggaacatagacaagcaaagaaagtttcccgagaaacctggttttgttcattctgcacgggaagatgattcagttggatcacaggtggacgagaaaatggttgatacagattttcgaagcgtgtttttcaataccgccaacagtcctacttgtggattggaaaaaagcttgttgccattacggctaaagcattctgatgggactccaaatgcttgctttgattcatattggaagtacaagtcaacacctaatgctttctatgaagacgcagagaaatgtctaagggtggctctttattcaacaccaccaataatggcagccttactgccattaatacagattctcttgcttggtgataaattgaaagatgcacttgctgagcttgagaagatctgccacagttcaactacagcgcttcctttcagattgagaggtagattgctggagtattttgaccaaaaccaagtatcaattatttcttcttgctatgctgaagctttgagaagagatcctacatgtacctactcaatggagaggctaaccagactgcatagaaaaggctattataatacaatcgaactacttgaggcaatagctttacatctagattctgtcaatgggaaaccttgcatctgggaggagcttgtatcatgcttccttcggctcttttctgagtggactactgattacggggattgcatgtcatgtaacgtgcaaggagatgcaaccttcactgcttctagtaaattttcctgcgtcttttttgagcaaaatacaagagaaacatggaaggtccggtgcacatggtggatgaaccgccatttcagccaaagtatttgtacatcggaaaccctaacaggtgattgcaaactcctcgcttccaaggctgcttgtgcctgtcacttgtttggacccgagttcgagtacgtcgaagccgttgagggttatctttccgggcaaaaagctgatgacgagattgcattcttatctagaaatatgcagaactctgtaagactattacaaacgttggaggggctaacttcatgattcagtttgtataccctttttttttcctctattgccattgtatgccgtagttcatggatgttgttgtaagtatagttctggcacagttttgtaccggtgcctctcaaaatgaggctaatttttgtaggacgagaagggatgtatcaagtatagtgtaggggattagtactggcggtggtcagccatttgttatggatgtggtgaggaacaaggaaaagaatattgaacttaaatatattttatttttattgcttctct

SEQ ID NO: 24630 - DNA, 2705 bp, Oryza sativa
  ref <308>: DATABASE ACCESSION NUMBER: AK100072
  ref <309>: DATABASE ENTRY DATE: 2002-08-28
gaatacggtgacgcacatcatctgcacccatctgccaaatagcaaaatgagtaatctgagagcattcagtaagggacttccagtggtcaagccagcctgggtggtggattcccttgcagagaacagactcctcagctgcgtcccgtatcaaataagtcagcataattcttcaagccgaaagcagacgaagctttcttctttcttttctgggagacattatcagggggaactaaatgatcaaagcaattcccatgagctacaatcttcttctgttcaggagggatcacaagaccataacagtggttgtgaaaaggaagggtcactattgaaggaggaggcatcaaaggactcactatcctctgatgatcataaagcttcaatgtttgaagaacaagatagtgaagactttgttgatgaggctggtaatgcttatgaaacagcatgttcagagaggagggataatgacatggatggtaaacttcatgttgctgagtccccagatattaggtcaaggtgttcaaatttgtgcagtacaagctctacgggcagtcatttgtcattggattcgttggatagaaatgcaactaaatcttctagtcggacacattcaaccctcacagatccaaattttgtagagaactatttcaagtattctcgactgcatttcattgggacctggagaaatcgataccgcaagcgcttctcaaatttactaggtgataaaagcagtaaggggaaccgtgatcattcagggaagaataacacgatcattcatattgatatggactgcttttttgtatcagttgtcatcagaaataagccagagctgcatgacaaaccagtagcagtttgtcattctgacaatcctaagggaactgcggaaatatcatctgcaaactatcctgcacgaaattatgggataaaggctggcatgtttgttagagaagccaaggctcggtgcccccacctaatgattgttccgtatgacttcgatgcatatggggaggttgctgaccagttctatggtattttgcataaatattgcagtaaggttcaggctttgagttgtgatgaagctttcctggatatgaccgaatgcttacatgataatccagaggaagtaacacagaaaataaggaatgagatttttggtacaacaaagtgctctgctagtgcaggtatttctggaaacatgctcatagctcgtttagctaccagatctgcaaagccaaatggacagtgttttatttcctctgagaaggttgatggatatttaaatactctttctatcaaagcactcccaggcattggtcatactgtttcagataaactaaagagcaaagaagtggaatactgcggccagcttcgcaacattccaaaggaatctctccataaggattttggtaaaaaaattggtgacatgttatggaactattgcagaggaattgatcattcagttgttgaagctgttcaggaaacaaaatctgtcggtgctgaagtcaattggggagtcagatttaatgataacaaagatgctgagaattttcttgtcaacctcagcaaggaggtttgtctacgcttggaaggttgtggagtgcagggtcgtactattacccttaagttgaaaacaagaaggaaaggtgctggagagccaatcaagtttatgggatgtggtgactgtgaaactgttagtcgatctatgacgattgcaggtgcaactgacaatccagtcacccttcagagaatcgcaaaacagttattctcatcattctgtgttgatgtgaaggaagttcggggagtaggactaaaaatttcaaggcttgagcatgcagatttggctcggggagcaccacaagggaatatgcttgaatcttggcttgcttcaccatctgacaagctcaagaaacacagcaccgagaaagcttgcttgctcaaaaatcgtgatgatgcagcaactagcgagcggagaggttttggaagtatcagaccatcaggtataggagggacttctcgttcatcagaagtgaaccctccaagtgacaggtccactcgagttggtgttgagctgccaccattgtccgaacttgatttggaggtcctaaagaaccttcctccagagataatatatgagatgaatgacatgtacaagggagaattgcatggttttctggggataaccagtggtgacaaagccaaggaaagcaatacaaaatctcttgtttttccagcagttgatcagaatcttgtgcctgttcttgacacgaagctgcatggagatggaaagcacaaagactccatacattttaaaaaggaggcagatattaaggggccttcaggtgaacaactctctgaattaaaacaagccaatgctccacgttcaatagccagtgaattggttgatataccaactaaaagtgtcatacagcatgatttcatgccaaattctttaagccaggcagacgtcacagttcttcaggaattacctgaggatgtgaaggctgatttgtttaatgcgcttccattgcacagatcaggagatcctacatgcagcacttcacatgtttctgaaaacaaatttccccaggatggaagaagcgatgatccaaaacaacatccacagatttgtcacctgccagggaattcccaaaaatggattgaagagttcagagttagccattgcctgatactgaatgttattgcagagc

SEQ ID NO: 24631 - DNA, 3376 bp, Oryza sativa
  ref <308>: DATABASE ACCESSION NUMBER: AK100073
  ref <309>: DATABASE ENTRY DATE: 2002-08-28
gggcatatgcaagtcgtggatgtgaggccgctgaaaaaccagttttaagcccctgcaccctgaggcgtgagccagattagtacccaactcaaagttcacacttcacacaccacccagccaaacaaagcagaatttccatcatgtgcactctgggcaagcagaggggcagaggcagcgagggcctgatgtctgtcaacaaaacggtgaaactgaccatgcccgttctattggcattgttgctgttgtcctatggaactggaagcattcgttgcacgacgatcgctgggaacagcacggacgtgctctcgttgctcgatttcaaagccaccaccaacgatccaagaggagccttgagctcctggaacaccagcatccactactgttggtggagcggcgtcaagtgtaagccgaatacccgagggcgagtcacggctctgaaactcgcgggacaaggtttatcaggccaaatcacctcctttcttgggaacttaacggaccttcacacacttgacttgtccagcaataatttctctggccaaataccccctttaaccaatcttcagaagttgaaataccttcgtttgggccagaattctttggatggtataattccagattcactcacaaattgctccaatctattttatttagacctctctaataacatgctagagggcacaatccccccgaaaataggtttcttaaataatctctctgtattggccttccctttgaattttctcaccgggaacatcccctcaacccttggcaatcttacaaacttgaatataatgctcctcgcaaataataagattgacggaaacattcctcaagaactggggcaactgtcaaacttggggtggttgtccctaagtgaaaacaacctatcaggtggttttccgcagggattcttcaaaaatctatcttctcttcaaatattaagcattcagacgaccttgcttggtggcacattgccatttgacattggcaatacactccctaatctcacaaaacttttcttggctgataacatgtttgaaggtcatatcccagcttctttaggcaatgcatcattgctacgagggatagatctatccttaaataattctactggccatattcccaactcttttggacggctttcaggtttgtctacattaaaccttgagacaaacaagcttgaagctagggacaaccaaggttgggaattcttagaagcgctcagaggctgcaacaatttaaatgtgctctcactagctgacaacctgttatttggggacgtaccaaattcaattggtggcctatccatcaacctgacaattttattgttgggcggaaacaacctaacagggatagttcctctaagcattgggaaccttcaaggcttaatttcattggggctagataataatggtttcagtggtacgattgagtggattggaaaactgaaaaacttgcaatctttatgccttcgaaataacaatttcactgggcctattccatactccattggcaagcttacacagctgacagagctctatctgcgaaacaatgcatttgaaggtcacataccgccctccttgggaaaccctcaactactgttaaagctggatcttagctacaacaaacttcaaggtaccatacctctagagattagtaaccttagacaactcatctacctacaacttgcatcaaacaagcttaatggggaaatacctgatgcattggggatgtgccaaaacttagtaaccatccaaatggaccaaaactttctcagaggagacatgccaatttcttttggcaatctaaatagcctaaccatactaaatatatctcataacaacttatcaggcaccatcccagtagcactaggctatctacccctactaagcaagctggacctttcttacaacaacctccaaggagaagtaccaacagtgggagtattcagaaatgtgacatctgcttatctcgatggcaattcaagactttgtggaggagtgacagatctccatatgctctcatgccctcaagtttctaatagaataaaaagggattctgatataacaaagagggactacaatctggtcagattattagtaccgatatttggctttgtgtcactcacagtgctgatataccttacatgcctagcaaagaggacatcaagaagaacagacctattgttgctttcttttggaaagcagttccctagggtttcttacaaggatctagcccaagctacagggaaattctcagagtcaaacttaattggaagaggaagttacagttcagtatatagagcgaagttagctccgactaaactacaagttgctcttaaggtttttgaccttgaagtgagatgtgcagataaaagtttcttatcagaatgtgaggtcttgagaagcattcgacatagaaaccttcttcctgtcctaactgcatgttcaacgatagacaatagtggcaatgctttcaaagctctgatttatgaatacatgcctaatgggaatttgaatatgtggttgcataaacaatttgcaagtgttgcttcaaaatgtttgagtttagctcaaagagtgaatatagctgtggacattgctaatgcattgtcctatttacaccacgaatgtgaaaggtctattgtccattgtgatttgaagccaactaatattcttcttgatgatgatatgaatgcatatttgggagacttcggcatttcaaacctcgttattgagtctagagtcacctcacttggacattctagtccaaatagctcaattggattgaagggaactatagggtatatagctccagagtatgctcagtgtggccatgcatcaacatatggggatgtttatagttttggaatagtacttctagagatgctgacaggtaaaagaccaacagaccctatgtttgagaatgagctcaacattgtcaactttgtggagaagaacttcccagagcagataccacagataattgatgctcaactccaagaagaacgcaagagatttcaagcaacagccaagcaagaaaatggtttctatatatgcttgttgtctgtattgcaagtggctctttcttgcactcgtctgatcccaagagaacgaatgaacactagagaaatagctattaagttgcatgcaattaaaacttcctatgcagaagcgaccaagcgagaaagtacgctttgcaggagagagttagagtgtgtcatggaactagtgtaattgtgatgttttgtagttgtaggctttgaatgcgatgtggatgaactgccaaacaggccatcagcatacacagatacactggatgtgagaaactactcttctgtacagcaacatggctgtgtgcctgtggtggatggtgt

SEQ ID NO: 24632 - DNA, 1244 bp, Oryza sativa
  misc_feature (523)..(523): "n"=any one base of a, t, c, or g
  misc_feature (539)..(539): "n"=any one base of a, t, c, or g
  misc_feature (657)..(657): "n"=any one base of a, t, c, or g
  ref <308>: DATABASE ACCESSION NUMBER: AK100074
  ref <309>: DATABASE ENTRY DATE: 2002-08-28
ggtgctctctctctctctcttctcctcgccggcgagcgcgtctcgagatgcccgcggcggcggcggcggcggcgcgcggcccgctcctccatctccggcggaacccggcgccacgccttgccgccgcccgccgctccttctcctcttccgggatgcggtgcgtcagcgcggccgcgggcgcgggcggcggcgggagggagcggcggtcgtcgccggcgttcggcgggctgctgctcgacgccgggggcacgctgctgcagctggcgcggccagtcgcccagacgtacgcgtccctcggccggcgatacggtatgagcaagagtgaggagagcatcaaggagggattcaagcgggccttctccgcgccatggccaaagacgctcagataccagggagatggacggccgttctggaggattgtggtggcgaggcaaccgaatgcaccaataatgattatttcgaagaagtatatgagtattacgctcatggagatgcatggcgtctgcctgctggggcttacganacactgcgtgatctanaggatgctggagttaagctagctgttgtatctaacttcgacacacggttacgaaaattacttaaggaccttcatgtctcggatatgtttgatgccattgttgtatcatcggaggttgnacatgaaaaacctgctccagagatcttcaagagagcattagatcaaattggcgtagaggccagcaaggcagtacatgttggagatgatgaaactgcagacaaggcaggtgctaatgccatagggcttgagtgctggctgtggggacaggatgtgaggacattttctgagatacaagaccggattctaacaagatttccacaatgacatcatagaaacctcaccgcaggtatatattgctctgaccatgcatgcaaggatgatcaggatgaacgcttacatgagatgatacacatgtgtggtccccggcacagaagagctgatgagcattaatcaaactttgagatcttagggatgataaactgttgtcagttgtgacgaacaatttggctataaattgtggtctcatgccattattgatccccctgaaggttgttatgtttgtgtactgttgactcgatccaacgactaactttttttatctccatgacatttacatgtgtcaaaaccataggtggttaaatttgtatatatttacaaacttgtaaacgtcatttgacagcagggtaaacaggaagtagattttctt

SEQ ID NO: 24633 - DNA, 3079 bp, Oryza sativa
  ref <308>: DATABASE ACCESSION NUMBER: AK100075
  ref <309>: DATABASE ENTRY DATE: 2002-08-28
gaggattcaaattcgtttgcgagtctcttcgtttttacgtggcgcgccaaggctcaaacttctttgcacctctgttctgaacgcaaggtgtccgccatggcgcccgcgctcccccgccgcctcctcccctggctccggaccccaccttcctcctcctccgccgccgccttctcgtcggcgccctcccgaggctgcccgctccacgccgcgctcgcccgccgcggcgccccggcggccgcctccctcgccctgtacgcccgcatccgcgaggaggcatcgccgcccaccccgttcaccttctccctcctcctcgccgccctcgcgtcgtcgtcgtcgtcttccccgtccccttctccgtccgcaggctgcgcgcgcctcgccgccgcgtgcctcgcccacgctcaggcgttcaagtgcggcgcgctcgcgcaccccgtcgtcaccaactccctcctcaagctctactgctcgctgggcctcctcgaccgcgcgcgcagggtgctctactccggtggtgccgcgctggacgtcgtctcgtggaacacgatggtgtccgggtacggcaagggcggggacctgggcgctgcgcgggaggtgttcgccagaatgcccgagcggaacctggtttcctggagtgccatggtggacgcgtgcgtgcgtgccggggagtttggggaggctttatgggtgttcgatcggatgatgcgggaggaattcaggccagatgtggtggtgctggtgagcgtgctcaaggcatgcgcgcatctcggcgccgttgaaagggggcgttgggttcataggtatctggagacagggagttttggaggtaggcgtggaaatctcatgcttgagacagctcttgtggacatgtactgcaaatgtgggtgcatggaggatgcctggcaagttttcgatggagttcatcgtcgcgatgtggtgttgtggaatgcgatgatcggtgggcttgcgatgaatggctatggtgagcgtgctctcgaattattccgaaggatgcttcagaagggtttcatgccaaatgagtcgacgtttattgctgttttatgtgcatgcacccatacagggcgtgtggacgaagggaaaagggttttcaagtccatgcaggattatggcattaagccacaaagggagcactatggatgcttagctgatctccttggccgtgcagggaatgtagaagaagctgaagctctgttactggatatgccaatggagccacatgcttctcaatggggtgcactcatgtcatcatgccaaatgcacaatgacatcaatgtgggtgagcgtgtgggtaagcggcttattgagctagagccatatgatggtggccgttatgttgttctattcaacctatatgctgtcaatggtcgatgggaagaagcaaggaccattcggcagatgatggaggataggggagccaagaaagaaacaggtttgagcttcatagagttaaatggtttggtccatgaatttatttccggggatacaagacatcctctcacaaggaaaatctatgcactattggaagatatagagaggagattgcaactaattggctatgttaaggatacaagccaggtgattatggacatggatgatgaggaagataagggcatcgccctatcctaccacagcgagaggctggcattagcatttggtatcttaaacattccccagggcgttcctattcgtattgtcaagaaccttcgagtgtgccgtgattgccatgtgcattccaagcttgtgtccaagctctacgagcgggagatcattgtgcgtgaccgtcatcgtttccatgtgtttcgtgatggagtatgctcatgcaatgactattggtgaaaaagattttacattattgagtatgattggaatcatggacatcgtcaaaggatggccaaaatactggccaaggtatttatggtcgatatatcagtaaccaagattgtaggcatattaatcctcttttaaaatggtggatggaactatgatgaactttcgtgcaggtggtggtaactaatgaactctcaggtttgccaacgcctcttgggtggatctgtttgaaactgtaagagaacaagatcagtagatcactgttctttctggagtatcaggataatcagtgtaggcggaggccgtttcttgcagagctgattagtttcttttcaagcttgtttgcctgaactccaagggatagaaacgagtggacacgctcgccatcttggactgatcactgattgcgtgctgacggttgacattttccatcgacgatggaactcgcgcgctttcggtgtcaggggaatggcgggaaggcagacgatggaatccaagagatggaggaggagcttccagaacccctcgcttccacactgaagctctcccctttgctttgctttcctcactccatatgtgattccttccttttccacctccacccaaaaactttccacccactccacctcttcatcacacccactctctctttctttctaatggattactcgggcggcgggccggcgccggcgccggcgacggggagagcgcggatgcgggggcggtggtgctactgccgctgcttccggcggtggggccgctgcttctgctgctgctactgctgcaactccttcccccccatccaggacgacctccgcggccccgccaccgccgccacctgagccccacgccctacagagatttcgcccccaacacttcctaccacctaccgtaccagacacgttaatcatgtaatcaaatggtcgccatgaggactgcaccaacctttgttgctatataaactaggcaagactacctttctgttcagatgtgagggtatgctaatattcaggagttattttggacaattactggacaagagatgttcttggtagctgtttaaagtacttgcttgtaagtgtagtgaaaagtccatggacatattgctttacggtaaatctgtgaggatggatcaagtgatcatttccatggacagcagagtgtttcctgtaatatataacaactatacatatatgaaaattacttgtacataaagtgaattatatctgct

SEQ ID NO: 24634 - DNA, 3200 bp, Oryza sativa
  ref <308>: DATABASE ACCESSION NUMBER: AK100076
  ref <309>: DATABASE ENTRY DATE: 2002-08-28
ggcagatccaccgcccccacctctctcgcggtctcgccgtgccaaagccaaagccaaacccaacccaaccgcaaccgcccggaggcctcgcggactcagccagtccacgccatcggcggcgagtcagcggcggcggacgcgatggattcgaggccccccgagaccgacgcccccgccgaggcggtcccaccggcggcggcggcggcggcggcggcggcgggcgatgtggagatcaccaggccacgcaacgacaagcgcgggtaccgccgcgtcgtgctccccaacgacctcgagtgcctcctcgtcagcgaccccgacaccgacaaggcggcggcgtcgatgaacgtctcggtgggctacttctgcgatcccgaggggctcgaggggctcgcgcacttccttgagcatatgcttttctatgctagtgagaaatatcctatagaagacagttactccaagtatattacagagcatggtggttcaaccaatgccttcacaacttgtgaacatacaaacttcttttttgatgtgaaccatgattgcctcaatgatgctttggacaggtttgcacaattcttcataaagccattactgtcagccgatgcaactcttagggagataaaagctgttgactctgaaaatcagaaaaacttattatcagatccttggcgaatgaaccagcttcaaaaccatatttccttggagagccatccatatcacaagtttggcactggaaattgggacactttggaggttaaaccaaaggagaaaggattggacacaaggcttgagcttattaaattttatgattcacactactcagccaacttgatgcagcttgttgtgtatgggaaagagagtcttgacaatcttcaaactcttgttgaaaataagttttgtggtgtcaggaatactggaagggaacgattttcctttcctggtcatccgtgttcaagtgaacacctacaggtccttgttaaagcagttcccattaaacaaggccatactttgagaataccatggccaatcaccccaaatattcgacattacaaggaaggtccttgcaagtatgtgagtcatctaattggccatgaaggagaggggtctctgttttatgtcctaaaaaagttaggttgggctatgagtttggaagcaggggaaggtgattggagttatgagttttctttcttcagtgttgtcataaagctcactgatgtaggccacgagcacatggaggatattgttggactgttgttcagatacataacattacttcagacctctggcactctgaagtggatttttgatgagcttcaaactatttgtgagacaggattccactatcgagacaagggtcctcctatccattatgttgccaatatttcctcaaacatgcagatctatccgccggaagattggctgattgcatcgtccgtgccatcaaaattttccccagatgctattcagggtatattaaatgagttgactcctgataatgttaggatattctgggagtccaaaaaatttgaagggcaaacaaacttaacagagccgtggtatggtacatcatattctgtggaagcagttcctccatccattatacagaaatgggtagagaaagctcccgtggaagatttgcacatgccaaaacctaatatcttccttccaagtgatctttcattgaaaaatgccgaggagaaggcaagttttccttgtatgttgaggaaaacactgttttccagagtgtggtataaacctgatacaatgttcttcacacccaaggcctatatcaagatggatttccactgtccactgtcccgtagttctcctgaatcatcagttcttactgatgtattcacaaggttgctcatggattatttaaatgattatgcttatgatgctcaagttgctggtctttattacggtgttaggccaaatgacactggttttcagataaccatggttggctacaatgacaaaatgagaactcttttggagactgttattgggaaaattgctgagtttgaagttaaggctgaccgtttttctgtgataaaggaaactataacaaaggagtatgagaatttcaaatttcggcaaccatatcagcaagctttctactattgttcattgatattagaggagcaaacgtgggcatgggatgaagaacttgctgcagtatctcaaattgaagctagcgatctcgagaagtttttgcctcatctgctggggaaaacatttattgagagctactttgctgggaacatggaaccgggtgcggtaaaaggtgttatgcagcatgttgaagacatcttattcaatgcacctgtcagtctgtgcaaagcattaccctcatcacagcatcttacaaagcgaattgtaaagcttgaaaggggtttgaggtattattatccagcattatgcctaaatcaccaggatgaaaattcttgccttctgcattatattcagattcatcaggatgatctcaaaaaaaatgttatactccagttgcttgctcttgttgctaagcaaccagcttttcaccaattacgttcagttgagcaacttggctacataacactgcttagacaaaaaaatgattcaggtgtccgtggtttgcaatttataatccagtcaaccgtgaaggatccagccaacttggatgctagagttgaagctttccttacgatgtttgaaggaactctataccaaatgcctgatacagaattcaagagtaacgtgaacgctctcattgacatgaagttggagaaatacaagaatataagagaggaatcagctttcttctggggagagatttcggaaggaactctgaaatttgatcgaaaagaagtggaggttgctgcactgagggatcttaagaaagaggagttgatagagttcttcaacaatcatgtcaaagttaatgcaccacaaaagaagatactcagtattcaagtttacggcggtctccattcctcggagtacgaaaagatagtccacgatgagccacgaccaaattcctatcaaataacagatatattcaacttcaggaggtcgagacctttatatggttcatacaagggaggtgttggtcagatgaagctataagtcaacccttttgatattcttgcaaattccaaaagaataatccttttacgtgtaattttgatcattattaaagaaacttttttgtggacagg

SEQ ID NO: 24635 - DNA, 3436 bp, Oryza sativa
  ref <308>: DATABASE ACCESSION NUMBER: AK100077
  ref <309>: DATABASE ENTRY DATE: 2002-08-28
ggattgattccctttctcctccggagttgtcttctcctcagccgccgcctcgccctcctcttcctcttcctctcgactcgcagcttcgtcggcggcgatggcggcggcggcggcgctgtggcagccgcaggaggagggcctccgcgagatctgcaccctcctcgacgcgcacatctcccccaactccgaccaggctcgcatctggcagcagctccagcactacagccagttccctgacttcaacaactacttggttttcctcctcgcccgcggagagggaaaatcttttgaagccaggcaagctgctggacttctgctgaaaaacaacctccgagctactttcagctccatgcctcctgcttcccagcagtacgtaaagtctgagttgttgccatgtataggggcaaccaataaggcaatcagatccacagtcggaacagtcatcagtgtactctttcaaattgttcgagttgctggatggatcgagttgtttcaagctctacatcaatgcttggacagtaatgatctggatcatatggaaggtgctatggatgctatatacaagatctgtgaggatgttcctgaggagcttgatgttgatgttcctggtttgcctgaacggccaatcaatgtattcatgccaagattactgcagtttttccaatcaacacatgcaatccttagaaagctagctctgggctgtattaatcagtacatcgtggtcatgccagcagctttgtacatgtcgatggatcagtatcttcagggtttattcaaccttgcaaaggatccgtcagcagatgttcggaaactggtttgctcagcctgggttcagcttattgaagtaaggccatcaattttggagcctcatttgaaaaatgttaccgaattgatgctgcaagctaataaagattcagatgatgaagttgctctcgaggcttgtgaattctggtcggcatactgtgatgtcagcatgcctcctgaggggttgagagagttcttgccacgcttaatcccaacactcttatcaaacatgagctattctgatgatgacgaatcacttgctgatgctgaggaggacgaatcgtttccagacagggatcaggacttgaagccccggttccatgcctctcgactacatggatctgaaaccggagaagacgatgatgatgatgatgctgtaaatgtttggaatttgaggaaatgtagtgctgctggcctggatgtcctttctaatgttttcggtgatgacattcttcctactttaatgcctttgatacagcaaaatctggctcgaactgacgatgatgcgtggaaggagagggaagctgctgttttgtctattggtgctatagcggagggatgcattactgggctatatccccatcttccgcagattgttgcttttcttattccacttcttgacgataaatttcctcttatacggagtattacttgttggaccctctcccgatatagtaaattcattgtacagagcctagagcatcccaatggtcgtgaacaatttgataaaatcctcttaggtttattaaggagggttttggatactaacaaaagagtgcaggaggcggcgtgttcggcatttgcaacgcttgaagaggttatctacttgatctttgaaccatttctgtttgagattttctgtataattattatatattttcttctgttttcaggaggctgctgaagagttagtaccacacttgggaattattttgcagcaccttatgtgtgcctatggaaaataccagagacgaaaccttcgaatactctatgatgctctcggcactcttgctgatgctgttggagctgagcttaaccaggtgcaaaatatctagatatatttatgccaccactaatcacaaaatggcagcaacttgccaactctgataaagatttattcccactgctcgaatgctttacatctatcgctcaggccctgggaccaggattttcacagtttgctgagccagtatttcagagatgcatcaatcttatccaatctcagcacctggcaaaggttgatcctgctgcagctggtgcattatatgataaggaattcattgtgtgtgcattggatctgttgtcaggacttgcagaaggacttggcgctggtattgaaagcctggtttcacaaagcagtttgagagatattcttttgcaatgttgtatggatgaagcagcggatgttcgacagagtgctctcgccctcctgggggacctttctagggtttgccctatacatctgcatcccagccttcaagaattccttaatgttgctgcgaagcaactgaacccgcaatgtgtgaaggaggctgtgtcagtggctaacaacgcctgttgggcaattggagaattagcaatcaagattggcaaagaaatttcacctgtggttatcactgttgtttcttgcttggtgcctattttaaaatctcctgagggcttgaataagtcacttctcgaaaatagcgcaatcactcttgggaggctttgctgggtctgtccagacattgtggccccccacatggaccatttcatgcaagcctggtgcaatgccttgtgcatgatacgagatgattttgagaaagaggatgcattccatggtctatgtgcaatggtagcagcaaacccaactggagctgtgggttcactaacttttatctgccaggcctgtgcaagttggaacgagataaagagtgaaggtttacacaatgaagtgtgccagattttgaatggatacaagcagatgctcggaagtgggggttgggaacagtgcatgtccaccctagagccagcggtcgttcagagattaggcagatacggagtatgaggataccgacggaatttgttttggttgtctattctttactatacgttgggacggaagcaaagagaagaaagggaactcatcgtgcagcgccagtgtgtgatttttatgatgtgatggattctggccggttagttttgtatgctccactgctagtgatatattggttcgcacaggactgctgtctgagagcatcatgtgcgttgtcctcagcacaagtgagtggtaagaaagaattaccacgacagacagaatgaaggctagtaccttcccttttggtttattgagtcgattgggtcgaagagctgtgcttgattgtaggttctattgtactggtcagttcagtggactcggttctgtttttttgtcactccactggcactggcactggcaccccagcagcaacatagagttgttggaaaggttttgtagcgtgtattttatgggtccaagagtttaggtgtagggtcttctctcttttattttattttttttccttttgtgctcgacagggttgtattgattcattccccaataaaaaaaaagtattgaacaaacattgagactgaaacaaaaggaagattgagc

SEQ ID NO: 24636 - DNA, 2129 bp, Oryza sativa
  ref <308>: DATABASE ACCESSION NUMBER: AK100078
  ref <309>: DATABASE ENTRY DATE: 2002-08-28
gtttttctctctcaactgcttcacactgttgctctcttccctctctgcacctgcaaccaccaccacaaccatataccagtaccatcgaggaggttgccttctcttccggtcggaagcttgctttccttttcttcttcttcttttcagatccaaggttaatttcagccgacacacacaggaattgaacctgtgctcttcccaggtttctgtctgtctgcaaagttggccgctttctgcagattcatttcctttgccacgttttctgctgcaaaagttggatctttgcaagggggactggctgatttcatttgaggtttctgaataagttggggagcttgatttggagagggttacttttttgggggtgatgtttcgatttgcaaatcagaacaagattacttaagtgctgctaagctcaattggaagtggaagatcttggtcacgcggcatcaggtgaaagtttggtcgctgtgcatttttcacaagggatgtctttccgcagcatagtccgtgatgttagggacagcttcgggagcttatcaagacggagtttcgaggtgagaatttcaggcctccctggtctttctggccatcacagagggaagtcccttggatctttgagcgagctgcgtgacagacctgtagtagtagatcaaagcagatgggttggtcttcctcctgaattactccgtgatgtgatgaaaagactggaggaaggagagagcaattggccgtcccgcaaagatgttgttgcctgtgcagcagtctgccgaacatggagagagatatgtaaggatatagtgcaaagcccggaaatctgtggaaagctcacttttcctgtgtctctaaaacagcctgggcctcgagatggtttaatccagtgttttatcaaaagggacaaatcaaaattaacttattatctctacctgtgtcttagccctgctgtgctcagcgagaatggaaaattccttcttgcagctaagaggaatcgtcgggcaacttctacggaatacataatttctgtggattctaaaaacatctcacggtcaagtaatggttatgttggaaaaatgaggtcaaattttcttggcaccaaattcgttgtctacgatacacagcccccgtacaatgctgggagcctcatgtcatgtcagcatggcagccggcgaatctcttctaggagggtttccccaaagttacccaccggtagctacccaattgctcatgtgaaatatgagttgaacgttcttggcactagggggccgaggcgtatgcaatgcaccatgcattcgatcccagcctcagcagttgatcctgaaggtgtggtgcctggtcagccagagcagcttctcccaggtccattcgaggagtcgtttcgcagcacaaacacctcctccaggttctctttcatggacagatctctggacttcagcagctcccgcttctcggaaatcagtggatcagcgaaccaacagggcgaggatgatatacctgaggctaaggagaggcctttggttctacgaaacaaagtgccaagatggcatgagcagctgcaatgttggtgcctcaacttccgtggccgggtaactgtggcttctgtcaagaatttccagctgatagctgctgcgtcctctgaatcttcacagttggagcagcagcagcagcagcagcagcagcaaaaccatgcttcgagttcttcttcggcatccgatcatggcaaggtgatcctgcagtttggtaaggttggcaaggacatgttcaccatggactaccggtaccctctctcagcattccaggctttcgccatctgtttgaccagcttcgacaccaagctggcttgtgaataacatacatcagtactataagtgtgtttgtatagcgtgtcagtgtgtgtggatagtataaacatcagtcagtctcgttgtgtgcagatgcaggtgcagtttgttgttgctgttggtttagttgtctgttcttcttgtgtggcagatgtgaacaaagaatggcaacacatctcaagtgcagttgtttgctgctactacatttatatcatgtaagtatttggaggttggaagtggaacaaccccaggctcctctagtttctcgagagggtgtgcatcttacttgcg

SEQ ID NO: 24637 - DNA, 2495 bp, Oryza sativa
  ref <308>: DATABASE ACCESSION NUMBER: AK100079
  ref <309>: DATABASE ENTRY DATE: 2002-08-28
tgggcattcgaggaggctagcctctctctcctccccgacctcacaagcgcgaaccccgcggagccgccacctctctcgcctccccgcctccgccgcgccgcctagggtttccaccgcccccgggatgcgcgcgccccctcgccggtagcctcccccccggttcccgccgcctccgccgccgccatgtcgctgctgcggcgccggaagcagccgcagccgccgccggagcagccgaacgaggacagcagcaacggctccgacctcgacgagaaggggaagaagaagccgggatcgtcgtcctcctcggcggcgcctcctccggaggcggcggcggcggcggcgaaggaggcgacgaagcggacgagggccaggtggtcgtgcgtggacagctgctgctggctggtggggtgcgtgtgctcggcgtggtggctactgctcttcctgtacaacgcgatgccggcgtcgttcccgcagtacgtcacggaggcgatcacggggccgctcccggaccctcccggggtcaagctgcagaaggaggggctgcgggcgaagcaccccgtcgtgttcgtcccgggcatcgtcaccggcggcctcgagctctgggaggggcaccagtgcgccgaggggctcttccgcaagcgcctctggggcggcacgttcggcgacgtgtacaagaggcctttatgctgggttgaacatatgtcactggacaatgaaactggattagataaaccaggaataagagttcggccagtcacaggcctagtggcagcagactattttgttcctgggtattttgtttgggctgttttgattgcaaatttagctcgtattggatatgaagaaaagaccatgtacatggctgcatatgattggaggttatctttccagaacactgaggttcgtgatcaaactttgagcaggataaaaagtaacattgaactcctggtagcaactaatggtggaaatagggtggtggtgatcccacattctatgggggttctctattttctgcattttatgaagtgggttgaggctcctcctcccatgggtggtggtggtggtccaaattggtgtgcaaagcacatcaaatctgtaatgaatattggcggacctttcttaggagttcctaaggctgttgcaggacttttctcatctgaagccaaagatgttgctgttgctagagccattgcaccagaagtcctagactctgacttccttggacttcagaccttacgccatttgatgcgtatgacccgcacatgggattcaacaatgtcaatgattcctaagggcggtgacaccatttggggagatttggattggtctccagaagatggttttgagtgtaaagctaagaatcagaaaatcaatgattctgaggtttctaaggatgctaacgggaagaatgaggttcatccagaacctgttaagtatggaagaattgtctctttcggtaaagatgtagcagaggctccatcttcagaaattgagcagatagaatttcgtgatgctgtcaaaggcaataatattgcccactcaaatacatcatgccgggatatatggacagagtatcatgaattaggatggggcggaataaaggcagttgcagactacaaggtttacactgctggctccattatagatcttcttcgttttgttgctccaaggatgatgcagcgtggaagtgttcacttttcgtatgggattgctgacaacttggatgatccaaagtacggccactacaaatactggtcaaatcccttggaaacaaaattaccaaatgcacctgaaatggaaatattttcaatgtatggagttggcattccgacggagagagcatatgtctataaattagccccacaagcagagtgctatataccttttcagatagacgcttcagctgagggtggggatgagaatagctgtctgaaaggcggcgtttacctgtctaatggtgatgagaccgtaccagttcttagtgcaggatatatgtgcgcaaaaggctggcgaggaaaaacacgcttcaacccttctggcagcaagacctacgtcagagaatacagccattctccaccctcaaatctcctcgaaggcaggggcacccagagtggtgcgcacgttgatatcatggggaattttgctttaatcgaggatattatcaggattgctgctggggcaactggtgaagagcttggcggtgaccaggtttattccgatatattcaaatggtctgataagattaaattgaaactataaaactttaaaaaagcatggtagttttgtaggagaattatttgtttcctggccaaaattttatgagttttgattcgatattgtaatatgattttttttacctttcccttaagctcttaattcagtagaggctgacttgatttgtattattttgtgatttgagcggcattgtatattaaaatgtacagatgtattcatgggaattgtgttacgatttgaagttgagtactccccacatt

SEQ ID NO: 24638 - DNA, 1204 bp, Oryza sativa
  ref <308>: DATABASE ACCESSION NUMBER: AK100080
  ref <309>: DATABASE ENTRY DATE: 2002-08-28
gatataatctcctccgccgccgcacctcgcagagagagagacgccgccgccgtcgccgccgccggcgaccggagagaaagagagagaagagcaacgcccacggcttcgccgccgctgccggcgaccatgtcggtggagacggagcggagctcgacggagtcatcggcggcgtccgggctcgacttcgaggacaccgccctcaccctccgcctcccgggctcctcctcctcctcctcctcctcctcgtcatcctcctcctcctcgtcgccgtcggagcccgaccgcaagcgcgcctccgccaccgacgacgaccccgacaaccgcctcggctccaccgccaccgagtcccccccttcccccaaggcgcgggtggtcgggtggccgccggtgcgcgcgttccggaagaacgcgctcgcggcgttggcggcggcgtcctccagcaaggccaagttcgtgaaggtggccgtcgacggcgcgccgtacctgcgcaaggtggacctcgaggcgtaccggggctacgaccagctgctcgccgccctccaggacaagttcttctcccacttcaccatccgcaagctcgggaacgaggagatgaagctcgtcgacgcggtgagcggcaacgagtacgtgccgacgtacgaggacaaggacggcgactggatgctcgtcggagacgtcccctggaaaatgtttgtggagacctgccaacgtcttcgtctcatgaaaagctctgaagcagtcaatttagcaccaagatctgcttgatgagtcgcaaatctctgctcctgtctttgagaagcatgagaggaagccatctttgcttgctgaggtttttccatgtctgtgagagaaatgtgtacagtcatcgacttcgacttttggttccatcgtgctattgagtttcagaaaagaaatggtttttagcttgtagctttgttaccagtcagtagtctctccatatagatgagcgaagcggtgatgctttaaaatacacccatagattgttttctcgataaataaaattggtctcactcactgagcccctgttcttcgacatgctttctaccactagtttgttcgataatgtgatgtgcatgtgaggcctgtgatggtgcaagaatcatataacttgtcatgttaataactattttgttgtaagattatgtttactgcatggtgttataagctatttaaagtttactcc

SEQ ID NO: 24639 - DNA, 2328 bp, Oryza sativa
  ref <308>: DATABASE ACCESSION NUMBER: AK100081
  ref <309>: DATABASE ENTRY DATE: 2002-08-28
ggcccgctgccgcacacaactccgccgacgccgacacgacgtcctctctcctttcgcctcctcatcctcctgcttccgaaatcctcaactcagattcggagctactgccgccgccgcctcccccgttgttgttccaagcgcccccacaaaacccccggccgtggcggcggccgcggcagcgacgggcttcggcggcggcacgcggtgcatgaggaggagaagaaggggaaggcacgactgcggtgtcgcgatccggagcaggagccgatggggaaagtgcggctgacccgcgcctgagcgatagagattgagagatccagggttcgtgagcgagtgtgaaaaagaaaggttatactgaagacttcagctggtggcgccaccaagatgcagaccagcaattttcgtaagaagaatgcagcagaggtggatttcttcatggggtatggtgatgttaatcgatacgaagttctggaggtcataggaaaaggaagttatggacttgtatgttctgcaaatgatatacatactggagaaaaggttgcaataaagaagatacacaacatttttgaacatatatcagatgctgcacgcatactccgtgaaatcaagcttctcaggctgcttaggcatcctgacatagtggaaataaagcatattatgctacccccatccaagatggatttcagggacatatatgttgtctttgagcttatggaatcagatcttcatcaggtcataaaggctaatgatgatttgacaagagagcactatcaatttttcctgtatcagatgctccgtgctttgaaatatatccatacagcaaatgtttatcacagagatctgaagccaaaaaacatacttgctaatgcaaattgcaaactcaaaatatgtgattttggcttggcaagagttgcattcactgatgctcccactacagtcttctggaccgattatgttgcaacgagatggtatagagcacctgaactgtgtggttcattttattccaagtacacaccagctattgatatatggagtatagggtgcatttttgctgaggtgttgattggaaagccactatttcctggtaaaaatgttgttcaccagttggatttgataactgatcttctgggaacaccctccttagatgctatttctcaggtgcggaatgacaaggcaagaaaatatctgacatgcatgcggaagaagcagcctgcatcattttcacataaatttctgaaggctgatccattagcattacaattgcttaggaagcttctagcttttgatccaaaggaccgtccatctgctcaagaggcactggcagatccgtacttcaatggattagcaaaggtagagcgagaaccatcttgtcagccaattccaaagatggaatttgaatttgagcgtcggagagcaacaaaggaggatatcaaggaacttatttttcaagaaatattggagtaccatcctcaattattgaaagaacacatcagtggaacagaaaggccaaattttcatcatttaagtgtggttgaccaattcagaaagcaatttactcaagttgaggaaaatctgaatggaagtggggctgctgtttcgctacagaggaaacattcttctttgccaaggtcaacaatagtgcactctgctgcaattcctgcaaaggattataaacatgtggcctcatctagtacaaagcttgcagtagatggatcttggaatgcacagattcagggagtacatgcaaatatagctggcgagccttcaactatcgttagacctgcagtgtcctcggaaagaagcttagcgcctacacttcaatggcaaccaaatatgacgcattttctgaatcatgcattgtgttaccagaacacagtatttagcgggtcacttcttgatgcaacaggcccagcccaagccattcctcgaactactccatatgtagactacaggtccgggaacttggacctctatcagcatcatgtttctagagaggatgtacaaagtgacacagccactgcacaagcacacgctgcttctcatggcccggttccagctgtgtcttacagtcttccagggacgtatagaatcacctagacctatcagtcgttcaatcatggaggtcttcctttttctttttttttcacccatcataaactgattgattaccaacatgcaataaaaaaggcagaggaactagatatgcatgttcttttctttctgggacttagacatgccattatgctttgccagttcggaatcaaaagccttcaaatgtatgcagtttcctagttactgccttacttgttgcagtgctcagggtgttct

SEQ ID NO: 24640 - DNA, 3293 bp, Oryza sativa
  ref <308>: DATABASE ACCESSION NUMBER: AK100082
  ref <309>: DATABASE ENTRY DATE: 2002-08-28
gggagtccgcgatggctgcttgcctcaccgagtgaacgcacgcgctcgccggcggcgaccaagaaaccacgcgaagacatggcattcccgagcggcaaagcctactacctccacctcctcctgctcgcgatcctgccaagcctcgtcgcgcggcgcggcgcggcgcagcagggcggcgtcgacgagaagcagctcctgctccaggtcaagcgcgcgtggggggaccccgcggcgctcgcgtcgtggacggacgcggcgccgcactgccgctgggtgtacgtgtcctgcgacggcggcggcaccggccgcgtcacgtcgctgtccctccccaacgtcgcggtcgccggcgccgtccccgacgccatcggcgggctgacggcgctcacggtgctcaacctccagaacaccagcgtcggcggcgtgttcccggcgttcctctacaacctcaccgcgatcacctccatcgacctctcgatgaacagtatcggcggcgagctccccgccgacattgaccggctcggcaagaacctgacctacctcgccttgaacaacaacaacttcaccggcgtgataccggcggcggtgtcgaagctcaagaacctgaaggtgtttaccctcaactgcaaccagctcaccggcacgatcccggcggcgctcggcgagctcactagcctcgagacgctcaagctcgaggtgaatcagttcacccccggcgagctgccgggatcgttcaagaacttgacgagcctgaagacggtctggctggcgcagtgcaacctcaccggcgatttccccagctacgtcacagagatgatggagatggagtatctcgacctgtcccagaattcattcaccggaagcatacctcctgggatttggaacattccaaagctgcagtacttgttcctgtacaccaaccagctcaccggcgacgtcgtcgtcaatggcaagattggagcagcgagcttaatttatctcgacatatctgagaaccagctgactggaacgatcccagagagctttggaagtttgatgaacctaactaacttagccttgatgacgaacaacttctccggcgagataccggcgagccttgctcagcttccatcgctggtgataatgaagctgttcgagaacaatctcaccggtcagattccggcggagctcgggaagcactcgccatttctgagagacatcgaggtcgacaacaacgacctcaccgggccaataccggagggggtctgcgacaaccgccggttgtggatcatctccgccgccggcaaccggttgaacggctcaattccggcgagtcttgccacttgcccggcgctgctgagtctccagctccaggacaacgagctttccggcgaggtgccggcggcgctgtggacggagacgaggctgatcaccgtgctcctgcagaacaatggacacctcaccggaagcctgccggagaagctgtattggaatctgacgaggctttacatccacaacaaccgtttcagtggccggcttccggcgacggccaccaagctccagaagttcaacgccgagaacaacttgttctccggcgagatacctgacgggttcgccgccgggatgccattgctgcaggagctggacctgtcaaggaatcagctctccggggccatcccggtgagcatcgcgtcgctcagtggcttgtcgcagatgaacttcagcaggaaccagttcaccggcgatattccggcgggattgggctccatgccggtgctcaccctgctcgacctttcgtcgaacaagctctccggcggtattccgacgtcgctgggatcgctgaagattaaccagcttaacctgtcgtcaaatcagctcaccggcgagatcccggccgcgctcgccatctccgcctacgaccagagcttcctcggcaaccccggtctcctcgccgccggcgcggccctcgtcgtcttgatcggggcgctcgccttcttcgtcgtccgcgacatcaagaggcggaagcggctcgcgcggacagagccggcatggaagatgaccccattccagcccctcgacttcagcgaggcctcccttgtgcgcgggctcgccgacgagaacctcatcggcaagggcggcgcggggcgcgtgtaccgcgtcgcgtacgccagccggagcagcggcggcgccggcggcaccgtcgccgtgaagcgcatatggaccggcggcaagctggacaagaacctggagcgcgagttcgattcggaggtggacatcctcggccatgtccgccacaccaacatcgtgaagctcctctgctgcctctcccgcgcggagacgaagctcctcgtgtacgagtacatggagaacggcagcctcgacaagtggctccacgggaacaaattgctggccggtggcgcgacggcgagggcgccgtcggtccggcgagcgccgctggactggctggcgagggtcagggtggccgtcggcgcggcgaggggcctctgctacatgcaccacgagtgctcgccgccgatcgtgcaccgggacatcaagtccagcaacatcctgctcgacgctgagctcatggccaaggtcgccgacttcgggctcgcccggatgctggtccaggccgggacgccggacaccatgaccgccgtcgccggatcgttcggctacatggctcccgagtgcgcgtacacgaggaaggtgaacgagaaggtcgacgtgtacagcttcggggtggtgctcctcgagctgatcaccggcagggaagcccacgacggcggcgagcacggctcgctggcggagtgggcgtggcggcacctgcaatcgggcaggagcatcgccgacgcggtggacaggtgcatcaccgactccgggtacggcgacgacgccgaggtcgtgttcaagctcggcatcatctgcaccggcgcgcagccggcgacgaggccgacaatgagggacgttctgcagattctggtgaggtgcgagcaggcgctccagaacaccgtggacgggaaggtggcggagtacgacggcgacggcgcgccgtttctgccgatcaggggtggcagccgccggaagcagctttcggacaccaaaggcatcgacgacggcaacggcagcttggacagcatagtatgagaacaatggtcaataagaagtataacctgatccaatggttaccatctaggagagatggcacgctagttaggagagcaggtagataccagacaaatacattcgccatccttcagttatttgcatgtaatgagtattgtaactttgtaaatgcatctataaaattttgggac

SEQ ID NO: 24641 - DNA, 2382 bp, Oryza sativa
  ref <308>: DATABASE ACCESSION NUMBER: AK100083
  ref <309>: DATABASE ENTRY DATE: 2002-08-28
ggtaggcaaaccgaaaccccccgaatccaaatccgccaatctctcgccgcggacgccgtcctatggccagcaaacgagttggccccggtcagccggtgcccgatgccggcggcggaggcgacaaatcggtgctgaaacgatgcatcattgggttctacacaagggcgattgagcgcctcccggtggaagagaagccggcgctgctggccgccatcctcgacggcggtttgtgcttcggccccctggatcccgtctccaacatcgtcgccaacgccatctggcacctcagcaccggtgaggattctagcgaacatgtggaggaggttgagatgcggcagtgcttgaagacgatggcgcgggggtctctcaaagccctcgtggggttcatgacctcctacttccgctatctgcccactatggaggcgatgcacttcctgcgcgccgccgagggggacctcctcgccgccgtccacctcgtggaggcagaacgttgcacgagcgcgttcgacatcggctcctgcaccaccaagaccgccctccggtgcgccgcaggggcctcgggtcaccccgacccggacagattggccacggcgatgctctcgctctcttccaaagcccacaagatcgcccatctcttgtctaggaagggtcgtctcacctgctcagacgtggaccacctcagctaccttctcctagaagaaggaaccaatgaccaaatttgtactcaacaactgatggctcttgtgcctccaaggttgccacccgagctcgccgacgctgccgccaccttctccccactcgccccgcaaggtgtcaccgtcaaggacgagagaacactcgaacgatgcaccaagtctctgcaatgcgtgctcgtcgacaaaatccacggcttctacctcgaggcactcgctctcctacctcaacaccttctccgcggccgttaccaccgcagcgttgtcatggccggccactgctacggcccactcgaccccgtctccaacatcatcctcaacaccatctggtacgacgccgcgttcccggtccccaaggagcagcacctagacttggacatgattggcaggtgggcgctggtccgtgctgagcgctattccgttgctggcctcgtcgctggcctcattgcctttgccggggactacaacctctctgaactccaagccatcaggtgcctcctctacgccaacggggactttgccactgccatgagcgtactgcagcaagcactcctgaaccaagaacgtacaatgctgtctgactccgagctgtgccgcttcatggatgttatggctaagcgcttgcagctgtacagcgtgatggccattgctgctcagcacccgagcgctgatggactacaagagttcctcatatctgagcgcactcgtgctatgctgccgatggagtatcgcagattctcccgagaggatgtgcattccgtcatcgagtcactgttacatgaaccaccaccgtcacttgggatgccaccggagctggtacgtttgagcctggcggcagaacggaccattgaccagttccctgatgctaccaagcgcttctgggctgacatgagctctttccacagcaaggcgaaggccgcattggaaagctatgttctggagaacgggggccctcagtatgtgatccatgtcatctgtggtgcgaacgaaagtgtcgcggaccgcaatggtccagagcttagcaggattaactggccaagatcgcacaacaaatttcactattcccacattaacttcttggcgagccctactgggccaagtgctgtgggtgtgttgccaacccttttctttgcagagtgcgtaaatcacaatgaagaaagcgaccgtgccaggaagaacaattgctaccctgttgtcgtgccaccaacaaatgctgagaaggtccggtgcttctactgtgagtataaaggcattaatatcattcacccggctgatgggaactaccatgggtgcgacacagacttcgagaagatggcacgccggaagcacgttttgaccaatagcatcgagagcgtcttcaacaatggcctcttggtctctaatttcaggggtgcggtgcaagaagatttcttctactttgaccatgccagggaccatgccaaggggccatcatcttgttcagatggttaaaaattcatcacaacatcagacgtggtcgcgtcctagttgctagtttaatctgtttgttgtttatgattaatgatgatgcttgcgcaactgagtagcccaaattagcaggcagcgactaattaactttgactcttatttatggtcactggtgtaggtctgatggcagcattttaagtttgtgttgatactgaaatattggatgtgtttttctaaatgtcgc

SEQ ID NO: 24642 - DNA, 2834 bp, Oryza sativa
  ref <308>: DATABASE ACCESSION NUMBER: AK100084
  ref <309>: DATABASE ENTRY DATE: 2002-08-28
gatcgatgaatagaacttgtggctgctgcctcttcttcctcctcctcctccggatttctttcccactcctgctgttcttccaatctcaaactctgcttctctaataccagtcccttgcttccctttctagtcttcactcctatattccttgcaattgtatcccaattacttgagtgatttctactgtggatcgttggttccttcctgtgttgatattgatctgtgaatgagttgacggatcgtgacaatatggtatcaaagcagtcgattcgtggggtttcttgtgtggagatgaagtgggagagcgctggtggtcagaggaacagccaacaacttggtggtggtgtctttggaggagatgcccaccacctgttcgatgaaatgtcgagctgtccaagagctgactcagctgctgtccttcgcgtcactgtgagccagatcatatatccagtgacatctgaggtgttgcatcaagtgtacgatacctatggagcagtggcggtgcaggttcttgcggtgagcacatggcaagtcaaggctcttgtgtcgttcatgtccagccatgacgcggagagggctcggtctgccacccacggtcgcgacatctacgacgggggttgcttactggatgtgcagcacgtccagatgttccctggagatggcgccaccgccacgcacaccacctgttcgacgatggtaccaagtagcgccaccgcaaggccagtggccaagagtactgctgctgcaccagaacgcgtgttccctgctactacagcttcatctgtaccctcaattacatcagcagccatggtgacatcggttcctttcaacgagaccaagaaggctgagactgacatggacaaggtggtggagaacttagacaagaccattcaagacctgtgcaccaagatcgatcggatgctagagaggcatttcgcgacaccaaggtcagtacagaggccggctcaactaaccttgttgacacagccaagcttggcatgggaacaaccatcgagtgttcaatgaagtgtgagaaccagttggctgatgatgatgatggcaaagacatggccaaggaggagtggatggagctcatggaagtggataccatgttcaccgctatgtatttatgcttcagagatccatttttaatcatcaatgcaattcctcccaggaactggagttggtgcttgagccgtgcctactttggagttgtaggcctctctttcgtttcatcgaaattggaagtactctatggttgctttgaccggagcttagaatacacagctagccctccaccggtaccaccttggagagcagcaattccatggaacaaagctgagatgacctcaggttctcggcctttaccatggcctgatccacagctttgtcaaggcagcggaggcgtggtggtaaagctcttacaactctagccgccacctattcaaacaaatgttaaagctgaaattgaaacactgaatttatatggtgagtctcatcaagtctccttgaactacagtgttgcccagttcatgagtagaacaattaattccactgagggcttgctgcaaaatctgatggttggatggtgtatttggcatgagatatgtctctctggtgcctttaggaaggcctatcagcacacacatcattcaacctatggttgggcatatggggatcatgaattgttcttgctgctgatgctgatttcccagttgtcacctgatgcatggtgtgattgcttattcagttgtgataatgctgatggtatttgtacttgcaagtcacccgagagaagtaccaactgccatgctcggtgctgcagtgttccaactccatttcaggttcagagcaaaaacaatggcgtaataggtgatacttcatggactcaattcagatcaaacaatggtgatgctgtgctgttggtgccacaaccatggccacagccgattctcttcccagttcatattatggttgagctagaggtttcgttgaagggaattattgtctcaacaaaaaagttggtcaacttgcaatctttggctcctccttcgctttggagaaatgaggtattcaatttgtgtgcaacaggagggcaagggctaaatttttcctggaaatgtatatatgaagagctacagcagttgcaatgtacctttgagtttactctttggaatcaacatggacagacatataagctattgttacaaaaggagcagctgaaacttggtgcagtctatctcagtttggaagtaaaatcttcagagacatgcttcacttgccggacttacgaggaggacatgttcttacaaatcacaaattttgtaggtcacaactatgaggggagtaacacttgttctacccatcaattcagtcatggttggcctaaatatttggtaagagctaaattcgttcaattccaaagaggcaagattctttaggagcaagtgcaactggcatatagcaggccaaacgggcggcccggcccagcacgacacggcacgccgacggcacggcccactagggcacggcccgttaggcacggctcctgtagcgggccgtgccgtgccggcccacgtgccaaggccacggcccaagcacggcccaagaaggtgctgggccgtgccgggccggcacggctactgtagtggcacgtgggctggtagccggcccactagtacatgtggcccataaaaattgaaatttgagggaaaaaaaagaaaaaaggcagaaaaaacataatataaaggaaaaaatgataaatataggataaatgtgaggaaaatttaggaaatatatcataaaatatatggtacaaataggataaaatgtgg

SEQ ID NO: 24643 - DNA, 1188 bp, Oryza sativa
  ref <308>: DATABASE ACCESSION NUMBER: AK100085
  ref <309>: DATABASE ENTRY DATE: 2002-08-28
gactcgcgagctcccggcggcgaagcagtggtggtgtagtgtcgaggcctcgaggcgaaccttctagaagtttccgggcgggcgcgctgccgtccaacgaggccgccgcggtggcgccgcccgcgacgcagccgtcgcagggactgtcccgccgcagcagggccggccccggggagcggcagcagccgggggaggcggccagcctcgccgtggccctcgcgcgggagcggatcaggcgcagcggcgaggcggagggggaggaggaggggcccgtgccgttctggcagaggacttggttcctcgcgctgctgctggcgatggccgccgcgtcgttcgcgatcgcgctgctgctctacctcggcctcgacctccccgaggcgtcgccggcgcagtcctacgccgccgacccggacaacgtcgtcgagattacctacggatcggcgatcaaattgatgcatgagaggaccaaatttcggttgcattcccacgatgtgccctatggatctggaagcggtcagcaatcggtcaccagtttccccaacgtggacgactccaatagctactggatagtgagaccgcaaccagatacttcagcaaaacaaggtgatcccataacacatgggacagttgtaaggctccaacatatgaggactcgaaagtggctacacagccacatgcatgcttctcccattacgggaaatttagaggttagttgctttggcggtgaaaatgaatcagacactggagactactggaggctcgagattgagggcagtgggaagtcttggcggcaaaaccagaaaatccggttgcgccatgttgatactggtggttatctgcatagccatgataggaagtacacccgcattgctggtggacagcaagaggtatgtggtgttggcgacaaacgtcctggcaatgtctggcttgcagctgaaggagtctacctcccggtgaaccagcaaaaatagctgtattgcagggcagcagggatgagaggtgacatgatgaacccattagtatggtgcttgtacgattcaaaagtattaaaacgttgtaaccattagaataccagttcagttcattttgagctattagagcaacttttgttgtgtaagaatggtttagctgaagattgccacttattcccggtctcccggtgtacaaagaaggattatctctctggcg

SEQ ID NO: 24644 - DNA, 1922 bp, Oryza sativa
  ref <308>: DATABASE ACCESSION NUMBER: AK100086
  ref <309>: DATABASE ENTRY DATE: 2002-08-28
gaacttcgaggcgagaagcgcgagatcccaaaaaaaaaaaaagaaaaaatagaaaaaaaaaaacaagcgaggaacaggagaagcgccgcggcagctagctgccacgtggacctcgccgccggcgtcgccgccgccgccgcgcgtggatgcccccgcggagcccgcgcccatggcgtccgtttcgtcgtccccgtcgtactcgtcgcaggccgccgtcctcctcctcctccaccagccgccgcaccagcacgggcacggcggcgcgtgcctccggtaccgcggctcgcagtcgcaggggagggggaatgccgtagctacgtcgctggggctctccgcggcagggcggggcggagcggggggcctcctcctgctgccgccgctgcccgcgctgcgggcggcggaggggaaggatgggcgggccgtgaccaaggatgaggaggaggaggcggcggcggcggcggtggaggaggagggggaggtggaggtgaggagggaggaggacaagccaggggacgatgggtcaagggaggccgcagcgaggggatcggggtcggggcgattctccgccgactacatctcgctcggcatcagggagcccgtctacgaggtgatagaagtaaaatctaatgggaggatgtctaccaaaaaaataagccggaggcagctattgaaatcaagtggcctccgcctacgagataccagaagcgttgacccatcgctatggctaatgaattcaatgccatccttgctggtccgtgaacaagccatattagtaaatcttggttccttgcgagcaattgctatgcatgaacgcgttcttatattcaattacaacagcccaggaggaaaggccttcttagattcattactgccacggttaaatccaagaaatatcaatggtggaccagcaatgccatttcaacttgaggttgtcgaagctgccctgctttctagaatacaaaggttggagcgaaggctaatgcgtatcgagcctcgtgtgggtgctttgcttgaagttctaccaaatcggttgacagctgatgtgttggagcagcttcgtctaagcaaacaagcattggttgagctgggttcacgagcaggtgatctcaaacaaatgcttattgatctcctagatgatcctcatgaaatccgtcgaatatgcataatgggaagaaattgcacgctcgacaaattaagtgataacgtggagtgctccgttcctttagagaagcagattgctgaagaagaagaggaagaaattgaaatgttgttggaaaattatcttcaaagatgtgaatcaatccatggtcaagcagagagacttcttgattctgcaagagaaatggaagattcaattgcggtcaacttaagctcccggagacttgaagtaagcagagttgagttgcttcttcaggttggaacattctgcgtcgccataggagcattaattgcaggaatatttggcatgaaccttaaatcgtacctcgagacaaacgcgtgggcattttgggcgacaactggtggaatagtagttggagcagtggctggatttttcatcatgtactcatacctaaagactagaaagatattgtaaaactctgtagcattcggtactcctaggaatgtaaataattcggttttgatctcattttgaaagctattgatggaggcacgtacagattcatatgagattgctttgatgctcccacgaatgctgtcgtgggcgtcggttctgaactttggaccaagcgttcgctgcacgcctgatgaagctagcagcctagcaccaagaccatagtatttcgcatctcttacataaagccgtggcggttttcatgactgcactgggtgagagtgctgaacagtgtaactctagattgatcaatgttactgattatctttgaaaatatttgcctggatcc

SEQ ID NO: 24645 - DNA, 2337 bp, Oryza sativa
  ref <308>: DATABASE ACCESSION NUMBER: AK100087
  ref <309>: DATABASE ENTRY DATE: 2002-08-28
ggctgccagcattttgattctgtgtgtgtgtcttggttgcaaaaaccaagacatacacacagaatcaaataataacaaaggtttcctagcctcaaaggatacatatatatagtttccctacaatacaatggagcctgtcaatgatttccaggaaggcatttcaacagagcatgcctttgaggcagagcctgtgccatcattgtcggaaacaatgacgccacgatcaatggtggtgagcttcatccttagtgtaactctcagcatcgtcgccatgaaggtcaccttgagctctggcttcattccgtcgttcagcatcccagccggcctcctcggtttttgtgtatcccgtgcgtcgatccgcattcttgactacttcgcagtggcacaactaccattcacacgccaagagaacaccatcatccagacctgtgtcgtcgcatgcacctcgatcacattcaccggtggctttgggacatatattcttgcaatgggaaagaaagcagctgtaggggatgtcaatgcccaaaataacgttgaggagccaagctttgccaggatgatcaccttcctcttccttatcagctttgctggcatgttcatcatcatgcccttcaggaaggtcatgatcattaggcaccggttgacattccccagcggcacagcaacggcgcacctcatcaatagcttccatacacctcaaggtgtcaagcaagcaaggaagcaagtgacattattgtttaaatcgtttggaggaaccatcgcatggtcgctcttccagtggttcttcgcctctgggccgggctgtggcttcaaattcttccccacatttggcctcgaggcatataaacacggattcttcttcgatttcaccatggccaatgtcggcattggcatgatgtgcccgtacatgatcgtgttctccgttttcattggcaccatcatctcgtgcggtgtaatttggccgtacatcgagtcaaaggagggcatctggtacccaagcaaccttgggcccaacagccttaacggcatcagaggttacaaggtgttcatcggcttgtccatgataatggctgactgcctcttcgtcttcctctgcatcatggtccggacaacatgtgccatgatcaagcggcgtcggcaggcaatgcaaggtggtggcggtaatgcgcagccattccagggtatcgacatcgccgatcagccggtgaagagcttcgatgatcgccgcagggcgcaggtgttcctccgggacgagataccggactcggtcaccattggctgctatgtcctcctgtcgatcatctccatcgccgccatccctcacctctacccacagatgaggtacagccatgttgcgctcatctacctcgccgcgcccgtcttcgccttctgcaacgcctacggcttcggcgtcaccgacatgaacctggctagcacctattgcaagatcgccatgttcgcgttcggctcgtgggtcggcatcaagagcggcggcgtggtcgccgccctggtcgccggcgggatcaccatgtcgatcctgggcaacgcggccgacgtcgcgcaggacctcaagacgggctacctgacgctgacgtcgccgcgcgccgtgttcatcagcgaggcgatcggcacggcgctgggatgcgtcgtcaaccccaccgtgttctgggtgttctacagggtgtacaagatgggcagcggcgacatgggcgacatgccctacgccaagctctaccgcggcttcgccatgctcagcgtcggcgacggcgagcaaggcctgcccaggcacagcatgctcctcttcaaggtcttcttcgtgctcgccctggcgctcagcgtgttccgggaggtggcgagccggaaggagtggcgcatccggcgctacatcccgagcaccatcggcatggccatcaccttcttcatgccgccgcgcgtgcccgtcggcatgtgcatcggcagcctggtggcgtacctgtgggagaagatggacgccggccgcgggcggatgctctcgccggcgctggcgtcggggctcatctgcggcgacggcgtcggctcgatcttgctgtccatgctgacactcatgggtgccagggcgcccatctgcatcaagttcttgtctcgaggtgacaatgtcaagttggacgccttcttggcaacactccatgacatgagatagctactagctagctatccatgtagggaaactagatcattttctcaggtgtcaaaacttttgtacatatgtatccacgtcataggggcttgagttaggagtcgtggcaaactgtataatcaagtttcagttcagtctataaacacagtttgatctcctct

SEQ ID NO: 24646 - DNA, 2955 bp, Oryza sativa
  ref <308>: DATABASE ACCESSION NUMBER: AK100088
  ref <309>: DATABASE ENTRY DATE: 2002-08-28
ggcgagccgagaccccgccgccgccttcgtctcttctcctcccgtttgctcccccgccaccaacggccgaccttaaccccgcgcccgcgcccaaccaccccgaccgcgttccggcggttgctgcaacctccccgccgccgccgccgccgccattcctccccccgcccgccggaaccaccgccgccgcgccatgcccatctcctccttgttcttcttcttcctcctcctgcagcaggaggacccctactagattcttcttctccctcttttgtcttctttcttggtacggcggcggaggaggagccgatgggcagcctttgctccaaggacagcgtcgccgaggagctcacgccgcagccgccgccggctgcggcagcggcggcggcgcccgtggggaggctgcagaagacggagagccagtcgttgaagcagctcatcacgctcaccgccaaggaggacgccgcggtggtcgcccccgtcgtgcacgccgtcatcacccgggcggagtccaacgccaaggccaagtccaacgccaaggccaagtccgccgccgccgtgccgccggtcgtcgtgatcacgtcgctcaacaagtcgtacagcaccgcgggtgcgcccgcacaccaccaccggctgtcgaccgtcgacgtcccgcaggtggtccccggcggcgtgccgcaggggttctccggcgagcacgtgatcgccgggtggccgtcgtggctgacctccgtcgccggcgaggtggtgcaggggtggctgccgcggcgcgccgacacgttcgagcggctggacaagatcgggcagggcacgtacagcaacgtgtacaaggcccgggacctggagaccggcaaggtcgtggcgctcaagcgcgtccgcttcgtcaacatggacccggagagcgtgcggttcatggcgcgggagatccacgctcctccgccgcctcgacggccaccccaacgtcgtccgcctcgagggcatcgtcacgtcgcgcctctcccacagcctctacctcgtcttcgagtacatggaccacgacctcgccggcctcgccgccacgccggggctgcgcttcacggagccgcaggtgaagtgcctcatggcgcagatcctcgccgggctgcgccactgccacgaccggggcgtgctccaccgcgacatcaagggcgccaacctgctgatcggcggcgacggcgcgctcaagatcgccgactttggcctcgccaccttcttcgacgccgccaggccgcagccgctcaccagccgcgtcgtcacgctctggtaccggccgccggagctcctcctcggcgccaccgagtacggcgtcgccgtcgacctctggagcaccggctgcatcctcgccgagcttctcgccggcaagcccatcttgcccggccaaaccgagatcgagcagctgcacaagatcttcaagctgtgcgggtcgccgtcggaggagtactgggcgaaggcgaagctgccggacgtgacgctgttcaagccgcagcggccgtaccggcggaagatcgccgagacgttcagggacttctcgccgccggcgctcgaccttctcgacacgctgctcgccatcgagccgtccgaccggggcaccgccgccgccgccctcgacagcgacttcttcaggagcaagccgctggcgtgcgacccggcgagcttgcccaagctgccgccgagcaaggagtacgacgcctagctccgcggcaaggaggccgccatgaggcaaaacgcgacggcggccatcggaggcaagggctccatgtccgtcaagccggggaggaacgagcagtccaaggcggcggcgccggcgcaggacgccgttggaggagatcaccagaggaggcaggcggcggcggcggcgcgcgtggtgaacccgaggagcgcgagccaccactacagctcgctggaggacagcgtgccggggttccgcatggagccgccggcggccgcggggccgccggcggcgatgcagagcggcgggttcgggtcgacgtggtacaggaaggaccacgccgccaccggcgacccgcgcgccaccacgtcacgcgcggccagcgcctccgtcagggtgtccaactccgtcgccggcggcgcgcagctcacgtcgcagcggtcgtacgcacattcccacggcaccgacctccacccgagctcgtcggcggcgaggcacgccaactcccgctacaaccgcctcgacgtcgccgagcccgccaacgcgctcgaccggccgggctccagctccacccaccaaaaggacctctccgccgccgctccggccaccgggttcggagggaggaacaagaggatccactactccggcccgctggtgccgccgggcggcaacatggaggacatgctccgggagcacgagcggcagatccagcaggcggtgcgcaaggcgcgggtcgacaaggagaggacgaatcaccacggcaacagcagcagcagtaacaacaacaggcaatactactgagctacttgctgactactttggctggctcacacaaagctaaaggaagaagacgatcgatcgagctggtgcccatggccatggaaggtgcagatcatcttccatggccatctcagaccacgggcctgactgtctgatgagaagattgcaatgcaatgcagggagatgatcttcatggatggaggagagtagaaagaagacctgatgaggtgaagatctctgatggagggtgcaggcaggcagacggcgacagcgacggcggcgcggaactcggggtatagatatctgcaattgaagagctggggggcttttcttgatccatgtgtataaatagcacactgttagagagggttttgggaagtctgatgaggaggaacaagccctgtaaaaacacggattgtaaaaggccaaatggaaaactgtgtatatcttgctgatcgaagtgatgcaacagacttcaatgacctagtttg

SEQ ID NO: 24647 - DNA, 830 bp, Oryza sativa
  ref <308>: DATABASE ACCESSION NUMBER: AK100089
  ref <309>: DATABASE ENTRY DATE: 2002-08-28
gaccgaggagccagcaagagacaaacctgaccaaatccaccctagctacaaattttcttggccgcgcgcggcaggcagatcgagcaggcgagcgaagatgtcgtggcagacgtacgtcgacgagcacctgatgtgcgagatcgagggccaccacctcacctccgccgccatcgtcggccacgacggcaccgtctgggcacagagcgccgccttccctcagttcaaaccggaggagatgaccaacatcatgaaggacttcgacgagccggggttcctcgccccgaccggactgtttcttggaccaaccaagtacatggtcatccaaggtgaacctggcgctgtcattcgtggcaagaagggatcaggaggcatcacagtgaagaagaccgggcaggcgctggtggtcggcatctacgacgagcccatgaccccggggcagtgcaacatggtggttgagaggctcggtgactacctcgtagagcagggcctgtagatcgatcgatcacatccattgtcgcgcaccgttcccaaatttcaccaacaattaactcagccaaacgagtcacattactagatccatatgcaatttttctagccaccaccgcgcatgcatgggattaattgtggtttaatttttttttctcatcttcccctgtcaacaccacacattgcagatcacttcctgcagtgccatagtccctctcgtttcttcgtgtcgtttcggctaataattgtgtgttttttttcttttttgccggtttggtcatttcggctgccgtttgagttgtgaatctggaacaacatatatgtgattgccattgtttcattgc

SEQ ID NO: 24648 - DNA, 2409 bp, Oryza sativa
  ref <308>: DATABASE ACCESSION NUMBER: AK100090
  ref <309>: DATABASE ENTRY DATE: 2002-08-28
gatcttcctcttccctcccctctctctccatcaccagctcatccctctctagcgctcgttcgcccgcccctcccccctacggccctacgagcgccgcgcttctctttctagccccctcttccgcattactccctcataaaggaggaacagaggaaagactgggcagaggagaggacctatagctgagaagaagcagagcaagtgaaggagaaagccccgtaatcttggccatcctcctcctcctcctgctgctgctgcaactccggctctgcctttaaacagtgcagcccgggcggcgccggccacgacgctcgtactcctagctagcagcggagaacgaacagcgtgcagggactcgcctcgatagcacagtaaattccattccatatcatataccattccagccatcactctccaccggcaccctgcatttactgctcccccatcactcgccccggcttccttgagcgcgatctccagatcatcttttgtgtagcgagaaagctgaggacggggaagggcggcgtggtcagcatggtgccgcgcgagcaggcggaggaggccatcgtggctgacagcaacggcaaggaggaggaggtcggggtgatgggcgtcagcgccggggagcacggcgccgacgaccaccacggcggcggcggcaagttcagcatgaagaacctgctctggcacggcggctccgtctgggacgcctggttcagctgcgcctctaaccaggtcgcgcaggtgctcctgacgctgccgtactccttctcgcagctcgggatgctctcgggcgtgctgctgcagctgttctacggtttcatgggcagctggaccgcctacctaatcagcgtcctctacgtcgagtaccgctcccgcaaggagaaggaaggcgtcagcttcaagaaccacgtcatccagtggttcgaggtgctggatgggctactgggcccgtactggaaggcggccggactcgccttcaactgcacgttcctcctcttcggctccgtcatccagctgatcgcctgcgcgagtaacatctactacatcaacgaccggctggacaagcggacgtggacgtacatcttcggcgcgtgctgcgccaccacggtgttcatcccgtcgttccacaactaccggatctggtccttcctgggcctcggcatgaccacctataccgcttggtacctcgccatcgccgccctcctcaacggccaggccgaaggcatcacccacaccggtccaaccaagctggtgctgtacttcaccggcgccaccaacatcctctacaccttcggcggccacgccgtcacagtggagatcatgcacgcgatgtggaaaccggccaagttcaagtacatctacctgctggcgacgctgtacgtgttcacgctgacgctgccgtcggcgtcggccatgtactgggcgttcggggacgagctgctgacccactccaacgccttctcgctgctgcccaagaccgggtggcgcgacgcggcggtgatactgatgctgatccaccagttcatcacgttcgggttcgcgtgcacgccgctctacttcgtgtgggagaaggtgatcggcatgcacgacaccaagagcatctgcctcagggcgctcgcgcggctccccatcgtcgtccccatctggttcctcgccatcatcttccccttcttcggccccatcaactccgccgtcggcgcgctcctcgtcagcttcaccgtctacatcatcccggcactcgcccacatcctcacctaccgtacggcctccgcgcgcatgaacgcggcggagaagccaccgttcttcctgccgagctggacggggatgttcgtgctcaacatgttcatcgtggtgtgggtgctcgtggtgggcttcgggctcggcggctgggccagcatggtcaacttcatcaggcagatcgacacgttcgggctcttcgccaagtgctaccagtgtcccaagcccgccccggcgttggcgcagtcgccggtgccattgccgcaccactagcgcgcgcccgttccgcaccaccgccgcggccgcggcggaccgtgacaacgtgcaccgccgagcccggagcaaggaacctcgctctcctggccggcacggctgcaaaaattcagtgttgcttaggttttggtcgccttgtaatatacaaagcctctcctcctgtgctagggtgtcacaccaaaatggtagaagaagaagagggcatgggtccctacgatcttgccccgggccgtccgctgccgcgttgctttcccccgatcctcgatggtgtccttgtgtttgtttggcttgcccctccctctggcgatatatatgtgatggtcgtcatggcttataaagattttcagctcatgtcacattttcatatgatatgatgtagcatatcactatagggtt

SEQ ID NO: 24649 - DNA, 1249 bp, Oryza sativa
  ref <308>: DATABASE ACCESSION NUMBER: AK100091
  ref <309>: DATABASE ENTRY DATE: 2002-08-28
gaggggctgatctgcaaatcggggaaaagagaaccctatctgcaatcgcctctttgcctccccgtctcggcggaagcgcccatcgattcctctctccggcgaacacgcgggtgggcgggtcgggtctcctctcgccgaagcgccacctcggctcggtgtgaagtgatccgattcgctcacatgtctgtccaggtaattcggtgattcggcaagggctgtatttatgcagaatggttctctgtcaaggcttatctgctggacacgctcagctgcttgcctttcctgcggctaagcataatgtctctttcgcgagaacatcgtgcctgggtactccggcgggatcatggagtgtaaaacgtgcgcgacttcatgccgaaaggaagagtttttccatgggagctttgcgagttggcactggttttgttcagaatgacatgcttgcatcgttcggaagggatgattctatcaagggcattccatcactggcagcacgacacagtcagcatcgaagacttgaagttggctgtcgagcatcctctttagcgtcattcagctaccctgagttgacttcgaaacccagatggtggtggaggactgtagcatgtgtgccctacttgcttccactccacaacatgtggtcatatgccgatgtcatctaccagctacacacatacttgcaggggttttcgttggtgtacaccttcatcgatacaatgacactgtttccaggatggcttttgctggtgatttttatgacagtgtacttctttgtcgtgagacggaagtggtcgccgcactttctaaggttccatgtcatcttggctatcctcctggacactggctcccaagcagtggcaacaatgtgcacctggatgcccagcatcgtgtatcaggggacgcctatgcagtatttctggatggctattgctttcatacagatcttcacagtgctcgagtgcatgcgatgcgctcttgctgggatgtacccgaatgtccctttcatatctcacacggcatttatccattctgatctgaatctgttcaggtagccaactgcccaccatatcagtatcagaagactgaagggaagaagagcaagtagggtagtagtttattttgtcatagctgcttacagttatatagactgtatttaatttatttatattttctaagcctcctgtaattgctataaacatcaccttttgctgttgcaacaaaatttgaacagcaataagattagatatctcgg

SEQ ID NO: 24650 - DNA, 2062 bp, Oryza sativa
  ref <308>: DATABASE ACCESSION NUMBER: AK100092
  ref <309>: DATABASE ENTRY DATE: 2002-08-28
gggtaaccctcacaatcccgttcgtcgagatcgtcgcttcggcgtaacaacaaataaggggagatccccaagtcctaacccgaatccatttccaataatccatttcgccacgatttgttcttggttgtctgagagagagagagagagagatccgtatacattgctgctacttgaggtcaagcccgttcgttcgcgcgcgcgcgcctgtctgtctctgtttgattgattcttctacgtcgtcgacgtacgcctgttcatgatgtcgctcaacctggctcaccagaccggagcggcggccgccgtggcaccggcggcgccacgtacggccgtggtcgcggcggctgcgggtacagtgtctgctccggcggtcgcgccggcggcggcgccgagcctgcagctgcagacgcagactgtggacccggcggcgccggcgcaggggccggacctccccatggccttccaggcgctggtcgagagcctgccggaggagcagcacccggacgtgggcggcgaggagcggcgcaaggtgggcgtgccggtgtacgtgatgatgccgctggacacggtgcgcaaggacggcaacgggctgaaccggcggaaggcggtggaggcgtccctgaaggcgctgaagagcgccggcgccgaggggatcatggtggacgtgtggtggggcatcgccgagtgcgagggccccggccgctacaacttcaccgggtacatggagctcatggagatggccaagaagaacgggctcaaggtgcaggccgtcatgtcgttccaccagtgtggcggcaacgtcggcgactcagtcactataccacttccgaaatgggtgttggaggagatggacaaggaccaggacctggcctacacggatcggagcggccgccgcaactacgaatacctctcgctcggcgccgacgccatgccggtgctcaagggccgcacgccggtgcagtgctacggcgacttcatgcgcgccttccgcgaccacttcgccgccttcatgggcaacaccatagtcgagattcaagtcggcatgggtccggccggtgagctccgctacccgtcgtacccggagagcaatggcacctggagattccccggcatcggcgagttccagtgctatgacaggtacatgctgagcagtctcaaggcggcggcggaggcggtgggcaagccggagtggggcaacgccgggccgggagactccggcgggtacaacgactggccggaggactcgcccttcttccgccgtgaaggtgggtggaacactccctacggtgagtttttcatgagctggtactcgcagatgctcctggaacacggcgagcgcatcctgtcggcggcgtcgggcgtgtacaccggcacacccggcgtgaagatctccgtgaaggtggccggcatccactggcactacggcacgcggtcccacgccgcggagctgacggcagggtactacaacacgaggcaccacgacgggtaccagccgatcgcgcgcatgctggcccgccacggcgcggtgctcaacttcacgtgcgtggagatgcgcaaccacgagcagccgcaggacgcgcagtgccggcccgaggagctggtgcagcaggtggcggccgcggcgcgggagtccggcgtggggctcgccggcgagaacgcgctgccgaggtacgacgagacggcgcgaccagatcgtgacgacggcggcggagaaggcggaggaggagcgcatggtagcgttcacctacctgcgcatggggcccgacctgttccagccggacaactggcgccgcttcgccgcgttcgtgaagcgcatgacggagtccggcgtgcgggacgtgtgccgcgagcaggtggagcgggaggcgcagggcgtcgcgcacgccaccgggtcgctcgtgcacgaggccgccgtcgcgctcagcaactgatcgatcagccgacctcgcgcgtagaagggtaaaaacgctttacatattttatactcccaagattatttgttgtaatcagcgtcgcgtacgcgtgcgacgacatcgatcgctcaagtgtgcaaccttgatctgcg

SEQ ID NO: 24651 - DNA, 1096 bp, Oryza sativa
  ref <308>: DATABASE ACCESSION NUMBER: AK100093
  ref <309>: DATABASE ENTRY DATE: 2002-08-28
gtggaaaaagaaaaagaaaaaaaaaaacccgatcggatcaagtcgattcttcctcctcgcgaattccccatctccgcctccctctccaaaccctaatccccccgccatggccgccgccacggcctcctcgccggcgaccgccgccgccgccaactccgatgacgaagacaactacgaggagtacatccccgtcgccaagcgccgggccatggaggccgaccgcctccgccgcctccgcctctccaagcccgcgcccccatcctcctccgccgcggaggccgcctcggatctcccgcctccccctcccccaccgccgaaccagccctcagccggcggtggcggtggcggcctcgaagcctccgcgaagcccagcctcctcgtcaaggcgacgcagctcaagcgggccgcgccggaggtgacccacacggagcagctcatcatgcaggagaaggagatgatcgagcacctctccgaccgcaagacgctcatgtcggtgcgcgagctcgccaaggggatcacctactccgacccgctcaagacggggtggaagccgccgctccgcctccgccgcatgccgcgcgccaaggccgacgagctccgccgcaagtggcacatcctcgtggacggggacgacgtgccgccgcccgctcgggacttccgcgacctccgcctgcccgagcccatgctgcgcaagctccgcgagaagggcatcgtccagcccactcccatccaggtgcagggattgcccgtggtgctctccgggcgcgacatgattggcattgccttcacagggtccgggaagacgttggtgtttgtgctgccgctcatcatggtggcattacaggaggagatgatgatgccaatcgtgccgggtgaagggccatttgggatgatcatctgtccatcgcgagagctggccaagcaaacgtacgatgtcattgagcagttccttgttccacttaaggaggctgggtacccggagatacgcccgttgctttgcattgggggtgtcgatatgagggcgcagctggatgtggtcaagaagggagtacatattgtggtggctacacctggccgactcaaggatttacttgcc

SEQ ID NO: 24652 - DNA, 2248 bp, Oryza sativa
  ref <308>: DATABASE ACCESSION NUMBER: AK100094
  ref <309>: DATABASE ENTRY DATE: 2002-08-28
gacaattcacacccccacggcgaggagtccagaagcgtcccttctcctctcctctccacgccgtctagtctcgtctcgtctcgccgaccgacccatccatccatcgatcgatcgatcgctggattgagggttcagttcacgcgcgacaccagcagcctgcctcatcaccttccgctcccgtccccttccgcctctcgcatcatcgccttctacattctccgcgcccctcttgaggcgtgataccttggccttctctgcccgccgatctgcctcgccacgcggttcgtcgtgctgctgcggggcggcgtccggcggagagggggcgcgcggcggggtgtaggtagctatgaagaacggggcgaggaaagacgcgggcggcggcggcggcggagtgttcgtcccgtgcgtcgacatcaagtcgttcgtgctctcgctcgccttcctcacggtgttcgtcgcattgtggcagctccagccgtacggctcgttgctcaccgcggcgcgctccaccgcctctgtctcggcctcgccatgttccctcatcgccacgcccgccgccgccgccgcgagcgcaggcgtcatccggtcggagaactccaccgccgacacggccaagaccgcgccggccgccgttgctagcgcagtccccgcgcggttggctagggcggcgaggccggcgcgggtggaggaccccaacaagcgtgagctccggccgtacggcagcgcggcggcgctgttcgttctgatgggcgcgtaccgcggcgggccacggacgttcgccatcgtgggattagcgtccaagcccacccatgtgttcagcaacccctacttcaaatgcgagtggctgcccaaccccaccgccggcaacccgtcgccgcgccccgtccgcaccaaggcgtacaagatgctcccggactgggggtacggccgcgtctacaccgtcgtcgtcgtcaactgcaccttcccatccaaccccaacgccgacaacgccggcggcaagctgctcgtccacgcctactactccaccacctcccgccgctacgagcgcttcgtggcgctcgaggaggccccgggctcgtacgacgagtcccgcttcagcccgccgttcccgtacgactacctctactgcggctcgtcgctgtacggcaacctcagcgccagccgcatgcgggagtgggtggcctaccacgcgcacttcttcgggccgaggtcgcacttcgtcttccacgacgccggcggcatcagcccggaggtgaaggcggtgctggatccgtgggtccgcgccggccggctcacggtgcaggacatccgggcgcaggcggagtacgacggctactactacaaccagttcttggtggtgaacggctgcctgcaccggtacaggcacgccgccaattggaccttcttcttcgacgtcgatgagtacatttacctgcccaatgggcagacgctcgaccaggtgctcggcaagctctcgggatactcgcagttcaccatcgagcagaatcccatgtccagcaagctctgcgtgcaggatccaagcaaggattactcaagggaatggggttttgagaagcttgtcttccgcaattcaattaccaaagttaggcgagatcgcaaatatgcgatccaggcccgaaacgcatactctgccggcgtacacatgtcacagaatgtctacgggaggacaacccataagacagaaagcctgatcagatactaccactatcacaattcgatcaatgtcatgggagagccttgtcgggaatttgtgccggtgccggtcaatggtagtaagttgatgttcgaggggatcccttacgtatacgatgataacatgaagcgtttggctgggcagatcaagcggtttgagaaggaagcaattggatctgctcatacataggcacatagcaactgaactactgaagactgccggtacataactacagtctacatatatacctgatgatattgtttaggatgcctggttgagagttgagacgggctcacgcttctgctgttgcaagccaccgtgtctggctggtaagcagagggaagagcttgcaagtgggttggtccaagtggtgtaaagttttggttctttttattgacatgccattctctacaggagcactgctgtttttgctccattttctcctttctcttttctccttacccccacatctgttattatagatctgtgtaaactgtaaacttatggccctgcctttttacagtagattctttg

SEQ ID NO: 24653 - DNA, 3193 bp, Oryza sativa
  ref <308>: DATABASE ACCESSION NUMBER: AK100095
  ref <309>: DATABASE ENTRY DATE: 2002-08-28
ggcctactgcccatttgccacccaaccctactacccccttcttctctctcccctctcgtcctcgtccgcttccagattcagatccacccatcgtcgtcgtccatgccgctcgcctccttttctccactgtcgtaagccctcctcctcctcctcctcccacgccgccgccgccggtgcccccactcgccgccgtgcgcgcgtcccgtagttcgccccaccagcggccgccatggcgcagccgctcgtcgtgaagaaggacgacgatctcgacgaggaagagtactactcgccgttcctcgggatcgagaagggcgccgtcctgcaggaggcccgcgtcttccacgacccgcagctcgacgcgcgccgttgctgccaggtcatcaccaagctcctatacctgctcaaccagggtgacaccttcaccaaggtggaggccacagaggtcttttttgcgacgaccaagttgtttcaatccaaggatgcaggccttaggagaatggtgtacctcatgatcaaggaactctccccatcagcagatgaggttatcatcgtgaccagctcgttgatgaaggacatgaatagcaagactgatatgtatcgagctaatgcaataagagttctttgccgcatcattgactcaacacttctaacccaaattgaaagatatttgaagcaagccattgttgacaagaaccctgttgttgcaagcgcggcccttgttagtggcatctacttgcttcagacaagtccagaagttgtgaaaaggtggagcaatgaagttcaggaggctgtacagtcgagagctgctcttgttcaatttcatgcccttgctcttcttcaccagattaggcaaaatgaccggttggctgtcagcaagcttgtcactagtctaactaggggttctgttcgctcacctctggcacagtgcctacttattcggtacactagccaggtgattagagagtcaagcatgaatagtcaaggtggagatcgccctttctttgatttcctggagtcatgtctccggaataaagcagaaatggtcatacttgaggctgcaagagcgataactgaattaaatggcgtcaccagccgggagcttacacctgcaattaccgtgctgcaattgttcttaagttcatcgaaacctgttctcagatttgctgctgttcgaacacttaataaggttgcatcaactcatcctttggctgtcaccaattgtaacatagatatggagagtctaatatctgatcagaacaggagcattgctacccttgcaattacaacactacttaagacaggcaatgaatcaagtgttgatcgcttaatgaagcagatgaccaattttatgtcggacattgccgatgaattcaagattgttgtcgtagaggccataagatccttgtgcttgaagttccccctaaaatatcggtcactgatgaactttttgagtaatatcctacgggaagagggtggctttgagtacaagaaggctattgttgattcaattatcatactcattagagatattcctgatgcaaaagaaagtggtttatttcacttgtgtgaattcattgaagattgtgagttcacttatatgtctactcagatacttcactttttgggaaatgaaggtccaaagacatcagatcctagtaaatacatacgttatatatataacagagtgatacttgaaaatgctactgttcgagctagtgctgtaagtactttggcaaagttcggtgcattggttgactcactcaagcctcgaatttttgtccttctgagacgctgcctgtttgatggtgatgatgaggtgcgtgacagggccacgctttatctcaaattgcttggcggggaagctacagttggtgaaactgagaaggatgtgaatgaatttctctttggttcatttgatattccactagttaacctggagactagcctacaaaactatgaaccatcagaggcaccttttgatatttcatctgtatctttggaaactaaatcacaacctcttgctgagaaaaagactacgggcaaaaagccaacaggcccagcatctgctctcagcggtccagttcctactgttgatgcctcatatgagaagcttctttcatccattcctgagtttgctggttttggaaaactctttaagtcatcagctcctgtagaattgaccgaagctgaaactgaatattcagtcaatgttgtgaagcacatttatgacgggcatgttgtgctccaatacaattgtaccaatactatacctgaacagctgcttgaagaggtggtggtttttgtggatgcttctgaggccgatgaattttcagaagttgcaacgaaatcattaagatccttaccttatgattcaccaggacaaacctttgtggcttttgaaaagctagaaggtgtccttgctactgggaagttctcaaatatactgaaatttattgttaaagaggttgatccatccacaggtgaagctgatgatgatggcgttgaggataagtaccagcttgaagatctggaaattacttctgctgattatatgttgaaggttggagtttctaacttcagaaatgcttgggaaagcatggatccagaaagcgagcgggttgatgagtatgggcttggcgccagggaaagcctggctgaggctgtgagtgctgtcataggcatccttggcatgcagccctgcgagggaactgatgtggtcccaagcaattcgaggtcacacacttgcctgctatctggtgtgtttatcggcaatgtgaaagttttagtgaggctgtcattcggacttagcggaccgaaggaagtggccatgaagctagcagtcagatcagatgatcctgagatcagtgacaagatccatgaaatcgttgcaaatggctaaatctgatgaagagggtcaccccttttttgacctttttgtttttggctttcacgccatggaaagctcaacggaatttgattaattctatgatgatagtacatgtaagcttggttttccgttggatacatgtgttgttgcactcgcaccccatcatttgaaaacaaggcatataacaatttttgattgatttggaaccacatcatcaattcctttatatatcaaggatttgactagtacatgcaataatatatagatgaagttatatcaatcagattgagagctactttgcggttc

SEQ ID NO: 24654 - DNA, 2556 bp, Oryza sativa
  ref <308>: DATABASE ACCESSION NUMBER: AK100096
  ref <309>: DATABASE ENTRY DATE: 2002-08-28
gacttcactccactccacatcacgcggccgcactccactgaaacccaccgctcacccaacccccccgaaaaccccccaacccaagcgcccaccacgatgcggcaccgcctccgcctcctcctcgtcgtgctcgtcgccgccgcctatgccgccggcgacgtcgcctcgtcgtactcgcagcctacgctgcccgctgttcccccggtgcaggccgtacggccgccgcccgcggcggtaggcggcgggtcgcactcgcagcccacgttccctcctcgcgcgccggtgcgggccgtgccaccgcccgccacgctggtctcgacggcgaccccgggggcgctgcttgcggcattcctcgccaaggcggatccctccgcgcatctgcggttccctctggcggtgtcgccgtgttcgcacccggccgtctcctgcagcgccgacggccagatcacccgcctggtgctcgagtcgtccgggctgaacgggacgttcgcgcccgccacgctctcccgcctcgtcgagctccgggtgctcagcctcaagagcaacgcgctccacggccccatcccggacctctccccgctcgagaacctcaaggcgctcttcctcgccggcaaccgcttctccgggccgttccccgcctcggtcgcgtcgctccgccggctccgctccatcgacctcgccgggaacaggctctccggcgcgctccctcccggcattgaggtcgcgttcccgcatctgacgttcctacggctcgacgccaaccactttaatggctccctcccggcgtggaaccagtcttcgctcaagctgctgaacgtgtcgtacaacaacttctccgggcccgtgccggtcacccccgtcatggcgcagatgggcgccgccgcgttcgcgggcaatccagagctctgcggcgaggttctccgccgtgagtgccggggctcccacctcctcttctttcacggtcctggcaacaacggctccgctgctcccccggtgcagagcgccgcggccaccggcgacggaccgcaacgcgacgacatcagcttgcccgattcatccacgccgcgttcgcggaaactgaggaggcgggccgccatcgccgttgcggctaccgccgcagcgttcgtggccgtgcttctactttgtgccatgattgcaatgaaaaggggcaagaagcgtcggcggccgagctccgcggcatacccgagccccaagaagagcgcggccatgtcggaggtgagcagggacaacaccgatctcggctatgtggagtgcgtgccggacgaggagacggcggcgatgatgatgccggaggagaaggcgcggcggctggagcggagcggctgcctaacgttctgcgcgggcgagggcgcgagctacagcctcgagcagctgatgcgcgcgtcggcggaggtgctcggccgcgggagcgtggggacgacgtacaaggcggtgctcgacggccgcctcgtggtcatcgtgaagaggctggacgcggccaagatcggcgccgcggcgctggaggcagaggcgttcgagcagaacatggacgccgttggccggctgcggcatcccaacctcgtctcgctccgggcgttcttccaggcgaaggaggagcggctgctcgtctatgactaccagcccaatggcagcctctactctctcatccatggttcaaggtcatctcgagcaaaaccacttcactggacttcctgcctaaagatagctgaagacatcgggcagggccttgcttacattcaccaagcatcccgacttgttcatggaaacatcaagtcttccaatgtcctgcttggttctgactttgaggcttgtcttacggacaattgcttggcattccttttggaatcatcagaagtcaaagacgatgctgcttatagagcaccagaaaacatgaagtccaacagaaggctaactccaaagtcagacatatatgctttcggcatcctcctccttgaacttatcagtgggaagcctccgcttcagcactcagtattggttgcaactaatcttcagacctatgtccagtctgcgagggacgatggagtggacgtcgaacgtctctctatgattgttgacatagcatctgcctgtgttcgatcctcgcctgaaagtcggccaactgcctggcaagtcctcaagatgattcaggaagtgaaggaagcagatactgccggagacaatgacagcgatcttactagcaattcctagtcatggatgggtttatgtcggcaggattatctgaattctgaagtgatccattcgatgttgcatgcattgatctgctcagaaaaaaaaaagccagtagaacagttcctaatgtaggtgaatggctgcggggtcatgatctctctgactagttcgcttccagctaagaattttagcatgctgtaaaatgttttcgtgattttaaacttagtttcagcatgctctttgtctgttggtagtcttactaaagtagtactggaatacccagtgcttagaactctgagaacttatattttgaacatggctcctctgtgcagtgagggtttgttt

SEQ ID NO: 24655 - DNA, 1389 bp, Oryza sativa
  ref <308>: DATABASE ACCESSION NUMBER: AK100097
  ref <309>: DATABASE ENTRY DATE: 2002-08-28
gggtgcccaacgcccaaaaaacacagccaaactccgcgagaaaccgagctgcgagcgagtgaaacgcaccacgcgccgagcggcaaagcgaagcgaagaagaaatggaggcggtggaggacaaggcgatggtgggagtgggaggagcggtggcggcggggtactcctcgtcgtcgtgggggttggggacgcgggcgtgcgactcgtgcggcggggaggcggcgcggctctactgccgcgcggacggggcgttcctgtgcgcccggtgcgacgcgcgggcgcacggcgccgggtcgcgccacgcgcgggtgtggctgtgcgaggtgtgcgagcacgcgcccgccgccgtcacgtgccgggcggacgccgcggcgctgtgcgccgcctgcgacgccgacatccactcggcgaacccgctcgcgcgcaggcacgagcgcctccccgtcgcgcccttcttcggcccgctcgccgacgcgccgcagcccttccccttctcccaggccgccgcggatgccgccgcggcgcgggaggaggatgcggatgatgaccggagcaacgaggccgaggcggcgtcgtggcttctccccgagcccgacgacaatagccacgaggatagcgccgcagccgccgacgcgttcttcgccgacaccggcgcgtacctcggcgtcgacctggacttcgcgcggtccatggacggaatcaaggctatcgggtgtaccggtcgcgccgctcgagctggacctcaccgccggcagccttttctaccccgaacactccatggcccacagcttgtcgtcgtcggaggtcgcgatcgtaccggacgcgcctgtcggcgggctcggcggcgccgcccatggtggtggtggtggcgagcaaggggaaggagagggaggcgcggctgatgcggtacagggagaagcgcaagaaccggcggttcgacaagaccatccggtacgcgtcccgcaaggcgtacgccgagacgcggccgcgcatcaagggccggttcgccaagcgcaccgccgacgccgacgacgacgacgaggcgccatgctcgccggcgttctccgccctcgccgcgtcggacggcgtcgtgccgtcgttctgaggaaggacgtacgcacggtacggcgagtcggcgacgtgcgccgtcgtaattttggcgcgccccgtgcgcgcgtgcatgcgtgcgtgtgtgcgacgcatggccccgtgtgacatgaataatatgtacagtagtttttcatccatggacgtagtattctattgtactccttgtactcctactactcctcttctgcctaagccaaggcttgtacattaccatgggagtagctgtttttgcaaccgtgaccatggttcagtgcttcaagttcaagggcgttaatgttac

SEQ ID NO: 24656 - DNA, 1737 bp, Oryza sativa
  ref <308>: DATABASE ACCESSION NUMBER: AK100098
  ref <309>: DATABASE ENTRY DATE: 2002-08-28
gattgcattgccttctccgtccgtcgcgttgctccggtgctcgatcggtctccccgcccggccgccagacgacgcgccacatatgaagccccgctcctcgcgcgacggccataatgccgccgccgccgccgcgctcctcctcgcggcgctggtcctctccggcgacgtcctgccggcggtcgtggccggtggcgccccctcgttcaactacaaggacgcgctcaccaagtccatcatgttcctcgaggcgcagcgctccggcaagctgccgcccaccaaccgcatcaagtggcgcggcgactccggcatggaagacggcaagctcgccaacgtggacctgactggcgggtactacgacgccggcgacaacgtgaagtacgggctgccgctggcgttcacggtgacgacgctggcgtggacggcgatggcgttcgagaaggagctgaaggcggcgagggagctggagaacgtgcacgcggccatcaggtggggcaccgactacttcctcaaggcggcgaccaagaaggaccacctgtgggtgcaggtcggcgaccccaacgccgaccaccagtgctgggtccgcccggagaacatgcccacgccccgcaccctctaccagatcaacgacaagacccccggctccgagattgccgccgagaccgccgccgccatgaccgcctcctccatggtcttccgcaaggataagccctactcccgccgcctcctcaacaaggccaagctgctgttccagttcgccaagacgcaccagggaacctacgacggcgagtgccccttctactgctcctactccggctacaacgatgagttgctgtgggcggcgacgtggctgtacctggcgacgaagaggcaggtgtacgcggacttcatcgggcacgaggcgatctcgtcgagcgtggccgagttcagctgggacctcaagttcccgggcgcgcaggtgctcctcgcggagctcaacatgacatccagcggcggcctccagagcttcaagtcccaggccgacaacttcgtgtgcgccgtgctcccggacaccccgttccaccaggtgtccatcaccccgggcggcatgatccacctccgcgacggcgccaactcccagtacgtcaccagcacggccttcctcttcgtcgcctacagcgacatcctccgccggatcaaccagccggtgatgtgcggcgcccaggccgtgcagcccgcccgcctcctccagttcgccaagcagcagatcgactacctcctcggcgccaacccgcgcggccgctcctacgtcgtcggcttcggcgtcaacccgcccacgcagccgcaccaccgcggcgcctccaccccggtgctccccccgggctaccaggtcaactgcgggatgagcttcagcgagtggttcacccccgaccggcccaaccccaacgagctcaccggcgcgatcatgggcggccccgacggcggcgacaacttctccgacaagcgtggcaactcgtcctgcaccgagccttgcacgtacatcaactccctctccattggccccctcgccgccctcgccatccgtggcccaaaccccatcgccacccagtaattaatcaccattattatacactgattaattactgctaaattaactaaagatattgagtatattactatattactcctcctcccctgtattaaatctcgacgatatatacaaattaatttgttgattaatcggaatcgaaattagagctg

SEQ ID NO: 24657 - DNA, 2674 bp, Oryza sativa
  ref <308>: DATABASE ACCESSION NUMBER: AK100099
  ref <309>: DATABASE ENTRY DATE: 2002-08-28
gagcgagccgcgaaaaattccgccgccgccgtttcgtcgacctcatcggcggccatgctgctccgcctccgtccgccgccgcagccggccgccagcctcgcatccttactccccttctcccccttcaggcgcttcctccactcgccgtcctggcgccctcctcctcctcctcctccgcgccgccaccgcctcctctccactgccgtcgcctcctcctcctcctcctccaaagtctcgacaagtcttgaggagcgatacgatgtgattgtggttggaggaggccatgccggatgtgaggccgcgcttgcgtcggctcgtcttggtgcgcgcaccctcctccttacgcttaacattgatcggattgcgtggcagccttgcaaccctgccgtgggagggcctgcaaagtctcaacttgttcatgaggtagatgcccttggtggtgaaatggggaaaattgcagacaggtgctacctacaaaagcgtgtgctaaacagctcaaaaggccctgctgtacgtgcactgcgtgctcagactgacaagagggagtatgcagtagagatgaagaaagttgttgaaagcacacaaaatcttttcattagagaggcaatggctacagaggttatgataggccagaacgacaatgttgagggtgtccgcactttcttcggcatggacttttatgcaccatctgttgtacttaccactggaacattcatgagtggtaagatttgggtaggtaggacttcaatgcctgccgggcgagctggagagtcagcttcacatggactcactgaaaacttgcagcagttgggttttgaaactgaccgcttaaaaactggcacaccaccacgaattgatcgcaggactgttaacttttctggattggaaccccagcatggtgatgaagaggttggctggtttagttttgatcctgaattccatattgagagggaccaaatgtgctgctatttaacaaggactacaaaagagacacatcaaattgttagagataacttggatgaaacaccaacttatggtggttgggtagaagcaaagggaccaagatactgtccagcaattgaagacaagattgtaaggttcaaagacaaagagtcccatcaggtatttcttgaaccagagggcagagatgttcctgagctttatctgcaggggttttccactgggcttcctgagcgattgcaattatcacttgtgagaacactaccaggactggagaattgtgtgatgctaaggccggcttatgctgttgaatatgattacttgccagcttaccagtgctcaagatcactcatgaccaagaagtttgagggcttattcttctctggccagattaacggaacaacaggatatgaagaagctgcagctcagggtataatttccggaataaatgcagctaggcattctgatggaaagccacttatcattcttgagagagaaagcagttatattgggactctgattgatgatcttgtcacaaaagatcttagggagccttatcgcatgttaacaagccgttcagaacaccgtctattgcttcgagctgataatgctgatagtcggttgactcctttgggacgagatattggtttgatagatgatagacgatgggagctttatcaatcaaagcaagcccggattaaagaggaaaaagaacgattgaaatctacaaaaatcccaggaggtgaatttgctgctgcggttacctctgtatccaaccaacctgtaaaagaatcatctacacttgaagccatactgaagaagccacatgtacagtataaacttcttgacaaacatggatatggaaatgaacatttgtctcgaattgagaaagaatgtgtggagattgatattaagtacgaaggttttatagcacggcagcaaagtcaattgcagcagattgtaaatcaggagcacaagaagcttcctgaagacttagattatcattcaatgacaaacctgtcacttgaagctcgtgagaaactttcaaaggtaaggccacaaacaataggccaggctagcagaattggcggggtgagcccagctgatatgactgttcttctcatttggatggagagcaaccgtcgcatggctaactacaagagacagcaaagcacgttgagatctgctgcgaccaaggcagatgattcttcagacgaagtggttcatgccagtgccaccaatgcataattgagcgccccccgactatatcaaccaactgaattggaccactggacttttctgagccaaaaatgtgtactctctgaagataatttccagacgcctgtggaagagttatacaggacatgcatcaaggcaccttttgctacttgaaggaagttggtggtggcctctgtcagttatggtgtttctcccctacgacgctgaattgctgatgtggttttagaatgtcggatcgtattggtaggatttactatatctttatagtggataagaatgtaaagagcgacaaaaatgaaagtggtagagcagagtagcaatgtttatgtatatatacatctaattcgcgaatgcaagggagcaatgtcatttacagagaagtgaatggtgtatgtaatctgtaaacagaatgagtataaagaggttgcagtatcactgtgtcctatcacagaagaggttgcagtgtctttgtgtc

SEQ ID NO: 24658 - DNA, 2443 bp, Oryza sativa
  ref <308>: DATABASE ACCESSION NUMBER: AK100100
  ref <309>: DATABASE ENTRY DATE: 2002-08-28
gactcgaaacggctacttcctccccttcctccccctccaccaccttctagaaccttccacgatgccgccgccgccgcggaagcgcctcggccgcgcggccctgctcctcgccgccgccgcctacctcgccttcctcctcctcttcgagctcccctccctcgacctcttcccctcctccgacgccgcggcgggcgcggcgatgcccacccaccgcccacgccgccgcgagctcgaggcctcgtcgtcgtcttcggcgttcgcttcccccgtcctccgccgccccgccacggcggtgtctcccgcgccggcttctgctgctgccgcggcggctggggcgctcccgatcttctcgtcgctgctcctcctcccccggcccaacgcgacggccaccccgttcgacgggaccgccgcggaggcgttcgccgcggcgaggccgcacctcgaccacctcaggactgctgctgctgcggcggcggaggaagcttcgtcgtcgtcgacggcgccgacgtgcccgacctcgatctcggtgcacgcggacgggttgcccggggacggggtgaggacggtggagctgccgtgcgggctcgcggtggggtcgcacgtgacggtggtggcgcggccgagggcggcgcggccggagtacgacccgaagatcgccgagaggaagtccgggcaggagccgctcatggtgtcgcagttcatggtggagctggtcgggaccaaggccgtggacggggaggccccgcccaggatactccacttcaaccccaggatccgcggcgactactccggcaagccggtcatcgagatgaacagctgctaccggatgcagtgggggcagtcgcagcgctgcgagggctacgcctcccgccctgccgacgagacagttgatggccaacttaagtgtgagaaatggattcgtgacgacgacaagaagtctgaggaatcgaagatgaagtggtgggtaaagcgtctaattggtaggccaaaggatgtgcacatcagttggccataccccttcgcagaaggcaagctgtttgttttgactctaacagctggtttggaaggttaccatgtcaatgttgatgggcggcatgttacttcctttccttatcgcactggttacactcttgaggatgcaaccggcttatctctgaatggagacatcgatatcgaatccatttttgctagttccctgcccaattcgcatcctagttttgccccagagagataccttgaaatgtctgaacagtggagggcaccaccactaccaactgagcctgttgagctttttattggtattctttcagcagccagccattttgctgagcggatggctgtacggaagtcgtggatgatgtatacaaggaaatcgactaatatagtagctcggttctttgtggctctgaatgggaaaaaggaggttaatgcagagctgaaaagggaagcagagttctttcaagacattgttatagttcctttcatggatagctatgaccttgttgttttgaagaccattgctattgctgagtatggggtgcgagtcatacccgcaaaatacatcatgaaatgtgatgatgatacatttgttagaattgactcagtactggatcaagtgaagaaagttcgaagtgataagagtgtgtacgtaggaagcatgaactacttccataggccactaagatctggcaagtgggctgtaacttatgaggaatggccagaggaggcatatccaaattatgccaatggacctggctatgtaatttcagccgatattgcacgctacattgtatctgaatttgacaatcagacacttcggctatttaagatggaagatgtaaacatgggcatgtgggtcgagaagttcaacaacacgcttcggccggtcgaataccggcacgatgtcaggttctaccagtctggctgcttcgacggctacttcacggctcactatcagtcccctcagcacatgatctgcctctggagaaaactgcagtccggaagctcacggtgctgcaacgtgagatgacaatggcagcaaaaattagccgtattttggagcaaatagagacgatgttaactcgtaagctcagctcgctgttggaacaccagaaaatcatcagcattcagcgatgctgacggttcggaggagcgctcatcttctggactggacctgatatatgattcgttcattcttttggtcggtggctccgtttcaagctgctgatttctgacacctgatcaatgatgttcttgccttcttggggattctttcgcctgttgatatttatactcgcgtcaaatttatttgacctaggaatttttgaggctggtggtggtggtggtggcggcggtggtatgccggcggcatgttttgtgtataaaaaggattttatgagttttactgtttgtgagtatatattcggtggactcctattggctg

SEQ ID NO: 24659 - DNA, 1874 bp, Oryza sativa
  ref <308>: DATABASE ACCESSION NUMBER: AK100101
  ref <309>: DATABASE ENTRY DATE: 2002-08-28
ttggagagaggggaagtcacgaggcgacggaaccggaaccctagctagcgcgcggcgtccatggggaaggcggaggcgaggtccagggagcacggcgggggcggaggaggaggcagcggcagcgcggggaagatcttcgtcggtggactgccccgtgacaccacggaagcggattttgtgaagcattttggccagtatggagaaatagttgattcagtgataatgagggataagcacacatctcagccaaggggctttggctttattacatattctaaccctgccgttgtggatagagtgatggatgatatccatgaattcaatggaaagcaagttgaaatcaagagaaccattccaaaagattctgtgcaatcaaaggatttcaaaactaaaaagatatttgttggtgggcttcctcaagcactgacagaagatgatttcaagcatttcttccagaaatatggccctgtggtggaccatcagattatgcgtgatcatcaaaccaagcgttcacgaggctttggatttatagtttttagttctgatcaggttgtagatgatttattagcaaatggaaatatgattgatcttgctggtgcaaagctgattgatgccaatggtctgctctgctcactgcaccgggcagccgggggcgctgaccccgggcgccgtggggcaacgagccagggcgcagtggtcgtccacctgcagcccccaccagttgacgccattgatgcccctcgactgcagcacggcgtacgagaggatccccatgaaggccacgccggcgtccagcccggcggacagcacgtagttgtgccgcgcccaccaccccttgtaccggcggtacacgacgtagttgaaggcgagccccacggcgccccacatgaggtagttcaccgacctcgccggcggcatcatccccgtggcgccgaggagcaccggcatgttgacgagcccgatccacgccctgcccgggaacgcccgcgacagcgcccacaccggcaccggcgccagcgcgccggcgaggaagaagtagttcatcttggcgtacaggccgaggcggccgaacatccgcagcgggccgaccaccccccagatgatggaggcgttgaagaagacgtcgtcgccggggcacgtccacgggctcccctccggcagcttcgccgggtcgcagatgttgctcacgctctccagcagccaccacgacgtcccgaagtacaccgacgacgccagcaccgtcccgacgagctgcatgaacaaaaccgggcaaattcgctcacattctcctccgacgaatcgatgtccggattcagccgatgggggctcacctggacgatgaacatggagcgtggtgggatcttcatgtagtggcccagcttgaaatcctgcaagaacatgatcgcctgggacatgctgatgtagccgtacgtcttgaaggcgacgttggcgagcggcctccccgggtacaggtatccgatgatcagctcggtgatcacgttcagcccaggttgctgtccaagaaaccaaaaagaaccataaattgatcacgaattcactattcatgagtttaagaacatctctgagggagcttttggtagctacttcttctcctagaatcaaagtctctttcaaataatccctttcttttttggccatactaaaaaattgtaattgtagaattgaaaaaataacgccgcagtgccggcgctacgtctctagagctaggtcgttttttaggtcgcttcttctgttgtgagaataggctttagctcttcctatctagtattcccgtcccctgctgttcttagttttgggctgtaaaaatatgttttattcctcttaacaaaaaatacgcatctagcgtattcccg

SEQ ID NO: 24660 - DNA, 1109 bp, Oryza sativa
  ref <308>: DATABASE ACCESSION NUMBER: AK100102
  ref <309>: DATABASE ENTRY DATE: 2002-08-28
gactcgtcatcctctcccttcccccaactcccctcgccggatcgttcgcgatcaatccgccgccgccgcttttctcctccgatccagcgccgccccccgagggagaatcttccgccgccgcggccgcaccccgcaccctcacgcagtagggatcgaggatgtcgtacgcgtacctcttcaagtacatcatcatcggcgacacaggcgtggggaagtcgtgcctgctgctgcagttcacggacaagaggttccagcccgtgcacgacctcaccatcggcgtcgagttcggcgcccgcatgatcaccatcgacaacaagcccatcaagctccagatttgggacacggctggtcaagaatcgttcagatctataactagatcatactacaggggtgctgctggtgcccttttggtgtatgatatcaccaggagagagacttttaatcatcttgctagctggctagaagatgcaagacagcatgcaaatgccaacatgacagtaatgcttattggtaacaaatgtgatctgtctcatagacgtgctgtcagctatgaggaaggtgaacaatttgccaaggagcatggcctagtatttatggaggcatctgcaaaaactgcacaaaatgttgaggaggcattcatcaagactgctggaacaatttacaagaaaatccaagatggtgtctttgatgtatctaatgagtcttatgggatcaaagttggctatgcggtaccaaatgcttcaggtggtggagctggctcatcctctcaaggtggtggctgctgcggctaaaggcagcagcagtatccaactagtcatgtatccagcctaaattgaaaagtcagatcatgtgtaacatggccctcaatatttcgatgttgccttgtggaaaaaatagctggtattggtactgtgttttttactccttccagctaccgacgttcagtgttagtgcacaaaatgttcatccatggtagtttgtctacattgcagtcatgtaaagttaaacattcacgatttctgtacttttgcatgtgtaactaaatgaaatggtgtgttacattcattccttcgatcaaataatccatagaaacaaactggtttgtaact

SEQ ID NO: 24661 - DNA, 1116 bp, Oryza sativa
  ref <308>: DATABASE ACCESSION NUMBER: AK100103
  ref <309>: DATABASE ENTRY DATE: 2002-08-28
gatggcagcagcagcagcaggaggaggacaaaattaaaggagggcagcttccttccttccttctacaagatcttgagatgcgtgaagtcggcaggcgccgcattaccacctccaattcctcctcttcccaaaccacattcgacttcgacttcgccatcagcaaccaatctgctcccttttgaagtttcgatccgatccattcccaatcccatcccatcccatcgatcgatcgatctcatgcggcagctttaccaatcgatgcgcttgagatagccgcccgattcatcgatcgatctgccgagatatatatggggattgacaagtcagccgccggatcgtcgtcgtcgccgccgcggccggttgccgccgccacggcggccgtgtgctgcatgtgcggcgaccgtggcctcctgccggagctgttccgctgcgccgcctgcgccgtccgctcccagcacacatactgctcggagcgataccccaaggcagagtcgtacggcacgtgcaactggtgcctgagggcggatcaaggaagcgacggcggcggcggcggcgccgccgccgcctcgagctcgatggcgaggccgcccaccggcgccagagcagcggccggcggcgatccagctgccagcagcagatcgacggcggcggcgaaggtcgtcgccgcccgcgggcacttcgctgccgacctgagcaagcccatcaagaagccaccgccggcgccggcgccgctgccgccgccgtcgccggcacagcggcgtatcctgctgcggcggtcggcgtcggacctgggcggccgcgtccgccgcgccgaccacgacgcgccgccgccgctgtcgcccggcgtcgcgaggggcaggccgagggttcggaggtacaagctcttggaagaggtgatcactactagctagccgtatatatatagagagagaggaacagccatgcacatatagatgcatgcacggtattatgtgtagacagctagtagcatattgcagcaagagctacctgcactgtgtttaagctgttaatatgccccttaattactgtacaggagaacatcttcagttcttcacttgatcatgggttaatcaaagtaagagagttcagactttc

SEQ ID NO: 24662 - DNA, 1319 bp, Oryza sativa
  ref <308>: DATABASE ACCESSION NUMBER: AK100104
  ref <309>: DATABASE ENTRY DATE: 2002-08-28
ggaaggcggtgggccccaccccgtcagcctctctcctctcatctagccgccgcctctcccctcgccggtggtgggtctcgtctcgtctcgcctctcccccataaaagccaaacccccacaaagccttgcccctccttctctttcatctcgcctccttcccccccacaccacgtcgcgcgctcctgctgcgcggacgagggaggagaggctacgcctggcccctggctgcatgcgccgccgttgtgactgaccatggacgagtacaggccgcgacggtcgccggcgagcgagcggttcatcgggatgttcgcgtcgccgtcgtcgtccccgacggagccgtcgttcgtggcaggggatgagctccatgaggacgacttcctgttctcgtcctcccccgccgcgccgccctcgagcgcgcggccgggggaggggcccgggagcccgagccgggtgccgcagggcaggtcgggctcctcgccgcgttgcacgagggggacaagaggctcctgctccgccgtggcggtgggggaggagggggcgcggccgctgccgccgcggcttccgcggggacgctgctccgtcgcaaggcgaccatcgcggccgccgccgcctcggcgtccggcggcggcggctcgttgtcgccaacccagtccccgacctctgccgcccgggccatcccgatgaccccgaggccgaagagcgccgggccagcggcgccgtaccaccagtcggctccggtgaaggtgcccgtcagcccgccccggaggcaggagatgttcaagtgggacgagctcgacgacgacgacttcctccggaacggcgacgccgcaatgctgcccccgcacgagatggtcgcgcgcgcgtccgccggcggggccggcccggccgccccgttctccatgctcgagggcgccggtcgcacgctcaaaggccgtgacctgcggcgggtgcgcgacgccgtgctccggcaaaccggtttcctcgactgaattccgcaaaggtgatgtggctctggctttttgttcaggtccgcatgctcagtgtcgtagatcggttacattttagggtataattctagtgggttattggtgtagatcgagaagtaaaaccagatggtaaggcaacaaattgagttggtttttttttaatgcaactgcttgcaattttggtgcccttggaggtgtgtgcgtgcgtgtgtatgtgagtgtgatattactgtgagtttcaacagtaatgagaactggtgtcctgcgtttgggagctctctgtaattcaggaggagcaattttgtttaaggttgttaacctgttaggtgtatc

SEQ ID NO: 24663 - DNA, 1965 bp, Oryza sativa
  misc_feature (793)..(793): "n"=any one base of a, t, c, or g
  ref <308>: DATABASE ACCESSION NUMBER: AK100105
  ref <309>: DATABASE ENTRY DATE: 2002-08-28
gaccagcttcctttgcgccgcccgcgtccgacgcgcggcggcggcggagatgttgcggcggatgcgatggatggcggacggggacgggcggtgggagctggacgtggagacgccggcgacgatggagggcgcggcgcgccccgtccccggcgacccgctgccgctcggcctctcgcgggggccccgggtcacccgcacgaagcagctcgacttcctccaccgcttcatggcctcgccgctcgtcccctccttctccgcctccggcgccggcctctccgtccaccacgcccacctcgtccacctcgcccacaacttgtcttttactatcttggagcaacttcatgtacagaagcttgtagctgttgtgaaagagaagttatcaaatcggcaagaggtctcctggtccaatgatatcaaaaggcacctgcatgatgttatgtctctaggtgttggcacagaactcttgattacaccagataccactttgctactggagctgtacaatctgaagaagggggatcggggcaaagcaatatttcgacacaagcttcctcatcaaaatattacattagaagcatcttggcctggattatccattgataaaaacggggtttactgggatgtgccattgtcattatcagctgacctgccttcagttggctccgagtctggattgagttatcatgtactattgcagcagaatagtggagaaccaaaatgttttggtggtggtgaagaaaccagtgatgtccctgttgctctgttaccagggttatgtgctaaggcagctgtntcgattaagaaaagcattgatgtttggaggaaaaaagaagataagctaaaaaatgtccagccgtatgatgtatttctctcagaacctcatgtttcgttcaccgggatcattggtgcagtagccagtggttcttttggggattgctcaaaaagaatgtccatgcaaaatgaaatactaaaatccaatgcctttaaatattttgatgagaggaacaagtttgctgcctttgcagacctctttgcgtctgttaattttacagctcaacacgggaattttcagaggcttctcctggatttgacaagggtaagcgcccggttagatatatcctcaggatcattgttcttacgtggtgcttctcagcttgcacaagatttcttcttctctcgacgccctgatttagagacattctgtgatgtttgtcctgatgtgattgtttctcttcaacaacagatagttggacccttcagctttcgtgttgaatccacagttaccattgaccctaaaaaacaagaccatttcgttcgtgtggacgactcagtttttgcaatcgactgggctctgaaggtcctgggttccgcaaaggccactgcttggtattctcctaagcatcaggaggcaatggtggagcttcggttctttgagacctgaagaggttggctcatcgtatcacataaacatgattttcaaaggctttctttctcgtattggtgccaatgagaactaggtcaggtgactgtagatgttacgcagtgtgcttcatcaaggcagtttgtagatgtgatcaagtttatctcggtgtcttgcattcacctgttgaagactgttattcttgtaggctgtagttctgttcattggttaaaacagcttgctgtttaacaggcaatgagccttgacggagggcagttcttagattgtttcggttctgtagaatagtgtagttatgcaataagtcaatacgtgtcgacgacaatatatttctagttgtgtttcatacttgctttgggcatcagaagaatacttgctgatgtaagtgatcgtcatctgaatgccgtctgttatatattcatccactgattgctcggtcaggcctgaagagtagttgatctatcttacaagttgaattgttgatgcgaatcacatctgataaatgaaatcttctcagaaataagctc

SEQ ID NO: 24664 - DNA, 2033 bp, Oryza sativa
  ref <308>: DATABASE ACCESSION NUMBER: AK100106
  ref <309>: DATABASE ENTRY DATE: 2002-08-28
ggcatccccccgcaaaagcaatccgccgattaaactaacccaaaaaaaaaagaaaaaaaactactcctcctcctcgcccaaccccgcaaaagcagcggcgacctcgcgaagccaagccaccaccacttcttccttcgctcgctcgcgtattttcttttgcttttttgtgtgctcatttcctcgccgtaaagaagcgaggaggaggaagcgtagcttgagaggctggagagatcgatcgagagagcttagcaacagcagcaaagtgattggagttgagcttgtccgtcttgaaaagtcgctgatcttttcttgtttactttcttctttttatttctttcttgtgttgctgaattgaggttgtgtgggcggccatggcgaggaggcggagataggaggtgggtggttgttgttgttgtttgatttggtgggttgaggtgggagaattggagttttgttggagaagagaggagagaaggggatgtacggctcgccggtttccaaggatctgaacctcccggtgcagccgccggcgatgagctcgtcgggcttgctgcggtacagatcggcgccgagcacgctgctcgccgagttctgcgacgacttcctcccgcccgccgccgcgccccgcgccgccagccccgacgccgacaacgtcttctcccgcttcctcgccgaccaccagatccgtgacaagtctccccccgccaccgccgccgccgccgccgctgccgctcacttccccgacgaccccaccatggccacccagcaccaccaccagcagcagatgatgttccagcaccacccgcagcagatggcctctgtcgaggggctctaccgcaccgtcagctccaccgggattgacgccgccaccgccgccgccaacgccgccggtggcggcggcggcgggctgctccggcagagtagctcgcccgccggattcctcaatcatttgaacatggacaacgggtacgggagcatgctgcgggcgggcatggcggcagccggcggtggggtggggttcaggaacggcgcgaacgccgccgccgcggccgactcccccggcggcagcgggggcaggctgaaggggcagctcagcttctcgtcgcggcagggctcgctcatgtcgcagatctcggagatggacagcgaggagctcggtgggagcagccccgagggcgccggtggcggcggcggcggcggtggccggggttacctctccgggtacccgatgagctccgggtgggaggagtcgtcgctcatgtcggacacgaacatctccggcgtgaagcgccagcgcgactcgtcggagccgtcccagaacggcggcggcggcggcggcctggcgcaccagttcagcctgccgaagacctcgtcggagatggcggccatcgagaagttcctccagttccaggacgcggtgccctgcaagatccgcgccaagcgcggctgcgccacgcacccgcgcagcatcgccgagcgggtgaggaggacaaggatcagcgagcgaatcaggaagctgcaagaactcgtgccaaacatggacaagcaaaccaacactgctgacatgctggatttggctgttgactacatcaaggatcttcagaagcaggtcaagggattaaacgacagccgagctaactgcacctgctcagcgaagcatcagcagtactctggctagaaagctttgtacaagtcatggagacttcagaaaagaacacaagattgttttggagattaggcaggactgagacgatctctgaagatgtgtaatggttaatttcatttgtttgggggggtttaattagagaggcacatggaagaaaaggctcttgtgtgccaaagcactgtataagcaaagggcaatggagcagtggcatcatcaggattcaagtgataaaaagaaaaaggaaaaacaagggagaaaaagggtgggagatgggtgaaacaattgtatagttttcttgtaacttttgccatatatacccctgcatgccccatgtccagtgcattttcgatagaaatttattactgcc

SEQ ID NO: 24665 - DNA, 2327 bp, Oryza sativa
  ref <308>: DATABASE ACCESSION NUMBER: AK100107
  ref <309>: DATABASE ENTRY DATE: 2002-08-28
ggtccccgggcctcgccgcgccgcgccacgccacgcctccgcccgcgttcgcactgactgacctgtcacgcgcgcgcgcgggggggagagcgcgaggaggaggagaaaagatcttcgcgcccccccgtcttgtcctctgtggagccgaggccgaggccgagctgagctgagctcgcttccgtgctcggccagcgcacccgcgcacgcaagcaagcaagcaaccgagcaagaagacctgcgctgcgcgcgcgcgcgctgacgggcggaggcgaggcgaggcgatgctctacctgctgccgctctccgtctcctgccgggtccccggctcgccgccggcgccgcgctcgcggcgcttcctcgaccccggcggcggccggggagttggggatgggttaggcggcgtcagggtgttccggaggcgggcgctgcgagggaccgacgtccggtcgaacacctcgtcgtcgtcgtcgcggaagggccgccacgacgacgcgcgacacgacgggggatacggcgacgacggcgacgctggggcgctgctggcgtcggtgaggaggctgctgctctccgggtcggcgcaggacgacgcggcggagggggaggcggaggaggacgagcagggtcagttccccaagcgatgggccatcgtcttcctctgcttctccgcattcctcctctgcaacatggaccgcgtaaacatgagcattgccattctgccaatgtctgcagaattcggatggaacccacaaactgttggcctcattcagtcatctttcttctggggctacctgctaactcagatagcaggaggaatctgggcagatacagttggagggaagactgtccttggcttcggcgtcatttggtggtcgatagccacagctcttacgccttttgcggcgaagctggggttaccattcctccttgtgacccgtgctttcatgggagttggtgagggagttgccatgcctgcgatgaataatattctttcgaaatgggttcctgtatcagagaggagcagatcattggctctcgtgtatagtggaatgtaccttgggtcagtgacagggcttgcattttccccattgctgatacataactttggctggccatcggtcttctactcctttgggtctctgggtgtattttggttttcgacatgggcgagcaaggcgtatagtagtccacttgaggatccaggaattagtgctgaagagaagaagcttataaccagtcaaaccacaggaggagagcctgttaaagaaattccatggggactaatattatcgaaaccccctgtttgggctcttatagtgtctcatttctgccataactggggaactttcatcttgctcacatggatgccaacatactacaaccaggttctgaaattcaacctcacagaatccggccttttctgtgttctcccctggttaacaatggcagtttctgcaaattttggtggttggatagcagatacgcttgtcagtagaggattatcagtgacaacagttcggaagatcatgcagtcaattggattcttagggcccgcattttttctgactcaactgagccatatcgattcaccagcaatggcagtgttgtgcatggcttgtagccagggaactgatgcattctcacagtccggtctatactcaaatcaccaagatatcggtcctcgatacgctggtgtactgcttggtctttctaacacggctggggttttagctggtgtgtttggcacagcggcaacaggatacatcttgcagcatggttcttgggatgatgtcttcaaagtatctgttgtgctgtatctggttgggactttggtctggaacctattctcgaccggtgaaaaaattatcgattgatgcttgtatatagcctgcttacagttcaaaatggaaagtacatacggttcagtaactggtgagatgagaattgcattcgatcaacatccattccatgtgaagctcaactctttgcagaaacagaactacagactgcaaacttttccgcgcagcgttagacatgcaattcttggcagaagaagtttcaagtgttcgaatttttcacatgattcaggatcttcgcacaattttgcaaatgaagcatgtgcaagaggtttgagttgagcaattaccaacagccagttttttaggactctgtaagtataggtatttctgtacagcttagatgaagaatccaccatccaccgtacacccctattatttttgacttgttacacaattttcttgaacatcgtatttctgtaaagtttgtagttaacaagtttaggaattcggcaatcttacctgattcttgtg

SEQ ID NO: 24666 - DNA, 1484 bp, Oryza sativa
  ref <308>: DATABASE ACCESSION NUMBER: AK100108
  ref <309>: DATABASE ENTRY DATE: 2002-08-28
gggtctgcttaagcctgcaggaagcagcgtttctgagagtgagagtgagagaaagagagagagagagagatggcagggaggaggcagcttctgcttcttcttcttctctggggattcttgcagctcattcgtcttccttattcagcgtcgcagtccttcatcggcatcaactacggcgacgtcgccgacaacctcccgccgccggcgtccaccgcgcgcctcctccagtcgacgaccatcaccaaggtgcgcctctacggcaccgacccggccgtcatctccgccttcgccggcacgggcatctccctcctcctcggcgccgccaacggcgacatccccaacttcgcgtcctcgccggccgcggccgccgcgtgggtcgccgcgcatctcccgtccacctcgtcgccggcgatctccgccgtctccttgggcaacgaggtcctcttcgccgacacgtcgctggcgtcgcagctcgtcccggcgctgcagaacatccacgccgcgctgccgcccaactccagcgtgaaggtgtccaccgtgcacgccatggacgtgctggcgagctccgacccgccctcctcgggggcgttcaagccggagctcgccgccgcgctcgacccgctcctggccttcctgagcaagaccggctcgccgttcctcatcaacccgtacccctacttcgcgtacctgagcgacccgcggccggagacgctggcgttctgcctgttccagcccaacgccgggcggcccgacgccggctcggggctcacctacaccaacatgttcgacgcgcaggtggacgccgtccgcgccgcgctggacgccaaggggtacaaggacgtggagatcgtcgtcgccgagaccgggtggccgcacagcggcggggccgacgaggccggcgccaccgtggggaacgcgcgcgcgttcgtctcggggctcgtgtcgcacctccggtccatggccggcacgccgcgcgcgccggggaagcccgtggacacgtacctgttcgccgtgtacgacgaggacctcaagcccgggaagccgtcggagaagtcgttcgggctgttccagaccaccaccctcgccgagacgtacccgacggggctgatgaggaacggcaccgccgccggtctggcaccagccatggcgccggcggcggcggcgccgacccttccggtcaagccatcacctgctccggcgagactgccggggcaacaaccacaggtgactccattgcagccgggctcggcggcggcggccgggccttcagccctgtgcgcgccggggacggcgacgacgacggcgaggggagcagcagctgctgcttgtagtagtcctagtgcagcggaatcgccacggacaatgtcagtgatcagcataattgcaggcgtgttgttaatgtacctgttaatctgagaggcagatgcatggatgcattctcttgtactcacattttgttaatcaaatcctgttgatcttgtccg

SEQ ID NO: 24667 - DNA, 1116 bp, Oryza sativa
  ref <308>: DATABASE ACCESSION NUMBER: AK100109
  ref <309>: DATABASE ENTRY DATE: 2002-08-28
tgggggccatcctctttctctgaggatcatcatgccttgaggagaagcattgctgaatcctcttggcggcccccttgcttatcacacacaaaattcggccacaccaacaaaatcggcctaaagcatgacaatttgcacctcataaccagaatttgcaggaggcttcaggcgttttcaacagacatgaaggcctggcattactgacaactattgttgagggtggtggaaactgcaatcctgctagtgatccattaccaaaccagtccctgttgtcagcaagcatcattaacaagatcctccatctgatagatgctctagatctgctatgccgaaggtcatacattgcgttggatcagttgcttttggatacccaagaagcgctgaagatcgcatacccgaaatgtttatcaggcttatctgcataccacaatacttcctctatcagaaggaaaccaaagctgtaattttattctgaggttagcgctgcgcgcaaagaaatccgcgacgaagctgaagcgatcggcagagatggggagcatgtaccggcatctgcgtgaccgatctagtagaaggcggcgcttctcacctgcatggcggcaagagctcgcgcgacaagaaagcccgggcgtcgccggcggccggcgccaagggcggtggtgcaggtcatggcatggccgacgcatcggccgagatgaccaagagatcggcctacttccggcaaatcgaggaggacgtcggaacccacccggcggcgatcctggagctgaaagacgccgtcggcgcgttccaatccatggacatgggcgagctggcgaggttccactgcagctcgcgtgcctgaccgacgagacgcaggttcgagggcttcccttcaaagaagctggaggcgctgagaatggccgcggcgctctactccaagctggacggcgtcgttgccacgccgagtattttaaacatgcaaaaaaaaaattcttactttttgaaaaatatgtatatatataaaggtcttgtttagttggggaaaatttttaggtttgattgtcatatcgaatatacggatacacatttgaagtattaaacgtagtctaataacaaaacaaattacagatttcgcct

SEQ ID NO: 24668 - DNA, 4163 bp, Oryza sativa
  ref <308>: DATABASE ACCESSION NUMBER: AK100110
  ref <309>: DATABASE ENTRY DATE: 2002-08-28
ggttttcttctcggcggcgcgtggctctcccggcgccggcgcgccgccgccggcggccactctcctcccgctcgccgcagctgctctcagatctcccccttactgggactcgctccgttgctgcctcctccccatccaaatcgtggagatctttcttcgggtatcaggatcttcctttgggaaatcgactggctcgcgacggcgacgcgatcggggtcgggtctccggtggctggctggtcgcggcccacggttggatggattgacggaggggaggaggggggaatcggtggttcagatcaagcaagcaagcgaagcaagtttctttcgggcaccggatgcgaactccggagttcagatcagatcaggtaaaaacctgcttcagatgtgtcaccacctttacatttcagggcctaatgctaatcaatcaataggatcgatatgcaagagaatgagataatctagatatttgaattagtagattacactggtagcatcatttccttttgccatagacgaaatggtttttaattggtcattcatacatgttatgttacctggacatgtggaatctgttgaaacaggcattcttggatatggtttgatactttgatggtgtagtttgatctgattaacagatagtgaaaaaaaatcaaaatgttctatttttaatagttcatcattatgactgaaaacatcacttcgcatagtacgtcatagttgatgagaattgatgtgcaattatacattctacatactacagctgtgttagccataagaaagaattaatatacataaagagtgaccttgcaacaccagaagaaacttattactctactcgatgaaaggaatatactgttctcatcttgcaatatctgcatccagtaccagcttggctgtctccatgctctggtatttcatcgggtctgatggaatacgcattgatgatccttcatacgagcaagaaactctggtaggactcgattttgagacaagctgcatgtggagtctcctcaacatttgtaggcgctctgcaacttctttcatcgttggtctatcatctcctcttgggttcaggcaatgcatggcgagttcagctagtttctgcagtactaccataactttctcgtctatcatgtcaaaatccaacatatcacagtgccttttctggtggaacatcaaggggaaaatatgagataacgcctcatttccattcaaagtatcattgtacagagccttctttctggtcatgatctctaaaagaacaactccgaaactgtaggtatcgcttttgtcagtaagatggtgactgacaaaagtctcagggtcaaggtacccaagagttccttggatgaacatgataaaatcatttctatccatggatttcagtgttgatgctccaaagtctgcaacttttgcattatattcatcatccagtaggatattgagtgatttaacatccccatgcagaattgtgcgagacgttgatgaatgaatgtaagcaagagcctctgctgattgtgtagcaatattcagtcgaagatccagtgggattggtgttcggtgatcattgccatgaaggaactcagagagggttccgttggaaacgaactcatacaccaacatcggtacatctacctccaaacagcaaccaagtaacctcacaatgttcctatgattaatttgtgacaatattattatctcattgacgaattcttctcggcagtcatcgtcaattactttggacttctttatggcaacttctttgtcaccatccaaagttcctctgtagaccattccatgaccaccacatcctagaactcgatcatcgctatagttctctgttgctttcttgatttccttctctgtaagtataagaatggtgtcaacttgtcttgacctcatctcatcaaatagtctaagacctccattttgtttgaaatactcctccttttctttcctatattttcttctttgtaatttcatgaccagcaagcatatcaaagccatcagcacaactgcggaaacactgagacctgcagaatgatttttcaagatgaatcaactcatcgtaaacctgaaaaagctcattagtttcacccaaaggtatactctctgagtctcattaagtccttacctgctatcactcgttcaacttggttaagcacagtttgacatccatagtttgttccatctggccttttacctaccccgcatttgcacaaatagtttcctggtatgttctggcacatcccatgtctgcagggatatagctctttatacttgggatcctccttacgcaacttgcactcatctatgtctgaatagaattgaaacagacaagtatgtatttgggataatacaatcaaagcttgaactattttggcttgttacggaagctgaaaaaaaggtactccctccgtcccaaaatataacaacttttagcacttaggatttgttacaaaatatagcaacttcttcaccaacattccattcccaaccaatcacaaccctccaccattcacttttcccacctacctccacttttcaaccaattacaacctcttcctatttaattctacacactttcttaataaccgtgtctaactctaaaactacttatattctgggatggagggagtaacaaaaagaataaatattacgcagcagcattaaaactggctataattatgttctggttatgttgttattcctggagttgtttatcttggtctccaaatataatctagagaaagtttatatgtatgttaccttgacagcctttgggaagataaggattcccttcatatccttcagagcatttgcacaggtacccttggctattacttgcttgcacacacttgctgtttgaactgacacaggcatagtctttgggcaccttcttcccctctgggcaggagccattcctgatggcccagtcatggatgacaggaacacctctgttggccctcccattgacaaacctgaggtgcccaacgaggtcttgctgcctgaagctgtaccatccggcctccacaagcatggcgtagaagcatgggttgaattcccacaccgcgctctggttcatcaccaagatcgctgcgaagtccttcaggtctgggatgatggtggtctcgcagcagcccatcccagtgcagggagcaccgttggatgtgctgttgatgctctggcagtaggagtagcagccagccacatatagattagagttgctgtgcatgtagccaccaatgatgccgagggtatggcatccgatggccatgaagcggttgcgggtggtggaagggacgaacggcgtaccctccagggtgaaccctgtggtatggttctctggtatggtggtgtttgatgagaaacagatgtaactgactggaccgtaaacgcgcacctcgccacgctccagggagatgtcgatgacctctgtttctgataggaggtctctaaccataggccgtggtggctggaaggtgtcgttgcaggtgatggtgaagtagctgctcaggctggtcgcagaacaaccagcgccgatgccaaatgggtaagggatggatacatttccgcacttgccagggcagcctggcaatgaaattgcaggttcagaggtggtggttgatatcgccattgcatggaagacgatgagcatgaggagaacggatgcttcttgcatggttgcggagttggaggttcttcccagctccctacacatgaagttgtcttggaagttggaaccactgatgctctatgtaaggctgacttagttaaggggaaaacgatgaaagcttcagctaattaatcagctcctaaattctgagcacatataaagccaacccacactatggttaccgaagtttcgaaattttaaggttccgttgtttttccaatgtataccacattatttgtattggatcagaaagaaaatttcatttccacaaatagtcattgtccgactccaattaacaccgatgcctgaatatcccagacaattagtgtatgaactctgaaattgggtatgagttctgaggtgtatatcttcctctgaattttttcctccacttgtaatttatagattatacttctaacagtgatcaggagcactgtaaatttcttactttggattactagccatggatttgaatttgatgctcg

SEQ ID NO: 24669 - DNA, 2975 bp, Oryza sativa
  ref <308>: DATABASE ACCESSION NUMBER: AK100111
  ref <309>: DATABASE ENTRY DATE: 2002-08-28
ggtgctgctgcgctgcgctctcggactcctcccagatccccaatccccccacgctctccggccatcgcgggtggagcagggccgccgccgagggctgggggggagcgcgagtcccggggatccgagccatctgccggtgggcggcggcggcggcggcggagttggggttcgtcgtcttggtcttgggtcttcttcgtccctcgctgcgggtgggtagcgcagcgtcggggcagatccggctagccactgcgacgctgaattctggagatccccgcacatggagtcgcagcgagggcaatctcctgatcgtggatcagacgcatcaggaccaaaacagtctagtgtttcatcacatggtagacaaaggaattcatcatcttctatctgtaaagattttctccggaagtttgtggacaatgaactattgacatcaagcctagaggactggttctctgggcacagtgaagactgtggtttcaagaagccagcatttgatgttccttttgacctaagtgaactacaaaattttgactatgctatagaaggtgttactttccaacagctagtacggatgccaaatgctcttcatgcctcaacatcagatatttttgaagctactgcacatcttgctttggaagattttcttcatgcaagtattaagggtttgtgggaaactttctggggccctgatgaatcgatgcctttctctgttgcctgtatacacagcacaagctccaaattttatcctgctgagaaggctattagcagtgggagacttgatggcgtttgtgcaacggctgtattgctgaagagtttaaagcattcacaaggaaggtgggatcatattgttgtactggctttgttgagacctgatattggaatgttttcggggcagaatgaccaacagccatctccggctgttttgggggaggcactattctttgccttgcgtgttctactttctcgaagccttagtaggtcttccacagttcttcaaaattcagattgtgtttacgtccttcttgttgattcacagtttggaggagtggtaaatgtccaaggtgatctgaacaagcttgattttgatttgaacaatgtttatgactctgctgcagagtggataaaaaagcatgcacaaatcacagtttcttccatagaccgcgtatggaacaaacttggcaatgctaactggggcgacattgggactcttcaagttctccttgcaattttccattcaatgatccagttctgtggtgcaccaaagtattctcttgatgaactagctacagagcatagttcccgattacagagccgaagatcagaaagacatttggttggcaggcaagctaatacaaatggtttgtttcgattccagcagcaaagtcattctcctgaaattgttgaagtacaagaggagggagctgttaatgtaaaaccaaaggaaattttgaagcttgaggtaggatctgttgtattgatggaggatgctgattggcagaagggttttcaaatcaatgatattcttacagacagcgaacctcctatctatagtgctactcctgtagaagaacctaccaaaacccatctgttgtatgtaggctccagcccttctcatttggagccagcatgggaagatatgaattcttggtatcaagttcaaaggcagaccaaagtacttactttgatgaagcaaagaggcatttcaagtagatatgtcccacagatggttgcttctggacgtgtcgtccatccaggcccttgtaacaagcctaactctagtgggagttgtggccatccatggtgcagtactccaatacttgtcacctcgccagttggtgaaactatttcaaatctgattcgtaatgggctgtttggtgttgaggacgctctgagatgttgtcatgactgtttgtctgcgcttgctgctgcatcatctgcaggaatccgtcatggtgatatccggccagagaatgtgatccgtgtgagcaatggttcaaggcatccatattttgtacttattggatggggccatgctatcttagaagacagggatcggcctctaatgaatttattcttctcatctacatttgctctacaggaaggcaagttatgtgcagcatctgatgcagaaagcttaatttatctgttattcttttgttgtggtggagtttgcccagagcttgactcagttgaaggtgcacttcaatggagggagacatcctggtcaaggagagttatacagcagaagttgggtgatgtctcagcagtgctgaaagcttttgcagactatgttgacagcatttgtggaaccccatatccgatggactatgagatatggttgagaaggttacgaagaaccatcaatgaagatcatggcaaggagattgatacatcaagttagtactgcagctcatgttagtgcggaagtacgatatggaagatcaagaatggtcgttccataccctgtattgttgttgtagataatttattcgcctgtctcgtaaaaggtccataacttagtatccccctccatcttgctccatttcatctaaagggtatttccatagtcacaatctgctgctgatatcctcaacttggatttctgaaaatggtgtcgcctttgcacaagactgcagtagagatcttctgaggatatctgcaacatgatttattttggcgagtgctcctcttaagtctttgcttttcttcgggtctcgagtgtgtggtatagttgatcaatttttggtccttttgcttttttgaaattgttccagaatggatttgtgattagaggtggtgtggcagagtagcattttgttctgactaaattattttgcgggtgctatgttccaagtgcacctagttcttgtaaatgttgttcttgttcagctgtacaaacttcaatcatgctaggctgcaactgctgggtgttgatatgttcgatgaaatgtcaaaaaaaaaaaagttgttccccc

SEQ ID NO: 24670 - DNA, 1875 bp, Oryza sativa
  ref <308>: DATABASE ACCESSION NUMBER: AK100112
  ref <309>: DATABASE ENTRY DATE: 2002-08-28
gacatatgcagctggagtagtagcagctccgatggaggcgacgacgactgacggcacgacggaccacgcggggaaaccggcggtgaggagcaagagcgggacgtggagggcgtgcccgttcatcctggggaacgagtgctgcgagcgcctggcctactacggcatgagcgccaacctcgtcaactacatggtcgatcgcctccgccagggcaacgccggcgccgccgccagcgtcaacaactggtccggcacatgctacgtcatgcccctcgtcggcgccttcctcgccgacgcctacctcggtcgctaccgcaccatcgccgcgttcatggcgctctacatcgtcggcctcgcgctcctcaccatgagcgcctccgtgccaggcatgaagccgcctaactgcgccacaatatccgcctcctcgtgcgggccctccccaggccagagcgccgccttcttcgtcgcgctctacctcatcgccctggacaccggcgggatcaagccctgcgtctcctccttcggcgccgaccagttcgacgacgccgacccacgcgagcaccggagcaaggcctccttcttcaactggttctacatgtccatcaacgtcggcgccctggtggcgtcgtcggtgctcgtctgggtgcagatgaacgtgggctgggggtggggcttcggcatcccggccgtggccatggccgtggccgtcgccagcttcctcatggggagcagcctctacaggcaccagaagcccggggggagcccgctcaccaggatgctgcaggtggtcgtggccgccgccaggaagtcaagggtggcgctgcccgccgacgccgccgcgctactctacgagggcgacaagctggcctgcgggacgcggcggctggctcacacggagcagttcaggtggctggaccgggctgcggtggtgacaccgacgacggacaaggacgacgacaccggcagcaggtggcggctgtgcccggtgacgcaggtggaggagctcaaggcggtggtgcggctgctgccggtgtgggcgagcgggatcgtgatgtcggcggtgtacgggcagatgagcaccatgttcgtgctgcaggggaacacgctggaccctcgcatgggcgctaccttcaagatcccctcggcgtcgctctccatcttcgacaccctcgccgtcctcgcctgggtccccgtctacgaccgcctcatcgtccccgccgcccgccgcttcaccggccacccgcgcggcttcacgcagctccagcgcatgggcatcggcctcctcatctccgtcttctccatggtggccgccggggtgctggaggtgatgcgcctccgcgtcgccgccgcccacggcatgctcgactccacctcctacctgcccatctccatcttctggcaggtgcagtacttcatcatcggcgccgctgaggtgttcgccttcatcggccagatcgacttcttctacgaccaggcgcccgacgacatgcgcagcacgtgcaccgcgctctcgctcacctcctccgcgctcggcaactacctcagcacgctgctcgtcgtcatcgtcaccgccgcatccaccaggggcggcggcctcggatggatccccgacaacctcaaccgcggccacctcgactacttcttctggctgctcgccgcgctcagtgctgtcaacttcctcgtctacctctggatcgccaactggtacaggtgcaagacaatcaccaccactgaagcagccgctcagacttgagggccgggacccgggagattattacaatctgaatcaatttctcagaaccagtattagttactgttttattacaacctcgaatcccaaatgctacaacatacatactgctattttctgtcatagcc

SEQ ID NO: 24671 - DNA, 1777 bp, Oryza sativa
  ref <308>: DATABASE ACCESSION NUMBER: AK100113
  ref <309>: DATABASE ENTRY DATE: 2002-08-28
gataacgaattagctgcatactgcagcaactaataaacgatggatcgtcccaacctcgccgtggccgtggtggggctactggcggtggtggcggcgacgctgccggcgccgtcatagcagttcttcgacctattcctccccgccggccccagccacggctcctccggcggagggtttggcaagtgggtgctgatgaaccacgaggagtacgtcgagaagaagtcgctgtacgccatgaaggccgccggcgacatcggcgggaagaccatcgacgcgagcctctcggcggcggaggaggccaaggtgacgtgggtggttgaccccaaggggacgccgggcgacaccaccttcaccaccatcgcggcggcgctcgagaaggtccccgaggggaacaccaagcgcgtcatcctcgacctcaagcccggcgccgagttccgggagaagctcctcctcaacatcactaagccctacatcaccttcaagtccgaccctgccaacccggcggtgatcgcctggaacgacatggctgccaccaggggcaaggacggcaagcccgtcggcaccgtcgggagcaccaccgtcgccgtcgagtccgactacttcatggcctacggcgtcgtcttcaagaacgacgcgccgctggccaagccgggtgccgagggtggccaggcggtggcgctccgcctgttcggcaccaaggcagccatctacaactgcaccatcgacggcgggcaggacaccctatacgatcacaagggactccactacatcaaggatagcctcatcatgggcagcgtcgacttcatctttggattcgggagatcactctacgagggctgcaccatcgtctccgtcaccaaggaggtgtccgtgctgacggcgcagcagaggaccaagaccatcgagggcgccatagaaagtggcttctccttcaagaactgcagcatcaaaggacaagggcagatctacatcggccgggcatggggggattcgtcgcgggtggtgtactcctacacggacatgtccaaggaggtggtgccgatagggtgggatggctggaacatcgccaagccggagagcagcgggatctactacggcgagttcaagtgcaccggccccggctccgacgccaagaagagggtgggttgggcgcttgacctcaccgcggatcaggccaagcccttcatcggcacgcactacatctatggcgactcatggatcctcccgccaccagacgggaaatcagcggcatctacctcgacggcgagtaaatcaaccgcatcggcgatacccaggaactcaactgcaccggcgacggcaacggaaagtaactcaactgcaccggcgacacccagcaactcaactgcaccggtgacggcaagtaattcaactgcaccggcgacggcgagtagttcaaacccacctgccacgaagagttactcgggtccaccggcggcgccaagtgcttcaagcacaccggcaaaggcgagtagataagtgcagcggcggcgcggtgagtcacaacttcatctacggcaattgaaggatcctcccgccaccaaagtgattcaaatatttcggagtaactattaccaatttaattgggcccaatcaattctgttttggaggcccgtttgttctttgtgttgtgttaattgggccggattggtcggccggccacatagatgtgtaacatttgtatttttttcccaattcatttttggtcttctatcagtgtacgcaccttcaaaatggtgaatttttacagaagtttttg

SEQ ID NO: 24672 - DNA, 2883 bp, Oryza sativa
  ref <308>: DATABASE ACCESSION NUMBER: AK100114
  ref <309>: DATABASE ENTRY DATE: 2002-08-28
gccgcgtccccttccaaggagggagttagggtttaactccgactgaacgatcccccccgccggccaccgccctcgccggcgtcgatccgatacggcgtgcgcctggtcgctgcaccatggggtacctgcaggaggccagggagaatcacgtcaagaagaaggtcgaggaagctttgcggagcaaaatgaagcagaaggcccttaaggagtgtgatttctactgctcaaaatatgctgagtgtgctcgaggtagaactttttcggtggtatggcaatgccgcaaacaagcaaaagagttgaatgattgccttcatcaattcacaaatgatgcagtcctggaagaaatgaagaaggcttacatggttgagcaagagagcaaggaaaagaaccaataagcattatgcaatggccaatggccaatgggtttctccatgcttaaacattagtgtatcatagtccaagtctgtcggcaacatctctggtgccagcacagtgccattagggtactgcaggacttgccgcatgctcggccgtgcactaggcaacggctgcaagcagaggagccccagcttcagcaccaagttcgcctcctcggcaacatactcactgctgagcctgggatccaccacgtcaagaatttgtcctctgttccagttctcaagcacccaatccagtagcacgacctggttgtcctggaggtcatgttccagaggccttcggccacaggccacctccaaaagaaacatcccaaaggcaaaaacatcagtagctggtgatgccttccctgtgcggagaagctaaggggataggtaacccattgtgcctacaatatgtgtagtccttgggttggtgccatggtcgtacaaccttgcaaggccgaagtcgcccaagcatccattcatctcattgttgagaagcacgttatttgccttgatgtctcgatgtacaacgacttgttcccattcctcatggaggtacaataagccagatgcaatccctttgatgatgtgaaaccttaggttccagtctagaacaggattgttcttgtcatgtaagtgcttgtcgaggctaccatttgacatgtattcatagaccaagagaagttcacccttgcgtcggcaatagccaagtagctgaactagattcttgtgccgaaggcgcccccatgctgacaacctctgcaatgaattccttcaccccttgcctagagtcatgtgacactctcttcaccgcaatctctgagttagagttggatacagagagaactcctctgtacactctcccgaatcctccaattccaagcaaacgcttgctcccaaacccttgtgtggcatcgaacagatctttgtaagaaaacctttgtggtccaaactcaaccttccaatcttctctcagctcggcatgcctaaaccatctcttgacaatcatgaaccccacaagaagcaatccaatgacaagagcagccgtggctatcggcagcacaaccaccaaaatttcagatcgatggtgcctctgctctagttttggcaacacaggcagcttagatgggttgagagcaggggcagctccattcaagctgaaactccagccaagaacataatggtaggcaatggagaggcctgtcgccgacgagaatccgatgtaggcaatatcctccactaccctcgataggtcgaggccggttgggagcagaggtttcttgggcttggacacacccaatggagctagcgtcacattcagaaccatggcctgcccattgtagtccacccacacctgcatggccttgcggcttatcagtgtcaagttcatgaacgcgccggtgctgtcatcatagtagccggcggtgtgggactgtatgaattgcaggctgttcacgtcaatgccgacatggttgctgtctatgtcgtggagctccgggctgaggacggtgtcgagctcgacggcaaagacgtggttgctcgccttgccattgtcgctgatgttcatgagacccaagtgctgcgcccctgtggtggccgagaggttcttgctgggcgcgaccaggaacgcgaggccgtggtcgcttagctccgcatgctcggagacgatggcgaacacgaaggtggcagagaaggatgcagtagcgctgctgttcggcgtcaagtggaaactgacaggagtaggatagaaggcgtggcctttgatgtgcttgtcgttggtgagcttgagcaggccactcggcgtcacggcggcggcgccatcgaggctgaggtttgctccggcgaagccttcgaaggcgaactggttttcgctagcagatggcgccaccagcttgatgcagtggaagacagtgagtacaaggaagctggagatgggcctgatgatcaccatggctaccgtgacgcatgagccagggcagagctctcaaattttgtcacttccgtcttcagtggttgggtgaagtttctgaacaagcagctttgtggcttggtcttcatccaagtcaattcaatactaatgcatcatcatcagaaacagtaccctgctagaaaggacagagggagaaacaaggatgccgtagtagtgagatagtcagactactgggtaccaaatttctaggggataggtttactagtggagtagtggtctaattgctttgccggccggccacgatccgtcaacatttgactcgttcgacaaccttgcgtggtgagaaggaggtgtttgtttactagtctgtgcatctgtggtcactcaagttccttggtttcaactcaaaacacattgtatattatgcttgtcattcatagagatatacactgtacactaagaatcagactccggatgtttcccatgcgaaagcaaagtcttgatttgtactcctataaaacttccatgtctacc

SEQ ID NO: 24673 - DNA, 2501 bp, Oryza sativa
  ref <308>: DATABASE ACCESSION NUMBER: AK100115
  ref <309>: DATABASE ENTRY DATE: 2002-08-28
ggtattctcagagagagagagagagagagatctcgcggccgggcgagtgtgagccacgtcatcgtcgccggcggcgaggggggctccccgcattgccttctccggccggcgagcgagcgagcgagcgatggcgagaggctccacctccgtggaggtccgccgcgacggcgtcgccgtcatcaccgtctccaacccccccgtgaacgcgctctccctcgacgtgatagccagcttgcagagagattatggggaagctctgaggaggagtgatgtcaaggcaattgttctcactggcgccaaagggaggttttctggaggctttgatataaacgcattcgacaagaagccaaaaaatgagaagcctggatatctgtctattgattttttaacggacatagtagaagatgctccgaaaccatcagtggctgctatagatggcgttgctctaggtggcggcttagagcttgtaatggtttgtcacgctcgtgtttctacatcttcggctcaattaggattacctgaacttcaactgggcatcattcctgggttgggaggaacacaacgactgccccgccttgttggcctgccaaaagctcttgagatgttgttgatgtctaaacctctaaaaggagtggaggcacataaatttggtttagttgacgctgtagtttcagctgatgaattgatcagcacggcctgttcctgggctctggaaattgttgaagacaaacgcccatggttcaggagtctccatagaaccgatagacttccagctcttgaggaaacgaagaaaattctgaattttgcaagagttcaggcccaaaagcagtctgctagtctccaacatcccttagtttgcattgatgtcattgaggagggcataatttctggccctcgagctggcctaatgaaggaaacactttgtggaaaaatgcttgagatgtctcagataagcaaaagcttaaggcatgtcttttttgcacaacgtgcaacttcaaagattccaaatatcagcatattggggttgacaccacggagaatacacaaggtggctattgttgggggaggtctaatgggatctggaatagcaactgcattgatatcgaacaacctcctggtaatcctgaaagaagtcaatgagcagttcttagatgctggtattagcagagttaaagctaatctgcagagcttagtcaaaagggggcaaatgaccaaagaagattatgaaaataaactttctttactatctggtgttcttgactatgaacaatttagagaagctgatgtggtcattgaggcagttattgaggatttatcactaaagcagaaaatatttgctgaccttgaaaaatactgccactctaattgcatacttgccacgaatacttcaacaatagaccttcatttaattggccaaaagacatcttgccaggatcgaattgctggtgcacacttcttcagcccatgcaatgccactgttggaaataatccgtactcatcggacttcctcacaagttgtcattgacttgctaaacgtggcaaaacagatacgaaaaacaccaatagttgttgggaactgcacaggttttgctgtgaatcggatgttctttcctttcacacaggtggcttattttcttgttgattatggtctggatgtctaccacatagaccatgtgattacaaagtttggaatgccaatgggacctttccgattagctgatcttgttggttttggagttgctattgcctccagaaagcaatatctccaaagttatcctgagcgatgttacaagtcaatgcttattcaaattatgcttgaggaaaacaggacaggtgaatcttcacgcaaaggattttatctttatgatgataagcgaaaggcttctccagatcctgaaatgaacaagtacattgagaaatcaagaagcatggctagtattgtacaagatcctaagctgccgaaattaacagatgatgaaatcgtggagatgatgctcttccccgtggtgaatgaggcctgtcgactgcttgacgagggggttgctatgaaagcatctgatcttgatgtagcatccattatggggaggggcttcccttcctacaggggcggagtgatgttctgggccgattcgtttggcgcgaaatacatttacgacagactgaaggattggtccaagtatcacggagggatctttgaaccctatgaatatttatcaacaagagctcgtcagggtttgtctctggccgccatggctgatggtgcaatgtcacggctctaggggctcatctcatctgttcatactggtatcctgctgctattgctacgtgactcccatttgaggagatgcagtgatgttatctctcttttttttccttttatttacaactgatagttagcaaaatctgtaattgtgtacgacagtttgaataagtggtaaatctggactacagtttatgaatataggaagtatatatatgaatatattgtagagctcgttagt

SEQ ID NO: 24674 - DNA, 1442 bp, Oryza sativa
  ref <308>: DATABASE ACCESSION NUMBER: AK100116
  ref <309>: DATABASE ENTRY DATE: 2002-08-28
gacgatttcacggcggcggcggcgccgcttcctcctcctcatccaccgccaccgccgccgccgccatgatccaccacctccagcgccgcatcgtttcgctcctcctcctccacccagcatcgcctcaccccgtcgccgccatctctctcggccgcctcctctccaccaccgcgcccgtttcctccaaacccttcgccgccgaggactacctcgtcgccgcctgcggcctcacccgagcccaagcagccagggcttcggagaggatctcccacctcaggtccccctccaagcccgacgccgtcctcgccttcctcgccggcctcggcatcccgcgccccgacatcgccaccgccgtcgccgccgacccgaggctgctgtgcgccggcgtggagggaaacctcgccaagcgcgtcgccgagctcggcgacctgggcatcccgcgctcccagatcgcgcgcctcgtccccctcgccaagatccccttccgtagcagctccctcgccaccaacctcgccttctggctcccggtgttcggctcgttggacagcatcctcagggccctcaggaagaactcctccctcctcagcgccaacctcgacaaggtggtgaagccgaacctggcattcctcaagcaatgcgggatagatgcccgtgatgttgccagcaatccaaacctgtactccagccggctgttcacctcgaatcccatgaaactccgggacgccgtggcgcgagtggaggagctaggcatggtccgcggctcgagggtgttccaccgtgggctcgttgcggtggctttcctaagcaaggaggctgtcgcgacgaaaacacggctgctggtggagcttgggttttcgcaggatgatgtttcggtgatcttcaggaagatgccatccttcctgaccgcatccgagaaaaggatacggcgagccgtggggttcttgaagggggatgttggtctggaggaacggtacattgcgcgaaggccggtattgctcttgtatagccttgaacggcggctattgcctcggtattacttgctcaaggtcctcaggacaaagggattgctggattgcaagctgtgttactactcaacagccgcactgggcgagaagaagtttatagaaaggtttgtgcatccttatgaggaccacattgcaggccttgctgatgcttatggctctatttgttccgggaaagtagcaaatggagttgctccattgcttggtttgtagactgaaattgacggatgtaaaagtttctgctggggattttggctagatcgtcgcacaggaatgcaaaatattaaggtttgtggacccttggatcatcttgtactatgttaaagcttgtgctgaagaagtatgtaggagtaggtttgttacttttatcttgtagctctgatggttgaggatgacaatggttgatggcaatggatttgg

SEQ ID NO: 24675 - DNA, 2141 bp, Oryza sativa
  ref <308>: DATABASE ACCESSION NUMBER: AK100117
  ref <309>: DATABASE ENTRY DATE: 2002-08-28
gaccggttcgggctcgagccgcagccgccaacgtcccaagcgaccgagccaagcgcgtcacccgccacactgtcacagacgcgacgcgctcccgctccccgacgatgccggcggcggcggcgctgtccgacgacgaccgcctggtcgtcgcccactgcgccgcgctctccttcccacccgcctcccagccgccgccccctcccaccacctcctcctcctcctcgggcgccggcgcgggcgcctccttccaggtgcaccacgcgtcccacccgtacccctgcgccgccttcgcgttcccgccctcctggtccgccgcgcccggctgggccgccgcggggcgcgcggcgttcggggacgcggaggtggacccgtccctcttcccgtcgctccgcagcgtcgggagcggcgtccccgcgcgcgccaacgccgcgttcctcgcctccttcggcgccctcctcgacggctcgccgctccagtccgaggtatctagagctgtggcagaagagaagcgtattgtattcacaggccattcatcagggggttcaatagctacccttgctgccatatggtttcttgagacctgcaccaggagaggcagtgttaatcaggcacacccattttgtgtaacctttggggctcctcttgttggagacaatacctttaacaatgctgttcgaagggagggctggtcacagtgtattttgaattttgtcgtgccagtagacatcatcccccgcataccacttactccgcttgcatctgccacagaaggaattcaagctgttctggattggttatcccctcaaactccgaacttctcgccttctgggatgccactcatcataagtcagttttatgaaaatttactgagaagcacactttctattgcgagctatgaggcctgttccttcatgggatgcactagctcgatcttaggaacattgacttccttcattgagctctccccttacagaccctgtgggacttatcttttcttgacaagcagtgaacagctggccgttctgacaaattcagatgctgtattgcagttgctattttactgccttcagttggatccccagcaacaattgcgtgatgctgctgagagaagtttaagtgctcattggcaatatgaaccaattaagcaaagcatgatgcaagagatagtttgcgtggattacttgggagtggtttcatcaacacttcctggtaggcagatgagtagcacaatagttggaggccttgaactgagcaaggaagctatgttgagcctttctgcagctggacaatgggagaagcaaagggagacaaaccaggcaaaaatagatggtgcaagctgcaccaaaattagggaagccctcaagtctctgaacgagtacaaaaggacatgtgaactccatgaagtgagctactatgattccttcaagcttcagcgtgaagtacatgactttaatgcaaatgttagcaggttggaactagctggactctgggatgagatagttgaaatgctgcgaaggcgtgagctgccagatggtttcgaaagccgacaagattgggtgaatctaggaaccttgtaccgccggttggttgagcccttagacattgcaaactactataggcattccaagaacgaggacactggctcctacctctccaagggaaggccaagacgttacaagtacacccaggagtggcacgagcagtcgcagcgcatctccttcggttctagccttgagtcttgcttctgggcaatggctgaggaactccaggctgagattgctaacggcaaaacattcgaggatgtgagagatagagtagttaagcttgagagtgatgctcacggatggtccatgtctggaagtttagggaaggatatattcctgagccgttcttcttttgtgatttggtggaagacgctcccggagaaccacagatctgcatcatgcatcgcgaaacttgtgccctggtaaggaagctttacattatatggatagaattatttgccttcacaatgatgaggcaggcattcgtggcatgttgcaactactgccactgtaactgtataccatatgcatgaactttgtaaatatgctacttcgcgtttttgtatcctacacaatacaatcagttcaagttgaacc

SEQ ID NO: 24676 - DNA, 1266 bp, Oryza sativa
  ref <308>: DATABASE ACCESSION NUMBER: AK100118
  ref <309>: DATABASE ENTRY DATE: 2002-08-28
gactacaacgccaaagcactgcactgcacaagcagcttcctcgccttcgcatctactactccccccaaaatggcgcatccggtggctgaggccgacgagaagagccccttcggccgcctcaccgcggaggagttctacgcgcgccacggcgtgctgcacacctcctccaccttcgtcaacccgcgcggcctccgcatcttcacccagcgctgggtccccgcggggggcgacgcgcccctcctcggcgccatcgccgtcgtccacggcttcacgggggagtccagctggacggtgcagctcaccgccgtccatttcgccaaggccgggttcgccgtcgccgccgtcgaccaccagggccacggcttctccgagggcctacaggggcacatccccgacatcgtccccgtgctcgaggactgcgaggccgcgttcgccccgttccgcgccgactacccgccgccgcttccgtgcttcctctacggggagtccctcggcggcgccatcgcgctgctgctccacctcgggacaaggagcggtggcgcgacggggcggtgctcaacggcgccatgtgcggggtcagccccaggttcatgcccccctggccgctcgagcacctgctgtgggcggcggcggccgtggcgcccacgtggcggctcgccttcacccgggggaacatccccgaccgctccttcaaggtgccgtggaagcgcgccctggcggtggcgagcccgcgccgcaccacggcgccgccccgcgccgccacggcgctggagctcctccgcgtgtgccgcgagctccagtcccggttcgaggaggtggagctcccgctcctggtcgtccacggcggcgaggacaccgtgtgcgaccccgggtgcgcggaggagctccaccgccgcgccgggagcaaggacaagacgctgcgggtgtacccggggatgtggcaccagctggtcggcgagcccgaggagaacgtcgacaaggtgttcggcgacgtcctcgactggctcaagtcccacgccgccgccgctgccgccgcgcgtggcgaggggcagcagtagttcggtcggtcacgcgtgccgcgtgcttgggtaattcatggcggattcaaagcaaaagtacgggggcgcaataaaaggttgtggagttgattggtgagacgagatcgatctggtcccggtgtatctccgtctctgcgtgtggccatgttccatctccgtgtctctctgctcgtattagtccatgaattgaatgccaaaaaaatttgcc

SEQ ID NO: 24677 - DNA, 1681 bp, Oryza sativa
  ref <308>: DATABASE ACCESSION NUMBER: AK100119
  ref <309>: DATABASE ENTRY DATE: 2002-08-28
ggtctgttttgttttcccctccgactccgactccgatcgatctccaccccgaatccctcctcctcaccgccggcgagcttccggctgcggcggagatggccacacgttattggatcgtgtctcttcccgtgcagactcctggctccaccgccaattctctctgggcgcgcctccaggactccatctcgcgccactccttcgacacgccgctctaccggttcaacgtccccgatctccgcgtcggcacgctcgactccctcctcgccctcagcgacgatctcgtcaagtccaacgtcttcatcgagggggtctcgcacaagatccggaggcagatcgaggagctagagcgcgccgggggtgtcgagagtggggctctcaccgttgacggcgtccccgtcgacacctacctcaccaggtttgtgtgggatgagggcaaatacccaacgatgtcaccgctcaaggagattgtcggcagcatccaatcacaggtctccaagattgaagatgacatgaaggttcgaggagcggaatacaataatgtaaggagccagcttagtgcgatcaacagaaagcaaactggaagcttagcagttcgtgatctttccaatctggtaaaaccagaggatatggtcacatcagaacatctagtgacactccttgcagttgttcctaagtactctcaaaaggattggttgtcaagctatgagtcccttgacacatttgtggtaccgagatcgtctaaaaaactttatgaggacaatgagtatgctctctacacggtaacattgtttgctaaggttgttgacaactttaaggtccgtgcacgtgaaaaaggtttccaggttcgcgattttgagtatagttctgaagcacaggaaagtaggaaggaagagctggaaaagctaatgcaagaccaggaagcaatgagggcatcacttctgcaatggtgctatgccagctacagtgaggtattcagttcctggatgcacttctgtgctgtgcgtgtctttgtagagagcattcttagatatggtcttcccccatcattcctgtctgctgttctagcaccttctcaaaagggtgaaaagaaagtaaggagcatcctggaggaactctgtggcaatgtccatagtatttactggaaatctgaagacgatgttggtgtagctggtctgggaggtgaaaccgaggctcacccctatgtttccttcacaataaattttatctgagcacagtatgttccttgctacctgtggccaggcaaggcagtgttttggagtaattactactttggcaaacaaaaaaccagcgaatggttcggtgtatattataattgtgatacgtcaattctttcttgatttatttacccagcttatatgatcctgtagtttgaaccgatcaataatgtagctttttgggggaacctggactattttcctggcacaatagggtatctgtttggactattttatccccggcaactacaatattccaactgtttcctttagtatatctattgtgctttgagagcaccgtgtaagatgttgtggatattatgtttttgtaactttgagcagccaggttcgtaataaaagatcaatataaataattcaggtcgccgagcctgattgtaaacagtttgttgttgaattcgagctgtctccttttttctttgacgatt

SEQ ID NO: 24678 - DNA, 1231 bp, Oryza sativa
  ref <308>: DATABASE ACCESSION NUMBER: AK100120
  ref <309>: DATABASE ENTRY DATE: 2002-08-28
ggatgttgagagcgacaactaaaacctcgtggaatgggggagccgccggggaagaccgggcgacgtgacgcgggcgggacggcgccggcggtggaagaccggtggacgcagctcccgccggagctcctcccgctcatctgcaagaagctgccggactcggccgacttcgtgcgcttccggacggtatgcagcgcgtggcgcgacgccgccccgttgtccgacgtcccgccgcagctgcagtgggtcgtcgagcgccgcgggtccgcgttccaggcgagggcccatttccgcttctactcgcctagctccgggaggacgtacggcgtccgtggctacggcggccgctcctggctcgtcatgggcggcgcgtgccaggagcacctcgtcaccaccgtggacctctccacgacggcgctgtacaacccgctcaccggggagcgcctcgcgctgccccccgcgccgtacccgcagtggcgccacggcgtcgtccacgtcgtggccgccggccgccgccgcggcggcgctcccctggtggtgaacgcatccacgaggacggggcacttcgggtactgccgccagggggataccaagtggaccctggtcgacgggcgccaggacatgggccaccgcgcgtaccacggcgggcggttctacgtcaacacaaacgcgcaggagacgctggtgatcgacgcctccaccggcgccgtcgagtccgtcctgccgccgccgccacgctcggccgacgccggtgccggcgtctcctgcggggactacctggtggagtcgcgcgggaagctgatcagggccgtgctgttcccgcgcgacggcgtggtgaccacgtcggccgaggactactacctcaacgtgtatcagctgcaggaggacgggaaggccgccgccgcgtgggccaaggtggagagcgtcggggatagcgtgctctttttcgacaagcacgggcacgggttctcgctggagcccaacggcgccgcggagctgaagcgggattgcgtctacttcatgcacgagaagcggacatggctggacgccggggagtacaggttcctttgtcggtataacatggagaccggagaggtcgatagagttgtgtcgctgcccgacacgttcggggacacctgggttgtccccggattgtgcccctctgaataagatgtgtcccggcgatgttgttggtttttcggtgtttcttgtagttttttctccttgaattttc

SEQ ID NO: 24679 - DNA, 1476 bp, Oryza sativa
  ref <308>: DATABASE ACCESSION NUMBER: AK100121
  ref <309>: DATABASE ENTRY DATE: 2002-08-28
gttttgatcctttccccaccatctccaatggtggcccccctcgtcgcctagagcaccgaccccaacgttgcccaaggaccagggtggccacctctcctcctccccccgccgcggtcccccctcgccgccggctcgccggcgacgaagacgtcgtcgtgcccccaccaccaccaccaccactcggccacccaccggtccttgtccaattcgctctctccacccccgcccgccgcgcggtcgtcgtagcaacggccgcgggcaccgccaccatggcgcgctgcgggagcgccatcgccgccgtcgcggcgctgctcgtcctgctcggcgggcacgcggccgcgcgcatccgggtggagcactccgggatggtgatccggcggccgtcgtcgtccatcccgagcttccgggaggcccccgcgttccgcaacggcgaggagtgcggcggcggggggagggtggacgtggccatgacgctggacgccaactacctccggggcaccatggccggcgtgctgtccatcctgcagcacacggcgtgcccggagagcgtgtcgttccacttcctcgcggccgggatggacgccgacctcgcggcggcggtgcgcgccacgttcccgtacctggacctccgcgtgtaccgcttcgacccgtcccgcgtccgcggccgcatctcccgctccatccgccacgcgctcgaccagccgctcaactacgcgcgcatctacctcgccgacacgctcccgcccgacgtgcgccgcgtcatctacctcgactccgacgtggtggtcgtcgacgacatccgcgcgctggcgtccgtcgacctcggcggccacgtcgtcggcgcgcccgagtactgccacgccaacttcaccaactacttcaccgacgcgttctggtcggacccggcgctcaacggcacgttcgccggccgccgcccgtgctacttcaacaccggcgtcatggtcatggacgtcggcaagtggcgcgccggcggctacacccgccgcgtcgagcggtggatggaggtgcagaagcagacgcggatctaccacctcggctcgctgccgccgttcctcctcgttctcgccggtgacatccaggccgtcgaccaccgctggaaccagcacggcctcggcggcgacaacgtcaaggggcggtgccgtggcctccacccggggcccatcagcctcctccattggagcggcaaggggaagccatggatccggctcgacgcgcggcgcccgtgcgccgtcgactacctctgggcgccgtacgacctcttccggccatcgtcgccggtgctcgaggagtgagcagcagcagcatcgagccatgcacaagctaaactgatcaatctcctactttgttcttgcagaagcttaaagattttttttaaaaaaaaagaaagaagttggcaagaacatgatgaagaaattgatttttcttcaaaggaaaaggagaagaaattaatgtgcg

SEQ ID NO: 24680 - DNA, 2664 bp, Oryza sativa
  misc_feature (1104)..(1104): "n"=any one base of a, t, c, or g
  ref <308>: DATABASE ACCESSION NUMBER: AK100122
  ref <309>: DATABASE ENTRY DATE: 2002-08-28
ggtttcttctccttctcctcgtcggcatcctggtcatcgtcctccttttgctttggagactcctccccctttccttgttgtctctcttgcgggatctctacgtcagagctctcgcacctctctcttaagcttttcttctctggccgatccttgaagcaagacgccggtccatggtcggataaggatttcagactgctgccctggtgccgcgatcctacaagcttgtgaaaggaattcaatccgtgccatccaaagaagcagaggaagaaagaagcaatcaagaagagcgcgcgcacttgatccatcgtcctatcggcaggcaaggctgatcgccgatagggatggagcagctccggcaactcggcgaggcggtgggtagcatcaacgcgctcatggcgttcgaggacgacctccacatcaacccgcggcagtgccgcctcctcgccgacgcctgcgcgcgcgcgctcgccgccgtcacggggcaggttcgcgcccagctccgcttcgacgagcgcggcgccaagtggcgcgccatcgaggcgccgctccgcgagctccaccgcgccttccgcgacgccgaggcgtacgtcaggcagtgcctggacccccgcggcagctggtgggcgcgcgccgcggccatggcgcacggcaccgagtgcgtggagcagcacctccacaatgtcctgtggtgcgtcgccgtcgcgctcgaggccatcgacgccgccggcgagatcgccggctccgacccggacgagctcgccagggggcggctggtgctcgccaggaagtacgacagggacatgctcgatcccaagctgttcgagcacgcgttcggcaagctatatctggtctcccaagagctcgttgcaaggatggacatggcgtggaaggaggacagatgggtgatatcgcaaatgttcgacgaaatgaaaggccctgcggcgtcgaaacctctgagcaaaaacgagcaccgcctcgccgagctccctcgccgcggcgatggggaagctgcacccggcatctgtccttcttggcagcgactacagcgtccggaggcgggctcggcggccggctcaaggaggtgcattggatgggggagagctntgcgatgaagcatttcatcggggacaccgatgccgccggcgccgaggtcgcgctcctgtgttcggtggcgcacccgaacgtcgcgcacgccgcgtactgcttccacgacgaggagaagaaagagtacttcttggtcatggaccagctcatggccaaggacctcgggagctacgtcaaggaggtgagctgcccgcggcggcggatcccgttcccgctcgtcgtcgccgtcgacattatgctgcagatcgcgcgcgggatggagtatctgcacgcgaagaggataaaccacggcgagctgaacccctccaacgtgctcgtcaagccgcgccaacccgatggcggctacgtgcatgtcaaggtcgccggatatgggcagccagctggcatcacagccggcggcgcaaaagcttccgccaatggcaacgccaacggcaacgacaactcctgcatctggtacgcgccggaggtgctcaggtccgacggcgtcgcggacgccgcggcggcggggaggtgcaccgagaaggccgacgtgtacagcttcgccatgatctgcttcgagctgctgaccggcaaggtgccgttcgaggacaaccacctgcagggcgacaagacgagcaagaacatctgcgccggcgagcggccgctgttcccgttccaggcgcccaagtacctcaccgcgctgacgaagcggtgctggcacgccgacccggcgcagcggctggcgttcgcctccatctgccgcgtcctccggtacgtcaagcggttcctgatcctgaacccggagcagcagcagcagcagcagcagggccagaccgacgacgcgcccaagccggccgtcgactacctcgacatcgaggcgcagctgctgaagaagctcccggcgtggcagcgtggcggcgaggcgccgcgcgtcgccgacgtgccgttccagatgttcgcgtacagggtcatggagagggagaaggccgccggcgccgtgcacgtcgccaaggacagggcctcggattcgggcagcgacgggaactcgctgtacggcgacgagaacgggttcggtgcaatgtcgccggagcacaccttctccgccgtgtcgaacggcaccctgcggtcgcggccggccagcagcgacggcaggttgccgacggccaagaaggcggacggcaaggcgcccaggcaagcagggccacagccgaaggtgaaacccgtgaacacggcggcgaggactccgcactcggcaaggcgggcgctcggcgtgaagcccgacgatcacctccagaccaacggcgctcccaccgcccgccggaggacgcccgagatggcctcagaatagcagcgcaagctgctctcgtgttcgtgttcgtgatcgagtttaatgggtagaacgcgttcgatggagacggttctttcctctttccttccgtagcacagcgtctttttgccaggggaacccgaacctgcaggggcatatcaatggaggttttgcacgctactcatttgcgtggaacgaaatcccacgtgttaggaatccttgtggattgaaaatgaacgggtttttttcatgcc

SEQ ID NO: 24681 - DNA, 1263 bp, Oryza sativa
  ref <308>: DATABASE ACCESSION NUMBER: AK100123
  ref <309>: DATABASE ENTRY DATE: 2002-08-28
gacctgagctgaggccgccgccgcgtcgtcgtcgtcgtccgtacatcgccgccggatcgagccgcgccgcaagcggtaggagatgaggcccgcggtgagcagggccgccttcgcgtccgtgcttctggcgccgcgcgcggtcggggtcgccgcccgctgcgcctcctcctcctcttcggccgcctccccgtcggtcgccgccgccacttacgatcacgcgtcgtttattaaggaggtcgccgcaaccgatccaccggagcatcttagctcgttgctgaatgtgctccaggcacgaggtgaaaagctagtttctccaggggcgaaaagaggcctgattccacttgttgttcccttagcagaaagtccagcaggtaatttaacatcactactgagatggccaactgctcctagcgggatggaaatgcctgtggtggaagttcgtaatcacggcctatggcttttggctaagaatgtgaaccaatatattcacagagtgctcgttgaggctgatatcaatggttacgctgatgatttatggtctgctgtgggggacactggtaaaaaactttacacaaaaggtgatttcaaagagtcacagatggcagatcttgatgcctatttgttgaagaaggttggcctctttccagatgttatagagagaaaaacatcacgccatttcgaaaaaggagattatgtgtcagctctaattactggagaattctacactagagatcaatttcctggatttggaaggccctttgtgttcaacgcagagatattaaaaagagttgggcgtacaaccgaagccaaagattcagctcgagtggctctgaagtcaccatggtggacactgggctgcagttatgaagaggctgctgaattagctgggtgggaggatgagcagattgagtttatacgagagaaggttagtgaggagggcaagcgtgaggatctgaagaaaggaaaagctccagaacaggtggttcttgacgaggcagcatttctaatggatttggcatcggtggatggtaattgggacgatgttgttgatcgaattgctggatgttacagagaagctggacttgatgatattgcgaagttcattgcttaccgggaatagttgttatatgcatgtattcctactgaaatcgatagtcatttttgactcgcatgtactagggtttgactcgcgtgtactggtcctgaaacaaacaaatttggttgtttaactaaaaagaggaaacagtcgagtccgtttgattt

SEQ ID NO: 24682 - DNA, 1794 bp, Oryza sativa
  ref <308>: DATABASE ACCESSION NUMBER: AK100124
  ref <309>: DATABASE ENTRY DATE: 2002-08-28
gagctcgatccatcactccatcactcatcaagctaactgcctaaccaccatggcgatccaccacctcgtcgcctctctcctcctcttcttctcgtgctgccacgcggtcgccgccggcgctggcgttcgcggccggctgccaccgacgctggcgacgtggcgccagtacgcggccgccgccgcgccgccgccgcaggtggtgcagtacgagacgcggtacttcacgcagcggctggaccacttcaacgagctgccggcgagcaacggcacgttccggcagaggtacctggtgaacggcacgttctggggcggggcggcggcgccggtgttcgtgtacgccggcaacgagggcgacgtcgcgctgttcgccagcaacaccggtttcatgtgggaggcggcgccgcggttccgcgccatgctcgtgttcgtcgagcacaggtactacggcgagtcgctgccgttcggcggcaccagggcggcggcgttcgcggacgcgtcggcggcggggtacctgaccacggcgcaggcgctcgccgacttcgcggagctcatcctcagcctcaagtccaacctcaccgcctgcaaggcccccgtcgtcatcttcggcggctcatacggcggcatgttggctgcatggatgaggatgaagtacccgcacattgtgatgggcgccgttgcatcctctgcacctattcttggcttaaacggtctatctgatccttactccttctataatgtcgtctccaacgacttcaagagtgaaagtaaacattgctacgatgtgcttcgaaactcatggagtgagatgtacaaagcgctggccaccgacgcagggcgagctcgactcaaccaaacattcaatatgtgcaaaggtaacgtggacgacatacccggcttggtcgagaaggctctaatctacggctcaatgatggattacccgacaccatccaacttcctcacctccctcccggcgtatcccgtcagagagatttgccgcgcgatcgacaaaccgacgtcggggaacgacacggtgtcgcggatcaaggacgcgatgacgatctactacaacagcaccggcgggcttgcgtgcttccccggcgccggcgccgaggacgacgacccctacggcatgttccccggctggacctggcaggcctgcacggaggtgatcatgacgatgagctacggcatcggcaacgccaccgtcttcccgccggaccccttcaacctcaccgcctacctcgccggctgcctcgccaccaccggcgtccctccccgccctcactgggtccagtcctacttcggcggctacgatattcggaatgttttgaagagatctgggagtaacatcatcttcttcaatggactccgcgatccgtggagcgccggcggaatactgaagagcatttccaacagcatcattgcgctggttgagccaaaaggtggacaccacgtagacctgagattctccaccaaggaagaccctgaatggctcaagaaagtccggagacaggagatgagaatcatagctgattggctcaaacaatactacagtgatgaggccatagatagcatgatgaactagtcttagctgttctccacaaaaaaaaaaaaaacactagtctcagctagtattataaagtagtctcactatatgtgcatgacaaattaaaattaagtagctagctaggaattaattaagtggattggttttattccatattgttttttatcattctattatttattcatacccataataataataagaagaagaagaagaaagaaagtacg

SEQ ID NO: 24683 - DNA, 1134 bp, Oryza sativa
  ref <308>: DATABASE ACCESSION NUMBER: AK100125
  ref <309>: DATABASE ENTRY DATE: 2002-08-28
gtccctgttcgatcagacgatcactgaaccattccccggagaagagggagatagaagcaaataagctcttcatttccctctcaagagcagctcatcgaagctgtcagatttggccattatcggtgcaaattcagagatggttaagatcaaggaattccggatcgtcgtgcctatgtcgatggaagagtatgaaatagggatcagctacaccatcatgaagatggagcagcaaaacacgaacagcaaggagggcgtcgaggtgctgcaacaggtcccattgaggatgagaagcttggcaagggccaatacacctcgaagaattatcatttgcagagcaaaattccatcttggatgaaaggttttgcgccagcaagtgcacttaccgtgcatgaggaatcatggtgcgcatatccaaacagcaggacagtgatcaagtgcgcgctttttagcaagtgttcactgaccatcgacactgtgatcagacctgacaatggctgctctgagaacgcccacaatttaaccagtgaacaattagctgcaagagaggtagaggtcgtcgacatcgcgttgcagtcgagggactactggagcaaggtgatcagcgccccaaacgtcgacctgacagccttcaggtcgcagaggacgagccgaggccctctcttgaagggttggatggattcatgccgtcccgtcatgaccacgtacaagctggtgatcatggacgctccgatctggggcttgggtgaacgcctggaagactgcatcatcgcgggggagagggcgctgttcttggcgtgccaccggctgtgcttcgcgtggatcgacgagtggtacggcatgacgttggatcagatccgagagatggagcgtcagaccgacctgcttctcaagaagacgctgaagaagcctgcgaaggccgggagcaagcacgatggcaagaggaagacgctcaaagaggagattgtagctgtcgggagctgcacgtagtaaattggattctacgcgagatgtggttcgctacactggatggctccaagctgtcactctgtcagattaggcatgcgttgagatctggcaaaaattaagcactgtacaaaggaatccacggatgatgatgtgtatatgttggcatcc

SEQ ID NO: 24684 - DNA, 3230 bp, Oryza sativa
  ref <308>: DATABASE ACCESSION NUMBER: AK100126
  ref <309>: DATABASE ENTRY DATE: 2002-08-28
ggcgctgccgccacccacgcgtgcgtacctctctcctccgtgtcgccggcgaacccgccgccgccccatcaccggcggcgacgtccgcccggccgcgcgccgccattgccccgaccatcaacagattgatcgaggcgtagagtagaagcttctcctcggcgaccatggagagaaccctactgaacccgccgccgtctctccgatcgccggcatgccgtaccaccaccgccaccaggatcaggccctcctcctccatggctactatgatcccaacgcctccgccgatgcggcacgcccgcctcgtcaaggcatcggccgcgggccggcgagagctccacgctcccccgatcgcgccgccaatattactcggcctccgttcacccgcggcggcgtcgtacgggcgtgcgagcggcggcggcgggaggaggaggggggcgcgggtggtggcgaggatggggttcgacatgttcacggacaaggcgatcaaggcgatcatgatggcgcaggaggaggcgcggcggctggggcaccacgccgccggcagcgagcagctcctcctcggcgtcatcggggagggcaccggcatcggcgccaaggtgctcaggggcgccgggctcagcctcaaggcggcgcgcgccgaggtggagaagatggccgggaggggccccggcatggtccccatggagatcaagttcacccccgccgccaagaacgtcctccaggcctcccaagaagaagcgcaccagctagggcataactatgttggatctgaacacctcctacttgggttgctccgtgagcatggtgccgcgcttgttgtgctgaagaactttcaggctgatcccagcaacatccgcagtgaggttatccgaatgatcagtgacacctctgaagatcatcaacctgttagtgctgcagttgggggaggaagcagtacaactaagatacccacacttttagagtatggtactaatctgacaaaactagcagaggaggggaagctggatcctgttgtcggaaggcaaaaccaggttgaccgtgtagtgcagattctcggcaggcggaccaagaacaacccctgcctgattggagagcctggagtagggaaaacagcgatcgcggaagggctcgcgcagcgcattgctgcaggaaatgtgcctgaaacaatcgatgggaaaacggttatcacccttgatatgggtctacttgttgctggtacaaaataccgtggtgagtttggggagagattgaagaagctgatggacgaagtgaagcagaatggtgagataattctcttccttgatgaagttcacaccctggtgggtgctggagcagctgaaggggccatcgacgctgccaacatcctgaagccagcgctagcaagaggtgaactacagtgtattggagccactaccattgatgaatacagaaagcacattgagaaagacccagcactggagaggcgttttcagcctgtcaaggtccctgagccaactgttgatgagaccataggaattctcaaaggtctccgggagcgatatgagatccatcataaggtccagtatactgatgagtcgttgatcgcagctgctcggctctcataccagtacatcagtgatcgtttcctcccggataaagcaattgacttggttgatgaagcaggttctcttgtcaggctgcgaaatgcccagctacctgatgaagctaaagaactcgagaagaagctcaagaagatcatggcagagaagagcgaagccatccgaagccaagacttcgagaaggcgggagcgcttcgcggcgaggaggtggagctcaagtcggagatcatgtcgctggtcgacaagagcaaggagatgagcaaggcggcggtggactccggcgagtcgccggggccgacggtgacggaggcggacgtccagcacatcgtctccagctggaccggcgtccccgtggagaaggtcaccgtcgacgagtcgagccgtctcctcgccatggagtcgtcgctgcaccggcgcatcgtcggccaggacgaggccgtgacggcgatcagccgcgccatccgccgcgcccgcgtcgggctccgcgacccgcgccgcccgatcgcgagcttcatcttcgccgggccgacgggggtcggcaagtcggagctcgccaaggcgctggcggcgtactactacggctcgccggaggccatggtgcggctcgacatgagcgagttcatggagaagcacacggtggcgaagctggtgggctcgccgccggggtacgtcggctacgccgagggcggccagctgacggaggcgatccggcggcgcccctacgccgtcgtgctgttcgacgaggtcgagaaggcgcaccccgacgtgttcaacatgatgctccagatcctcgacgatggccggctcacggacagcaaggggaggacggtggatttcaagaactcgctcatcatcatgacatccaacgtcggcagcggcgtcatcgagaagggcgggaggcagctcgcggttcgccggcgatggcagcggcgacagcgggtacggggtgatcaagaacatggtggaggaggagatgaagcgctacttcaggccggagttcctgaaccggctggacgagatgatcgtgttccggcagctgacgaagctggaggtgaaggagatcgccgggatcatgctcgccgaggtcaccgggcggatcggcgggaaggggatcgggctgcaggtgacggagaggttcaaggagctcgtcgtcgagcaaggcttcgacccgagctacggcgcgcggccgctgcgccgggccatcatgcggctgctggaggacacgctcacggacaagatgctcgccggggagatctgcgccggcgactcggtgatcgtcgacgccgacggtgacgggaacgtcgtcgtggtcggccggcgcagcgccggcttgccggacctgaaatcgccggcgtttactgtctaggattactactacggctgctgcattttcagctattactatctttttgtgtttgtgtatacattagctagggataaactgtcatagtatttcttatctttttttttgaaaaaaaaaaacctattattagcatcttggtagagagacagatggtaggaatagcttagttaatcttacgcactcaattcttttatggttgatgcactttaattcctttgttaggaatctcaaaagttatcttcatattcttgtagtcccattttagtgct

SEQ ID NO: 24685 - DNA, 2299 bp, Oryza sativa
  ref <308>: DATABASE ACCESSION NUMBER: AK100127
  ref <309>: DATABASE ENTRY DATE: 2002-08-28
gatttttctcgttccccttttccttctcccgtcacggatccggggggccgggccaccgatccaaacgtaaaccgagcgcgcacacacacacgccacgcgcctcgccgccgatggcgacggatgccgccgacgaggcgccgctgctcgccgaggagcccctccgccccggcgcctgcagccgcgagctcgagctgcgggagttccgcgaccgctacgtgatccgctcggtcgacggcggcggcgccttcgccgtctcccgctccaacggctccctccgccccctctccgcagaggaagcggctgcgggaagcgattgtagggtgtcgaagatttacggagtggctggcgtgatcaggttgctcgccggaagctatgtacttgtcatcacttctcaaagggacgctggttcatatcagggatcccctgtttacaatgtgaactcgatgaaattcttatgctgcaacgaggctataaagcatttaactgcacaagaaaaaagggatgaggcatatttcatgtctctcctgaaaatcgcagaaactactcatgggctttattactcttatgacagggatttgacactgaacttgcagagggcatcaaagttgcctgctgggcgggtacataagccactctggaaacaggctgacccacgtttcgtttggaacaaaaatttgctagaggagtttattgaagcaaaacttgatgaatttatcatcccactggtccaaggaagttttcagacagcgcaattttccttaaaggaggcacctgtcagaataacgttgttctcacgtagatgcaacaggcgtctaggaacaagaatgtggaggagaggtgcaaatcttgaaggagccacagctaattttgttgagacagaacagctggcagagtatgaaggtttgatgtcttcatttatacaggttcgaggctccattccacttctctgggagcaaatagtggatttaagctacaaaccatgtctcaacataattgaacatgaggaaacgccgaaggttgtccaacgccactttcatgatctttcacaaagatatggggacacagttgttgttgatttgacagataagcaaggagatgaaggaaatttaagcaatgcatttgctgctgaaatggagaggattcctaacatcaggtatgtgcattttgatttccatcatatctgtcgtggagggaactttgataatctgcaagttctatacaatcaaattgaagaagctattcagaaacaaggatattttcttatcaactccaaaggagagatattcctggagcaaagcggcatagttagatccaattgcatagattgtctggaccgtacaaatgtaactcagagcttccttgctagaaaatcgttggacttacagctgcagcgcatgggggctctatcatcatctggcagcatttcccaatctggagacattagtgacacctttaaaaaaatgtgggttgaacatggagatgagctaagcctggaatatgctggttcttatgcactaaagggggacctagtgaggtatggaaggcagacattacctggattgattaaagatggcatgagtgctctttcacgatattatttgaataattttcatgacggagtgagacaagatgctctagaccttatcagcggttactatacagtcagcaaaggcatctcttctccttttcaaaatggtggatttgaatctgcaacgtatcttcctgtggcttcagcaatcatagttggtgggattactgccaccacattcactcttagtcaagttggacggaatgcacaacacttcatcacctccattatctgtgcgggtttgacggctggagtggtagccttggtgaaagcaaatgggaagcagttttgctctaagcctcgtttgtgtggtctcatataattctttgtttataccaatgacactaacatgaaccacccccacccctaaatttgtaatccttctcagaactcaacggaaaaaagaacctcagcaagtagtacatctataagagccaacttgccctgtagactaacacctcaaattaagcagccccaagttccttttttttttcagtatacattctcagtagatcttgtgatgagccatggatacatggttggtaatcattctcaataggtaatgaacggcagttggccttctgatcctgtaaactgaagttaatctgtaacgccagatttcttcctattagtaattgactgcttggatgatagtatgcaaaactgcaaatgtatgttctaaatgagtagcttacacgacccagagttcag

SEQ ID NO: 24686 - DNA, 2660 bp, Oryza sativa
  ref <308>: DATABASE ACCESSION NUMBER: AK100128
  ref <309>: DATABASE ENTRY DATE: 2002-08-28
gatcaatccatcatccctttcatctctcatctacctcgccatggtcgcacacaagcctgcgccatgccctgagcagcagcgctgctcccccccccccccaaggcttgagtgcgtatcataaagaggtatatgagtgatgacccaactccaaaatcttgctaggtcaggaccggatctgtagcgagcggtcgcgcgggcatggtttcccccttcgtgccttgcctgtgaccgcggtccgccgaatcccagctctggccgtccatcggccactcgcctggactggatggtgcgacggcgctctccagggatcaacgcccctcgcggaaccgcagattgtttgcttggtctgctacttgagttcttagttccttttcatttgttgcgatgctggtccatgcacaccaactgctcgatgcattgcccaaataggacatagagcttcctgaggtacacagcataagaccaagcattttgcatccgttgcatacaactcgtagccaggatttcctcggattggactacacccaatcagctggtttactgcatgatacaaactatggagacagcgtcatcattggaattatcgattcaggtatctggccggagtctccaagcttcaaagatgatggtctaggtcctttgccttccaagtggaagggcaaatgtctagccggccaagcatttggttctaaccaatgcaaccgaaagataattggggctcgatggtatgacaaacatttgaatccagacaatcttaaaggtcagtacaagtcagctagggatgctgatggacatgggacacacgtcgcgtccacagcggctggtgttctggtgccaaacgttagcttccatgggctagctgttgggtatgccagaggtgctgcaccacgtgcacgtcttgcagtttacaaggcgtgctggggatcgccgccaagctgtgatactgcggccgtcttgcaagcgtttgacgatgccatacatgatggtgtcgatgtgctgtccctttctattggtgcaccgggccttgagtatcctgctagcctccaggctgtcaagaatggcatatcagtcatcttttctgcagggaatgaaggtcctgcacccaggactgttaagaatgcatccccctgggccatgtcggtagcatcggccacaatagaccgtgctttccccactgttatcacactttccgacagcaccagtagctttgtgggtcaatctttgttctatgatacagatgataagattgacaactggtatgaagtctatcagtctagctgcctttttgggactccggaaacgtcaaatgtaactcttgctgtggggaagattgtgctttgcaacagtcctaactctgtgagcctaatttcaccaacaattcaaccggtttggaacattttgcttgctgtaaatgctttgaaggaggctggagcaaagggaattatttttgccgcatatgcttttgatatattggacgttgttgaaagttgtggcagcatgccttgtgttttggtggactttgaagttgcacaacagataaaacaatctgctgatgaaaacaccgcactggtagttaaggtggctgcagctcagacttggattggaggtgaagtgctcgctccgaaaatctcagccttctcctccagaggacctagcccactttatccagaattcctcaagcctgacattgcggcgccaggatctaacatcttggcagcagtccaagactcatacaagttcatgtcgggaacttcgatggcatgcccacatgtgtcaggtgtagttgcattgctcaaagcattgcatccggattggtctcctgctattatcaaatcagcactggtgactacagccagcaacgaaaaatatggtgtcccaatattagctgatgggcttccccaaaagatagcagatccatttgactatggtggtggcttcattgatccaaacagagccgttgatcctggcctagcatatgatgttgacccaaacgactacaccttactccttgattgtatttctgctgccaactcaagctgtgagtttgaacccataaatatgaaccttccatcaattgcaattcctaatctaaaagaaccaacaactgtgctgagaacagtaacaaatgttggccaagctgatgcagtttacaaggctgttgtgaaatcacctcccggtatgaagatatcagtggagccatctgttctacaattcagccagagcaaaaagaagcagagctttaaggtcattttcagcatgacccgcaaatttcaagggggctacctatttgggagcctagcatggtatgatggaggcactcactatgtcaggattccaattgcggttcgaccaatagtatccgataattatgcagatctctgaagaagcatagaactacagaatgttcatacttcaaaaggttctgtggagcaggcctcatcctatattatcccctcaaagttgagtttgtcagcctcaccaaaactgttgtactactttacatgttttgtttttctgtctgtaatttgtgatttcactacactatatgatacctcctatcatatggacagaggtccgaaaaaataatggaataaacgagggatatacctgtgtgtactcgttaaccccgctaaaagagatggagggcattggctcctctc

SEQ ID NO: 24687 - DNA, 1524 bp, Oryza sativa
  ref <308>: DATABASE ACCESSION NUMBER: AK100129
  ref <309>: DATABASE ENTRY DATE: 2002-08-28
ggaggagtatatacaaataccaatccacccctcctctcctcctcctcctttttcctcccccttccgaaacgacgaaaagcaaccgccgaggcggaagcggggagaggagaattcgccgccgccgccccccgatcggtggaagaacaactaacaactagattgatccatccctgcgccgccgcctccgcctgccgtgggggctctctccgctgtggatgatagggaggctcgacgatgggagggaagaaggccaagacggttgagaggaatgaccaccgcctgctctgcagtgacgtgctcacggaggtcttccacaggctgccggcgcgcaccctcgcgtcgtgcaggcttgtctgcaagtcatggatgtcggagctcaccgatccccatttcgtccacgagcacctcaagaggagccagcagaagctcctgctctttgcgaacgacaaggcgaacgataggtccctcgcgatggtgctcgccgacgacacgggggctacctaccagctgaccaggcccatggcttcgaggagcctctttgtgcacaattcttgcaatggcctgctctgcctaggtgacagcacaggagccgtgcagttgctcaacccgacgaccggcgaatcggctactctgccgatgccgatgtataccgcagggagcagccagttctcgtcgtgtaattggcactgcttggggttttgcccgtctacgaaggagcacaaagtggtacatttctacctgggagctcattttgattctttcaatgtgtgctgcgagatattcactattggagataaatcctggagacagattgggagtttccatggagcaccgacagatagaggggtgcatgtgaatggagcagtgtactatctgacaaagttccgttacattgcttcgtcacgtatcaattgtttgaatcttgagagcgaaaattttgatgtgatgatgcttcccccacgcaagtcgtatggagggcattgctctttggcggagcttgagggaaagctatgcttgctagttgtggagggtggacatgataatccacctcgtacaatggacatattgatgcttgatagtggtgataagacaacctggacgcacagataccacatctcattgccatggttgatgccttcatgttattttactccaaaacacactttgttccatgagggaaaaatttgggttcagttgttggctcggaacctctactgttatgatccaagttcaagctccactgaactgaagatggcatgtccagaatctgagtttccttttagcacacgtactttcattgaaagcatagttcctctgcgcaaagattacttcatcaagcagatacagtgataatggtgttcatcacttgttttccagatgttccgcagttcacagaattacaaaattgtgcccctttttccttttccgttgatgaattttagctggtcaatgacttagagtggcctattttaccgtgaattgtaattagctaaaataaatgcagtattgaaacctccttacagc

SEQ ID NO: 24688 - DNA, 3848 bp, Oryza sativa
  ref <308>: DATABASE ACCESSION NUMBER: AK100130
  ref <309>: DATABASE ENTRY DATE: 2002-08-28
ggcttctcggggcgcctcctccacctgtctcgcctccccctccccctccccctcccaggaaactccgtggcggcgacctcccccaccgccgccgccgccgccgccgcagccgcagcctccggcgccgcctcccaatccgggaggatccctccggacccgccgattccctcgccgccgcccgtgtcctcccgccgccgggatcgatctccgcggattcgacggcttcatcgaggttaagtcagcatagctaataactccgtctactgttgtgacctctgtggtttgctttgtgtgtttggcttcccaatcatctgcataaaccaggaagtgggtttgctttggaaatatttggggtcaaactagtagttggcacattgtgatctgatcatgtttatgcacagtttgtactgctaagcacaattggagttctgactatacagatgctgtgcgcatgcttgctggcaatatgaacaacgataactatattgacttgagttcagacagtgatatagattttgacttcgactcagatgattcagttggtggtttggaccaggagctagcttcatcttcttctaggcctactgaaaatataaatggtcaatatagaactctgccaccttcttttacaaatggtagacatgttgataacgctcgtcatgcgttaggttcaggtgacagagcttatccgcattcaagttcttatagggggtcaccaaatgattctgcaagggcaactcctgcttccaacagaactgatattgtagtcaagaagcacaatggttttgcatcggaagaaaatgataatggcaagaggattcttccctcatccttttcaaatggccgcacaacaaatgctatgcatccagtggttgcaagtgagacacgcaaattcccaccatcttttaccaatggaaattcacaaagattggctgaaaataggatgggaaaaaatgttgccaatggaattggggagccttcatcgtcaaggtttccgagccgaagttcttttggtactgacaacaagaaggtcatcacagacagtgacaatgaggatgtctatgtatatggaagctccagttcacatagggttcttcctccatcttttggtcgcaatagttctgctaatcacagcgaatttgctaatggcattgatatgcaaggtcgtctgaacctggaaaataggattatagattctgacgagagatcggtgtaccaggaagcacaacagaatacttatcacaggataaaagggaagatgatctgcctgagggtgttctgtcagtacctctgcttaggcaccagaaaatggcattggcttggatggtttcgaaggagaatagctctcattgtgcaggtggaattcttgcagatgatcagggtcttggcaaaacagtgtctacaattgcccttatacagaaacagaggatccagcagtctaagtttatgtctgttgattcagatcgtttaaaagctgaagcgctaaaccttgatgatgacgatgaggcagcgcctgttgcggataataagggggagcagactaagaatgatgaacccaggaaggatctaggagctggttcgtcatcaacagcagctggtactggtgacgttgaaacatgtgctagcctaatgaatactgctccagataagacggttgaaagaaatgttgaacgtaagaagaagagtaaggcaagcacatcatctactatgcaatccatgacaaggcctgctgcaggtactctagctggctgtgcccagctagtgttcttaagcaatgggcgaacgaattgactgacaaggttggtgaaagtgctaaattgtctgttttggtctatcatggtggctcaaggaccaaagatccaaatgagttggcaaaatatgatgttgttatcactacatacacaattgtggccaatgaagtgcctaaacagaatgccgatgatgacactgatcagaagaatggtgaagaatcttctgctggtaataagagaaaacaaccacccaaagcacagagcaagtcgaagaaaaagaaaaagaaacttaaggattcagacatttaccttgccagtggcccagttgcaagagtgcgatggtttagggttgtccttgatgaagctcagacaataaagaactttcgaactcaagtggctaaagcctgttgtggattacgtgcaaaaagaagatggtgcttatcaggaacacctatacaaaatgcaattgatgagctctacagctatttccatttcttgaaatacgatccatattctacttataattcattttgtacaatgataaagcacccgattgctagaaatgcagttcatgggtataagaaacttcagactgtgttgaggatagttctcctgcgccgcacaaaagaaactctgattgatggtgagccaatcataaagctacctccaaagacaattaatctggataaagtagattttacaaaagaggagcgagctttctatttgacgctggaagaacgctcgcggcaacagttcaaggcatacgctgctgctggtacactcaaacagaactatgccaacattcttctaatgctgttgcgccttaggcaggcctgcgatcatcctcttcttgtgaaggggcatcagtcagagtataaaggcgatggttctatagaaatggcaaagcaacttcctaaagaaatgataataaatttgcttgcaaagctggaagttggagagttttgttctgtatgcagtgatgtacctgaggatgccgtcgtgacgatgtgtggccatgtcttctgctatcaatgtatatacgagcggataactactgatgagaatatgtgtccctcccctaattgtggaaacacattaagtaccgattcagtattttcgtcaggagcgttaaggatttgcatgtctggtgtatccagttctcatgcatcagggagttcatcattagatgacgagtcatcttctattagtcaaactagttacatatcctcaaagatacaggcggcaatcgatatactgaattcgatcattaacacctatgcccttaccgacagtgataccgtcgaatcaaatcctagccgagtggccccagtgaaagccattgtgttctcccagtggactggcatgctggatttgctggagctttcattgaatagcaatctcatacagtacaggagactagatggaacaatgtccctcaattcaagagataaagcagtgaaagattttaacacagacccagaggtcagggttatgatcatgtcactgaaagcaggtaatcttggtctcaatatggttgctgcttgccatgtaattctccttgatctttggtggaatccttatgctgaggaccaggcaattgatagagcacacagaattggtcagactcgtcctgttactgtctcccgtttaaccattaaagatacggtggaagatcgcattttagctctgcaggaggaaaagagagccatggttagctctgcttttggcgaagacaaatcgggtggccacgcgactcggctcaccgtggatgatctgaagtatctatttaggttttgattggaagcacccgtgatctctgcgatacaatgacattgtatagtagcctgtgatctttacctagatgcaactccaacagccgtgtaccgctgctgagtattttggtgcgaggtactgcggatttgtgtccttccatggctcgcagcagctccagttttgtcatgctctgatttgctagacgaaatgtagtaggcttagtcgctagcctgtgttgaatatttgaccccagcttgtaggagaattctgccattgctccctgttttatcaagagatccatctggtggtgtatatatatgtgcc

SEQ ID NO: 24689 - DNA, 4022 bp, Oryza sativa
  ref <308>: DATABASE ACCESSION NUMBER: AK100131
  ref <309>: DATABASE ENTRY DATE: 2002-08-28
gtccccgcaaaacagaaagtccccggaaaaggatcgcctcgccggccgccgttccctccccacaaacccaaaatcaacagccggccggccaccgccaccgccaccgccacctccccttcctcctcctctcccgcacccccgccgccggcagccgcgcggcggagctgccggcgatggcgacggcaggcggcccggggagggcgcacacggtccgcgacctcgcggaggaggggaagaagcgggccgtgctgctcctcgtcttcgccttcggcctcgccttcctcatgtccctgacaagctcctcagtttggattaacttgccatttgccacagctttgattgttttatttcgctacatatcacttgactatgatttccgtagaaagagcacaactaccacagataacgatgccagtcgcgcacttaccaaaacaaaaagtattgaaccaaataaaatcccctctattcaaaaggatggaaagtcagattggaagagcaaggtgaattcccctccagttgaagctgcaattggacagttcacaaggcaccttgtcacagagtgggtaacagatctatggtactcccgtgtaacacctgacaaggaaggtccagaggaactcatcaatatagttaataatgtcctgggagagatatcagtccgggcaagaaacgttaaccttatcgctctgctaaccagggatctgattgatcttatatgcgaaaatttggagctttatcatttatgccaagccaagattggaaaagagaagtttgttaatctctcgacggagcgtcgtgatgctgaactaaaactgacccttataaccgaaaacaagttgcatccagctttattttcagccagtgctgagcacaagatcctacaaagtcttgctgatgggttgatatcagtaacagcaaaacctcaggatctgcagtgttacttcttccgatgtactgcacgagaacttcttgcatgtgcagtcatgagacctgtcgtgaatttagcaaacccaaggtttataaatgaaagaattgaattgttggctctttctcatgccaacaaggcagaaagaggagttgcagaatcattggagcatgctacaatggttaagcaaagggaacctcctatgccaactgttgatgaacttgctgcactaatagatcccacgagttcaggggttgaacttgtgcgatttagtcaggatcagtccaaagctgcaccagatacgcaactcagtaatactagacatccatctaacctcaaaccaaattcctctagtacttctttgaccaatagttcacatccacttgagtctagcattttatcttccactacccatggtcattcgaattccagtatgtcattgcattcccaaagtagtggcaggacaactgcagaatgttatgagggagaatgggcacagaccatggatatcagctcccagcaaaaaagtcaagccctagcacctgagcaccttgagaacatgtggactaaagggaagaattacaaatcagaaaatgtaaaacatgttgagagagtaccttccaaatcttcttctctaggcacttctccagtgcagcagtcagctccttacagcacttctgttggtcattatcctagtgctccacaaaggcagacaactatgtctcgttctgatgaccaacatttgattaaacactcaactactgctgcatacttaaatggcaccaatcatctgaggatggctttatccagagaaagtgcagatcatgccagccaagaagactttggagtggacagtgagagttcatatgccactgaggaggatgagaataacaatgtgactgggcttgactctccagtaacgagagtttgggacagcaaaagtaaaggaaatgccacctcatcacatatacaccatccacttgaatctccaggtttccataaagcaaagaagaacagaagtcatattggcaagttgaaaatgacaaaaacttcaggaagaaaaaggtcaaggtcaaattctcaaaagcctcctgtctggcaagaggtggagagatcatctttattggtgggggatgatttaaatatactgaatacatcggcagatgattcaaggacggatggactgtatgatgatactgaggtggaaagtatgtcaaggatgtttagtggtgcgaatgcttcatctttgtcattggcatcaactgactcttcatattcatcaaattattccaccactaatgtgctagaagactcttatttgaagttgaaatgtgaggtggtaggagctagcattgtgaaaagtggatctggcatgtttgctgtatattctgtttctgtgactgatgccaatggtaatagttggtccatcaagaggagatttcgccatttcgaagagctacatcggcgtttgaaagaatattctcagtacaatcttcacttgcctccaaagcacttcctttcgtcagggctagaggtccctgttgttcgagagagatgcaagttgcttgacatatatctaaagaagcttcttcagattcccactgtttcaagctgtatagaggtctgggattttctaagtgttgattcacagacatacatcttcactgacactctctcagttatccagacgttgtcagtcaatttagatgaaagatcaaaagagaagaatacaaaatcattcaattcttcccaagctttgaatgggaatttggtctctgctagccaatctttgcatgtacataaagatgataccatgccgaaggagaaggataaagactttgatgctgttgatggtttgagatcaaggaagaggaacacggaacagaatttaggaattggtgttggcaacacaaatgccaatcttcatgaagacctctctggaagtgaccctgaacagaacgagcattcatttataataaattcgggaaattctaaaaagacactgtcaagtgaaactgactacccgcctcaaagtttggagtctgatggatactcagtagctcctaatgattggatggctccaaatcttagtgtgcccttatttcatttggttgatgtggtttttcagctccaagatggtggctggatcaggaggcaagcattttgggtagtgaagcaaatactgcaactgggaatgggagacacatttgatgactggcttgttgagaaaatccagttacttaggaaggggaggattgttgcttttgcagttaagcgggttgaacaaatactctggccagatggaattttcctgacaaaacatcctaagagaaaagcagcaacacctccacctggttcccagagtaacggcatggccaactatctgactgatgaacaacgactagaggatgctcatcgtgcaaattttgtccatgaactaatgatagagaaagcaccatctgcgttagtgagtctggttggtcgaaaggagtacgaaagatgtgctcaggacgtctacttctttcttcagtctccagtttgtttgaagcagctagcatttgaagtcctagagctccttgtactagctgcatttccagagttggatgacattgtgaagaagtggcatgaagacaaacagcagttgtacgccctggaataatttttcatggtgaacgaattattccgcagggtcagatcaaacacgtatgcttgatgcagagtgcagatccattccagtgtaaataagggaatcccgaaatcagtgctgttttgacatttctgtttaaatggaggcgacttcgtgcagtgtgaatatgattagttagcagtttgtgagaacggtcccttctcccccatggaccagtaggccgtttttttgttcgacagactggtctctctttttttttctcatagaatcatagagtttggtatacataatgcagcttgaaagaaagaggtcacacagtatttttttactgtaggtgtagggttgatgtactttttgttagcgtctgttttttgtcccctgtgggtgttaccaaattttgtaactccgcattacgttgaatgaaataaagaagtgatccaggaattcctc

SEQ ID NO: 24690 - DNA, 2586 bp, Oryza sativa
  ref <308>: DATABASE ACCESSION NUMBER: AK100132
  ref <309>: DATABASE ENTRY DATE: 2002-08-28
ggggtacactctgcaagcctgtgaacccagtagtccagcagtactcaccatggccgcgctgcgactgccaagagcgccgaccaccgcggcgctcgccgccggcgtcccccaccggttcccggcaccggagggggagcctccgccgccgcgcggccccaacagggcgcacctcaacgcgctgctcacgtcgtacggccgccgcggccgcctccgcgacgcccagctcctgttcgaccaaatgcccagccgcgacgtcatctcctggaccgccctcctcaccgcctacgccgacgggggagacctcgcctccgcgcgcctcgtcttcgacgacatgccccgccgcaacgccccgtcctggaacgcgctgctctccgtctacctccgcgcggcgcgcccgcgggctgcccacgcgctcttctacaagatgccggccaagaacgcggtgtcctacggtgccatcatctcggggctcgccaaggcggagatgctgcatgaggcggagttggtgtatgaggagatgccatggcagtggcgtgacccagtagggtcgaatgcgctgatggctgggtacttgagggtcggggagcttgccatggcactgagggtgttcgagggaatgacggtgagggatgtcatttcctggagcgccatggtcgatggcctctgtaaacatgggagtgtgtcagaggcgaggagggtgtttgacgccatgccagagcggaatgtggtgtcttggacttcgatgattcggggatatgtgaaacgtgggatgtgcagagatggtctcctcctgttcctgaatatgagaagagaaggtgttcaggttaacacaacgacactctcagttgcgctggatgcttgtgctgcggccagtcttgccagagaagggattcagattcacaatttgattatatcaatgggatttgagctggatattttcttgggtgattcaataatcataatgtattctcgttttggttggatggttgatgcaaaaagggcgttcgactgcatgcagcagaaagacatagtatcatggaactcactgatcacaggttacgttcagcatgacatggttgaagaagcacatgtgctgttcaagttgatgcatcagaaggatgctgtttcttggacatcaatggttgttgggtttgctaacaggggttggatgagggaatctgttgaacttttcgagcaaatgccagtaaaagacgaggtcgcttggactgcgatcatttctagttttatcacaaatggggactatctaagtgcagtgcggtggttttgccgcatgtcacaagaaggatgcaaacctaacacaatagctttcagttgtctgctgagtgctttggctagcctggcaatgttgaatcagggaaggcaagctcatgcatattcgatcaacatgggatgggtgtttgactctgccgttcacacttctttggtatcgatgtatgcaaaatgtggaaggttggctgaggcttatcatgttttctcaagcattagcaacccaagccttattgctattaattctatgattacagcatttgtgcaacatggtttcgttgaagatgcgctgaaactatttaccaaaatgcaaaatgctggatacaagcctaatcatgttacatttttaggaattctgactggttgcgcacgtgctggttttgttcaacaaggttacaactactttgaatcaatgagaccagtttatggtgtagagccaaaccctgagcactacacatgtatggttgatcttttaggtcgtgcaggcctccttgctgaagcactggaaatgattaactcaatgccccagaatgatcattctgatgcatgggcagctttgctcagtgctagtagtctccattctaatctcgcttttgcaaaaatagcagcacagaagcttcttgagaaggatccttacgatgcaacggcttacacagtcctgtcaaggatgttctcctcagcagggatggaggatgaagaaatgctaaaagttgtacagctatccaacttggccagtaagaggcctggttatagccttattatgcaggataaggccactgaaatataacacatactgagaaccttctagttgactagttctagatctctgaccgatgaaaacaagaatgatcatgttacatggcactgctaaatgagaattaggatggcataaaaaagatatcacatgacttgtacataatgcctaaaatgtggatatctgaccaggtgcttggtgatatgctgttggcccagaactcgagatccatttttctggcaggtccttatttcttataggattaagtttgtccattttgatgcagctgagttttcacccttaactatgaaatcatctaacttgcactcttcaactaccaaaacgggcacaaataactccttttcaccacaaaaaaatgtcttatttggccagaataacactggtggttttaagggtaggggttacactgattttgatagttaaagggtgaacaatagatcctttcttttctgagggtaacaattagatagtattgtagttcatgaatttacagtatttgttatttaagacctgtcataatcttt

SEQ ID NO: 24691 - DNA, 2275 bp, Oryza sativa
  ref <308>: DATABASE ACCESSION NUMBER: AK100133
  ref <309>: DATABASE ENTRY DATE: 2002-08-28
gaggcgtcccattgtattttttttaatcatgtgcgatgatgatgacttcagtctgcagaggattagcccctttgttgttgtaatatttatacacacgttatttgcttctggacggccagccatgtataatactttgagacctctttctgtttctcctgttgtaaaatcttttgacagaataaacagccatagtctctccagaggcgagtacttcacttttaaaaaaaaaaaaaaaaaaaaaaaaaaaaaaaaaaaaaaaaaaaaaaaaaaaaaaaaaaaaaaaaaaaaaaaaaaaaaaaaaaaacttttccaaaggggttctttttttttttcgcccactcctccgcgctccagcagaagttggaggggttgccggcgatggtgcaggcggtgcagtccgacgacagcgccgtgcagctggaggccaccacgcagttccggaagctgctctccatcgagcggagtcctccaattgaggaggtgatcaacacaggggtggtgcctcgctttattgccttcctccaacgtgaggattatccccaactccagtttgaggctgcatgggcactcactaacattgcatcaggcacatcagataacaccaaagtggtagttgagtctggtgctgtgcccatctttgtcaaactgcttagctcccccagtgaggatgtccgtgagcaggctgtatgggctctgggaaatgtggctggtgactcaccaaaatgccgtgacctggtgcttgcaagtggtgggttatacccattgttgcaacagcttaatgagcacgccaagctctcaatgctcaggaatgccacatggacactgtcaaacttctgccgtgggaagcctcagcctaattttgagcaggtcaaaccagcgctttctgcactgcagcgcctcatccattctcaggacgaggaggtcctgactgatgcctgctgggctctttcttatttgtctgatggaactaatgataagatccaagctgtgatagaatcaggagtgttcccaaggcttgtggaacttctcatgcatccttcggcttcagtgctcattccagctttgcgcacggtgggtaacatcgtcactggggatgacatgcagactcagtgtgtcatcgatcatcaagctcttccatgtctcttgaacctcttgaccaacaatcataagaaaagcatcaagaaagaagcatgctggactatctcaaacatcactgctggcaatagggaacagattcaggctgtgatcaatgcaaacataattgctcctctagtacatctgctgcaaactgctgaatttgacatcaagaaagaggctgcgtgggcaatctcaaatgccacttctggtggaacacatgatcagattaagtaccttgttgcccagggttgcatcaagccactctgtgatctgcttgtttgcccagatcccaggatcgtgacagtttgcttggaaggtcttgagaacatcttgaaggttggagaggcagaaaagaaccttggggcaggggatgtcaattcctatgctcagatgattgatgatgctgagggactggagaagattgagaaccttcagagccatgacaacactgaaatatatgagaaggcagttaaaatgctcgagtcctactggttggaggaggaagatgatgccatgcccccaggtgacaacgctcaaaacggcttcaactttggaaaccagcagcccaatgttccatcgggtggattcaactttggctgaagatacctatctggaatgatgtaccactgttccttagctacttgcttggggctagtcagagttgggggagtcttgtcgttggagtcttggttgggtcctggcggtctggtctcaggcagtcgtaatgtcagtcccagtccttgggcttgcatcatcgccagtggtgcagcttggtcagtggtcagtcttgaaggtcatccagttggatttacttgggctctgtctcacctgtggtgggagcatgggggagagggcgtccagagccgcaggtgttgtcgggagagagttaccagttggcttttgcctcctatatagcatgaatgaattatattatcatctgttttgaggtaaaaagaaccttgaaagatagggtttattcatggttgtgtcagtttttgtcaagtctctatgtgctgtattaacatgtcagaagagtattggcacaacttataaacatcaaatagcaactgggtttttggtggagtcccatgctggtctgtctattcattggtttgttgttgtaatgtttttaatgtcg

SEQ ID NO: 24692 - DNA, 3681 bp, Oryza sativa
  ref <308>: DATABASE ACCESSION NUMBER: AK100134
  ref <309>: DATABASE ENTRY DATE: 2002-08-28
gagagagagaggggctcgacgatgcttgctccagtgaatcaccttgctgaactttttcttctggctggtgatatccatgctacattgtacactggctcaaaagctatgcacagtgaaattctgaacatattcaaggaagagactggaaaatttagtaaattctcagctgctcagaatgtcaagattacgctgcaaagaaggttccagaattatattaatgatagttctcgtcaaaaacagtttgggatgttccttggattgaggctgtttaagcatctcccatccatccctatttctcctctcaaagtactttcgaggccatctggatgcatgttaaaaccagttcctagtatcaccccagtggctgatggtggttctagtcttctcagcttcaaaaagaaggatctgacttgggtatgtcagcaaggtgctgattatgttgaactttttatataccttggagaaccttgtcaagtttgtcagcttcttcttactgtctctcatggtgttgatgattcttcatatccagcaactattgatgttagagttggctccagcgtagatacccttaagcttgttcttgagggtgcttgcattccacaatgctccaatgggacgaatttgctgatcccacttactggaagaattgatccagaggacttagctgtgacaggtaaaagtgctcgtccaaatattcaagagagcacttaccttcctttgctgtatgactttgaagagctggaaggagaattaaactttttaaatagagttgttgcattatcttttcatccatcggccagggcaagaacgccaattactcttggtgagattgaagtgcttggggtttctcttccatgggtggatatgttaacagatagcagacgtggccctgattttgtagagcttctacatgaaaagttgtctagtattcctggcaatgttggttcaaaggaatttgcaaattcttcaaattctttcttgcctcaaaatggtattgttggtagtgaaagagcctcttctactaaaagctcttcatcagttctacaaggcagttcaggaaattttgtggactttctcactggtgattttgacatgccgaatcaatcagatgcaactgaaaatacatcttttgttaatgtggaacaaacgaactcatttgatgatgactttgatgttaaccctttcgccactgcatcagaaacaccttctgctaaagtgaatagccaggttgaagaatttgacagtgcacacatttatcttaagttttttgaatcattttctggaaatatcaagggtaagggtcttaacttcgagcaaatgatgaagcttgaaataaagcgtctttgtcttgatctttctgctgtcgaaagagaccgggcgttattatcgattggtgttattcctgccacagtagacccaaaccgctcggttgattattcttacctgttgaagttgtctagccttgctgattatctggcattgctgggccatactgtccatgaggatcgtgtcaatgcttcaatagggctcgaaaatatcaatggtcatgctatagacttttggaatatttgtgaaaatgatgagtcatgcacaggtgatgtatgtgaagtccgtgctttgtcttcatcacacgcttctgccactagtgagaactcatcaatatttgtagagtgttcccagtgtggaaggacagcatgcaaagcatgttgtgctgggaaaggagcctttcttttgcttaataacacttacagagatctgaagatatatggtgggagtcaaggtggtggctattcagctcttgcagataattttgtgtgcaaatcatgctgcagtgaggtgatcaaacatgcattatatgtggattatgtgagggttcttcgcagcctgcgaaaaaaaggtcgtaccgagcaagcagtactgaaagctgtgaatcaggtctgtggacttgaattcagtaggatatccgatttcacaaaaagtgttcaatatggtcaaaagcaattgaagcagctccttgatggtgaagaatcccttgcagaatttccatatgcaagctttttacaaacggtagaaacttctgatgactcagaaccactgttgtcattactggcaccatttggtattggagagcaaaagtcttattggaaagctccactggataacacatctgtggagttctcaattgttcttggtggtctatctgatgtttcaggagctgcaataattgttggttcctgtggatactcaacatctgactgcccaattgtggagatatgggctggtaataaaataaatcgagaagatcgaacatttataggaaaatgggatgtacacgacatgatgttgtcatctccacatctttctggatccgaaaaaacaagtagcatgagtgaagagccaaggcacattaaatttcacttcccaaaccctatccgctgtcgtattgtttcaataaagatgacactcaaccatattgactctcattcaaccaagttcagagaggaatttgatcttttgtcattaagtgaaggcacattttctgaatccaagccaaccactccacagaattcatttatccatgcaaaaaggattgttatttttggcaacactctgagaaaggagacaaatcctgacacatctatgggaataatgaggatgaagacttatttagatagatcgcaaccactgggcagatttaggattccagttgaagctgaaaggctgagagataatgatcttgttttggagcaatatctcttgcctaatacacctggaatagctggatttcgccttgatttcttcaatgttgttagactgcgggtgacccattcaccttcctcgtcagagttggatatgaaggaattttcattgatacctatggaagatagagttataaatccagcaattctttatttacaagtcacaattgttaaggagtctggaaagctggttgttgaggaataccgtttaccagaagtaaaagtgaatactccactctattatgattttcaagatttacaacaagatgtccgttgtgttctctttagattacttggggatgtcactgcctttgtggatgacattgccgagattgatggctcaaacttgcgaaatcttcctttggccactgggttgtctttgtcaaataagatcaagttgtattactatgctgatacatatgaaatgggaaagattggaagtctctcagcagtatgatatattgatatgtgaggttgtatctgccatgatggaatattgaactgatcatacctggtggtagtcagattgatgatgttgtaaactattggttttacccggacatgcagtgaatacagatgcagccgctgtggtgacaagctgacagcggccacgatgctgcaagaaatacagttgctttcatgatgtttcgttgttttctactttgatcttccagtgatctgattcaaggaatctgggaatttgctgaatttctggaaattcattttttttggtatagaatgtctagaaattcaacttattgtaggtttttctgccacgagagattgatttcgcttttcagtgttgcaagttacacttaaatacatgtatgaagtctttatgtctgtataggtgtaggaaccaaatttgtatgagttattttttgggtaaatattttgggaaaggagtatttaccaaattact

SEQ ID NO: 24693 - DNA, 4227 bp, Oryza sativa
  ref <308>: DATABASE ACCESSION NUMBER: AK100135
  ref <309>: DATABASE ENTRY DATE: 2002-08-28
aacgcgctcggcattctgcccaaccggaagcagaccatgcccgtcctccacgacgtcagcggcatcatcaagccccgcaggatgactctgctgttaggcccaccggggtcaggcaagaccaccttgctgctcgcgttggccggaaggctcggcaaagatctcaaggcttcaggaaaagtgacctacaacgggcacggcatggaggaattcgtgccggagaggacggcggcttacatcagccagcacgacctccacatcggagagatgaccgtcagggagacacttgccttctcggcacgatgccagggtgttggcagtcgctttgatatgttgactgagctgtcaaggcgagagaaggcagcgaacattaagcctgacgccgatatcgatgcattcatgaaggcggctgcaatgggaggacaggaggcaaacgtgaacactgactatatactgaagatattaggactagagatatgcgctgacacgatggttggggacgagatgctgaggggcatctcaggtgggcaaagaaagcgtgttacgactggtgagatgctggttgggccagccagggcgctcttcatggacgagatctcaactgggcttgacagctccactacattccagatagtgaattcgcttaggcaaactgtccacatcctcggtggcacagctgttatctccctgctgcagccggcgcctgagacttacaacttgtttgatgatatcatcctcctctcagacggtcagattgtgtaccagggcccccgagaggatgtgcttgaattcttcgagtccatggggtttaagtgtcctgacaggaagggtgttgccgacttcttgcaagaagtgacttctaagaaagatcaaaggcagtactgggcgaggcatgacaagccctacaggtttgtgacggttaaggaatttgtgagtgcattccagtcgttccacacagggagagctatagcaaacgaacttgctgttccgtttgataagagtaagagccatcctgccgcactggctaccacaaggtacggtgctcctggcaaggagctgctgaaggcaaatattgacagggagattctcctcatgaagaggaactctttcgtctacatgttcagaaccttccagttgatggtggtgtcactcattgcaatgacactcttcttccgtacgaaaatgaaacgtgattctgtgaccagcgggggcatctacatgggcgcactcttctttggtgtgcttatgatcatgttcaatggtttctcagagcttgcgctcactgtctttaagttgcctgttttcttcaagcagagggatctccttttttatcctgcatggtcgtacactataccctcatggattctcaagatcccaatcacgtttattgaggttggtgggtatgtgttcttaacatactacgtcattgggtttgactcaaacgtgggcagcttcttcaagcagtatttgctcatgttagcaatcaatcagatggcgggatcacttttccgattcattggtggggcagcgaggaacatgattgttgcaaatgtctttgcatcattcatgctgctaatttttatggtattgggtggattcattctagcaagagagcaagtgaagaaatggtggatttggggctactggatatccccgatgatgtacgcccagaatgccatctcagttaatgaactcatggggcacagctggaacaaaattgtgaatagctctgcctccaatgagacccttggtgtgcaagtcctcaagtcccgtggagtattccctgaagccaggtggtattggattgggtttggtgcaatgatcggcttcaccatccttttcaatgctctcttcacccttgcccttacatacctcaggccatatggaaattcccgtcagtcagtatcagaagaggaactgaaagagaagcgtgccaatctgaatggtgagattgtgggtgacgttcacttgtcatctggaagtacgcgtaggccaatgggaaacggcactgaaaatgattcaacaattgttgatgatgatactgaggttactcaaagggggatggttctcccatttactccgctttcactcagctttgacaatgtcagatattctgttgacatgccacaggaaatgaaagcacaaggtgtagctgatgaccggttggagctcctcaaaggtgttagtggttcattcaggccaggggtgttgactgcactaatgggtgtcagtggtgctggcaagacaacactgatggatgtattggctgggagaaagacaggtgggtacattgaaggaagcatcaacatttcaggatatccaaagaaacaagagacttttgcacgtgtgtctggatactgtgagcagaacgatatccactcaccgcaggtcacagtctatgagtcgctacttttctcagcatggctccgtcttcctgaggatgtagattccaacactagaaagatgttcattgaggaggtgatggagcttgtggagctcaagtcactgagagatgctttggttgggcttcctggagtgaatggtctgtccactgaacaaagaaagaggctaacaatcgcagtggagcttgttgcaaacccttcgattatattcatggacgagccaacctcagggcttgatgcacgagcagctgcaattgtgatgaggacagtgaggaacactgttaatactggcagaactgtggtgtgcacaattcatcagcctagcattgacatatttgaagcatttgatgagcttttcctgatgaagcgaggtggtgaagagatctatgctggtccactaggccatcattcttcggagctgatcaagtattttgagagtatcccaggggtcagcaaaatcaaagatggctataacccagcaacatggatgttggaggtgacaacaattggtcaagagcaggcacttggtgttgattttagtgatatatacaagaagtctgaactttaccagaggaacaaggccttgataaaggacctgagccaaccagcccccgattcaagtgacctgtatttccctacccaatattctcagtcttctttaacacaatgcatggcttgcctgtggaagcaaaacctgtcatactggaggaaccctccttacaatgccgttaggttctttttcactactgtcattgctcttctctttggtaccatcttctgggaccttggcggcaaagtgacgaagtcacaagacttgttcaatgccatggggtcaatgtatgcagcagtgctgttcatcggtgtcatgaactgtacatctgttcagccagtggtggccgtggagcggacagtcttttaccgtgaaaggggctgccggcatgtactcggcgtttccatatgcatttggccaggttgtcattgagatcccatacacactggttcaggctactgtatacgggatcatagtgtatgcgatgattgggttcgagtggacggctgccaagttcttctggtacctcttcttcatggtcttcacgctcctctacttcacattctacggcatgatggcggtcggcctgacaccgaactaccacattgcctcgatcgtctcatcggcgttctacgccatctggaatctcttctccggcttcgtcatcccccgacctagagtcccaatctggtggagatggtattgctgggcgtgccccgtcgcgtggacgctgtacggcctcgtcgtctcccagttcggtgacatcgagacgccgatggaagacggcacccctgtgaaggtgtttgtggagaactacttcggcttcaagcacagctggttgggctgggtggccaccgtggtcgctgccttcgctttcctcttcgcttccttgtttggcttcgctatcatgaagttcaacttccagaagagatgatgatgacaagggatattacattcattgagttgcaaacgctacctgaaatttgtgcatatcattggatctaaagaattttttttttgttgccattagaatattgtaaatcataccagcctttcccccttatttttatagaaagattgtactactgttacacctagtaattttgttattagtacccttctttttatagaaagatggtactacttttatttttaatttttatatggggttgtctagtgttcagttgactgaactcacattttgctcgatgtaaatgaagaacagttctgctgttcgtcactactatttttgttaattgtattgcccagttttcctcg

SEQ ID NO: 24694 - DNA, 4892 bp, Oryza sativa
  ref <308>: DATABASE ACCESSION NUMBER: AK100136
  ref <309>: DATABASE ENTRY DATE: 2002-08-28
gtctactcactcactcccctgctgctttgcgttagccatccggagtgacttccattccggtctcacagaagtcaaccaaccccttccaggggctggatctggccggcgagcggcagggacagcagagctgcgcgtccctcctgcttcaggccaagaggaggcggcggatctggggcgggcgggccttccttgctgtctacggcaggcttgttcccgacccccagtttgcaagcatggagctggcgacgggggcgatgaggagcctgctgcccaagctgcttcagctgctcgagaaagagtacggcctgcaaacgggcgtgagggagaagatcaagtctctcacgggagctcgatgtcgtgcacgccgtcctccgcaagatcggcgatgtgccatcggagcaggtcgatgagctggtcaagctttgggcgcgcgatgtcagggaggcatcctacgaaatggaggacatcgtcgacacattcttggtgcacgacgatggccctgaccccaccgatccacacatgctcctgcgcctccggaagaagttaggcaagctgttcaagaagagcaaggctcgccgtaagatctctaacctgatccaagacattaacaagaagttcgagcaggtgaaagcaaggcatgtcaagtacacagtcgacagcgttgtcctcaagtctctagcggcaacgaccatcgatcctcgtctccagaatctgtacaaaagggcaacagagcttgttggcattgacgggccaagggacgatctcataaacaagctatccctggggggtgatgttgatgtgtccgacaagaagatgaaagtcatctctgtcgttggatttggaggactcggcaagaccactcttgccaaagctgtctatgaccacttcaaaccgcatttcaagtgcagggcttctgttccagtcgaccagaatcctgacatgaataaagcattcgatgaccaggttgaaccgcatttcgaatgcggagcttttgttccagtgggtcgtaatcctgacatgaagaaagtctttagagacattctcattgatcttgacaaggaaaagtacacgaatccgaatatgatggtgttggatgaaaagcagctcatggacgaactcaaggaattcgtcaaggagaagaggtgtttcattgttattgatgatatatgggacaaggagtcatggaaattaatcagatgtgctctgcaagaaagtgattgtggaagtagacttgtcataactactcgtatttctgaagttgccacacatgctggtgaagcttacaaaattcagccactttctcgtgataactctgaaaaattattgtatgcaagaatagttgatggtgaatggaagtatttcgataatccatcagctaaggcatgtgaaaaaattttgaagaaatgtggtggtgtaccattagctatcattacaatagctagtttgttggccagtaaaccaggggaggactggtctgaggtctacaactctgtcggttttgggcatgaagacaatgatgatgtaggtaatactagaaggatattgtcttttagctactatgatctgtcttcacatttaaaagattgcttattgtatctatgtgtatttcccgaagatcatgtgatagagaaaaatagtttgatatggaagtggatagctgaaggtttcatccatgaggaactagcagcagggttaggattatttgagctcggggagaggtgcttcaatgagttgataaatagaagcatgatccagccagtggagacaaaacatgaagggtatgtagatggttgctgcgttcatgatatggttcttgatatgatccactcattatcgagtgaagaaaactttgtcactgtattgaatggtgatgagcgacagaaacttccggggagcattgctcgcaggttagccctgcagcgtgttctagtgcacaaggatggtcagctagctaatatcactctgaagaatgtgagatcccttattgccagtcagtgcttcggttcattatgcctacacactccggttttacgtgtattagatgtgataaactgtgcagaaagtgagacgcctaatgttttggaagatagggacaaaactatgccaagccatcttgggagtttacttcacctgaggtacctcgggttagtagatacatatatcactaagctgcccagggaagtaaggtatctcaagtttctgcagacactggatttaaggggaagtcgcataaaggagctgccagaggaggtgggactgctgacacaacttgtttgcctacgagctgattgggaaataatggtgaagattggtttgatcggtaagttgacctcattgcaagagctttggatagagcctgctgctgctgtttatgatgacgatgctgcttctgttgatgatgatgatgatgctgctgctgttgatgatactacgaagtctacgatgaagtttgtgaatgagctgggcctactgagggaactaagggtgctccggacttattttgaggatttgaatgagagcatggagagagctttgttggaatccctaagcaagctgcacaatatccgggacctgcacattgagggcccacccctagtgacaaggagagtgacaagcagtgcaagatctgtctcctgcctgcatctccgatacctgtgtctgaattgctttgtgttctctggactgccagcatggattaaatcatcgcttgctccgaacctctcctgtctggatgtggttgtgctaattgtgaaagagcaggacatggaaacccttgcgaggttgccagagctccgctgccttgtgctgcgtttgcatgagaccgaattggttagcataaagattcatactgaagatgttggctactttcggaagttgagaatcttaaggatacttggtacatctatctggtttgatctgcacggcagcaagtgcaacatcacagacaatagaagcttagcatctattatcatgccaagtcttgaattcctcgagtttgctgtccatatgcggttcctgaaagatgcaacccagcttggttttgacaagctgcttagcttcgagaagcttggaagaagttcgctccagaaagtcaccatagtactgaaatgtggagatgcccgtctgtcagaggtggaggaagtggctgctgcattgatgaactcagctgcggtccatcccaaacacccaactgttcaaaccaaatggcaagacgaacaagctgtgctctcaccctaccaagaggcatatatgcatgtgagcagaaccccggagttggtaaatgaggcctggaaggcgaacattgttagctctggccgtattcgagcactgcgtatgccagttacagaagcatcttcaagcaaagttatctgtctgctttatagaaaaagtgggaagggacttttagctctcagctcaaatgctgttcataagctgtggaaatgggagagcaatgacaagaatcctgctggcatggttagacaggagaactaaattattttgatttcaacagcgcagttctgtttggttgttttcttaaaaccatcactactttttgttagtccaccacatctgtcccacctcaagtgtggcaaccggaaagtgacattctaatgaatgacactgctaatggcgaccctgaagaagcagctgcctgcagtctactatccaaaaatgactgctatctaatttctgcatctggtggcaaagtttcgttgttcaacatgttaaatttcaagaccatgactactttcatagcacctccaccctctgcaactttcctcgcattccacccgcatgacaataacatcatagctattggaacggatgactcttcgattctactctacaatatccgtgttgacgaggttaaatgggtgctcaagggccatcagaaaaagataactggactggtattctcgctatcaatgaatgtgcttgtatcttcaggtgctgattctcaggtgtaaattctaatatatatcaaagatttttggactggcaattttgttgtttattgaatggatgctgagttaaatctatgtgtttggagtatggaagattgggcgaagaagaaatccagatatatccaacctccatctaatcattctggagctttagttggtgatataatggtgcagtttcactatgaccaaaagcgccttttagtagttcatgagagccaattggcgatctacgatgaggagctagaatgcttgtgctcatggttcccaagtgatccactctctgctccagtttcgagtgcagtatactcatcggatggcttattgatctacgctggattctgtgatggtgcaattggaatatttcaagtggaatctctcatgttacagtgcaggattgcaccttctgcctatataccatcttcagtttctagcggtggtgaaattgtgtatcccatggttgtcgctgcgcatccctggaagcctaaccagtttgcagtcggcatgagcgatggtgcagttcatgtgctggagccgttggacacacccgatgatatcatcagcaattcaattcagcaggggcgttttggtgacagcggatgatgtgtggacagggtgctcaatacggttggcaggctggatggcaatacttgcttggcctatggtgatagattatttttttcgccagccggttaagaaagcagaccaaatttcatcaagggaagaagtacttactacaaactagaaagcaaactggaaaggtagcccgcgtgaatgcgcgggcatgcttgttattttgtttaaaaacaggtctaccaaaataagtttaaattaatgttaggtatttccctttttaattgattgttcattgtttttttaaaaaaaaaatcttgagaaactcgtattgctcataaatgtatttttttccct

SEQ ID NO: 24695 - DNA, 2989 bp, Oryza sativa
  ref <308>: DATABASE ACCESSION NUMBER: AK100137
  ref <309>: DATABASE ENTRY DATE: 2002-08-28
gaggctcagttctcctgttggtagcagttgccttccctgttcctagcttcacatcgtcgtcgtcaagctgcaggtttctgaacaagagatcgtcacccatgcggccatggtggggcaacctactctgatcagcttggctctggttctattctagcctagagcgcgttgatcaatcgccgatgctctggcggccggagttcttgcgccatggcaaccgttcttgagatgctcgtgcagctcgccgtcgttgtcacggtgctatgcgccgccgtgcgagcgtacaccccggcggacagctacctcttcctctgcggcacgtccgggaacgccaccgtcgatggccggacgttcgtcggggacgctggtctgccggcctcggtgctgatggcgccccagagcaccgaggccaacatgccggcgaaccaggtcactggcgccggcgacgactcgccggcgctgtaccagtcagcgcgcgtgttcacggcgccggccaactacgcgttctccgctaagcctggccgccacttcgtccgcctccgcttcttccccttccggtaccagtcttacgacctcgccgcggacgcggcgttcaatgtgtccgtgcagggcgtggtgttcgtcgacgggtacacgcccaagaacggcacggccgtggtcagggagttctccgtgaacatcaccggtagggcgctggtgatcgcgttcacgccgacgggcaagaaggtggcgttcgtcaacgccatcgaggtggtgtcccatcccgacgagctcatcggcgacaccgcgccgatggtgaatccgcggaaccagtcccagtacaccgggttgacggcgaaggcgctggagacggtgcaccggatcaacatgggagagcccaaggtcacgccgaacaacgacacgctgtggaggacatggctgccggactggaccttcctgcacgagagcagcttcgcggcgcacaatcaagtgtctccggcgatgatcaagtaccaaagtggctacgcgacctcgctgacggcgccctccgcggtgtacaccaccgtgacggagttgaacacgacggcggcgatggtcggcaacacgcaggcgcagctcaacctgacgtggaagttcaacgcaccggccgtctcggactacctcctccggctccacttgtgcgacatcgtcagcaaggcgacgctcggtgtggtgttcaatgtctacgtcggccagtggcgggttctccaagactacgagtcttccggcgacacgttcagccttcttgccacgccgctctataaggacttcgtccttgccgccagtgatgcggcgaagggtacaatcacggtgagcatcgggtcatcgacggcaaccaacgcgttgcccggcggcttcctgaacggcctcgagatcatgagaattgtcgggagcaccggctccatcgacggcgccacgtcgccgcgcggctcaaagatcaagaccgggatcatcgccggatcggccgtgggcggggcggtgttggcgattgctctcgggtgcgtcgccgtcaggatgctgcggaggaagaagaagccggtgaagcagccgtcgaacacctgggtgccgttctcggcgagcgcgctgggcgcccgctctcgcaccagcttcggcaggagcagcatcgtcaacgtcgtcacgctggggcagaacggcgccggcgccggcgccgggtaccgcttcccgttcgcggcgctgcaggaggcgacgggcgggttcgaggaggagatggtgatcggcgtgggcgggttcgggaaggtgtacaggggcacgctccgggacggcacgcaggtggccgtgaagcgcgggaaccggctgtcgcagcaggggctcaacgagttccgcacggagatcgagctgctgtcccagctgcgccaccgccacctcgtctcgctcatcggctactgcgacgagcgcggcgagatgatcctggtgtacgagtacatggcgaagggcacgctccggagccacctgtacggctccgacctgccgccgctgccgtggaagcagaggctggaggcgtgcatcggggccgcgagggggctgcactacctgcacaccggctcggccaaggcgatcatccaccgggacgtcaagtcggccaacatcctcctcgacgacggcttcatggccaaggtcgccgacttcgggctgtccaagaccgggccggagctggacaagacgcacgtcagcaccgccgtcaagggcagcttcgggtacctcgacccggagtacttccggcggcagatgctgacggagaagtccgacgtctactccttcggcgtcgtcctgctcgaggtgctctgcgcccgcgccgtcatcgacccgacgctgccccgggagatggtgaacctggcggagtgggcgacgcggcggctcagggacggcgagctcgaccggatcgtggaccagaaaattgccgggacgatacggccggactcgctcaagaagttcgccgacaccgccgagaagtgcctcgcggagtacggcgtggagcggccgagcatgggggacgtgctctggtgcctcgagtacgcgctgcagctgcaggtggcgtcgccggacagctctgtcacgacgcttcagcgcagctcgtcgatctcaagcgtcgtgacagacgccaccgtgagtgcgaacctgggggacctcgacggcatgtccatgaagagagtattctcaaagatgctcaagagcgaggaagagggcaggtgaaggattgaagcaagaaatgttctagtatactagcatctggtacacaataggattgcgtatatctcaattttgatcttatatgcatgtaaatttcaacaaatgatgtacatttttttttttgcatgtaggagaaagatgcactaaactgcattatggtacagtgataggataccacagttggcaatgtaggagtatatcacgccagtaaacacaatgcaaatgcaaagcaacacaccagtaataacgagtatatattctcacg

SEQ ID NO: 24696 - DNA, 1128 bp, Oryza sativa
  ref <308>: DATABASE ACCESSION NUMBER: AK100138
  ref <309>: DATABASE ENTRY DATE: 2002-08-28
caaccaaagtccaaaggctattctgaaccgaagtcctcccacaccaaaacttcgaggcccccgtcgcggcaccctcctccgccgccggatctccaccggagtacggcgccggccaccccctcctcccccggatcttcaccgccggtgaagtactgaggtgatgactacatcagagtcagtacaagaaaccttgggattggatttccctcatcctagcaaacctcgggtcctccttgctgcctctggaagcgtcgctgctataaaatttgagagcctttgccgtagcttctcggaatgggcagaagtcagagccgtcgccaccaaggcttcattacattttattgatagaacgtctctgcctagcaatattattctttacactgatgatgatgaatggtctacctggaagaagataggggatgaagttttgcacattgaactgcgaaaatgggcagatatcatggtgattgcgccattatcagctaataccctagctaagattgctggtggtttatgtgacaacctcttgacatgcatagtgagagcatgggactacagcaaaccactctttgttgccccagctatgaacaccttcatgtggaacaacccgttcaccagtcgtcatcttgagacaatcaacctgctaggtatatctttggtccctcccattaccaaaaggctggcctgtggtgattatggtaatggtgcaatggctgagccttctgtgatcgattccaccgtcaggcttgcttgcaagagacagccacttaatacaaatagttcacctgtggttcctgccggcagaaacctcccatctagctgatgcggcaactattctgttcaagattaaactctggacctagttttctatggtaaagagtacttcgtgtcacaaaatgaaatgttaagtgatgtctatgtcggccaacatagcacctttattggccagttgttgtactactattagtgatatggtaggacgtggagattggagaaaggctattgtcccagcactttaatgttgcttttccaaatttcttgtgacataatgctaaggtgctgatgaatatgttcatgttgtagcactatttttttctgcaaatgtttgcaaagactcgtgatggaatc

SEQ ID NO: 24697 - DNA, 1502 bp, Oryza sativa
  ref <308>: DATABASE ACCESSION NUMBER: AK100139
  ref <309>: DATABASE ENTRY DATE: 2002-08-28
ttgggggaaagtttccgaaatccccgattcttctccttgtaggaaaaggcattgacttgccccttcctccttcgatccgcggtctagccagctggttgctgattcgctgcttgttcggattgattcgattcgtcgtccatggatcgtcgtgacgattcttgctgccccggcggcggcggcggcgtctcatctctgatcggagaatttgttggggacgtggtgatgtggcggcggggcgacgtgagcgcctgcctgctggcggcgaccgtctccggctggctgctcttcggctccggcggctacaccttcctctccctcgcctccaacgtcctcctcctcctcctcaccgtcctcttcctctgggccaaggccgcccgcctcctcaacaggaatggaatttctgttggactctactttccattttgggatacagatttcagttgatagttaaccaatggaaggaacaatccaggcacttaattcttatcatcatcacagctttcactgttgttttgacattcctccatcaatttaatcattattacttcagttagaggattaggtggatgctttgaactttgaccaaatttatgctaattgacaatctaacaaccagccaggtgatactgatgtcagattaggtacgtgctgtaaactattttaactgaaatgctaagggtagacaatgataagctttgtcttgcaaacagcttactgttttttacttcaatcagatgagtgaattgctcatcgctgtggacatttggcaaatattttaaacgatgctggttgtgttgtgcaaacaaatgaggttgcaggccagagccacctattccagagatgcgcatttcgcagcaggttgtgaatgaagtggcagccctgctgcattctggcatgaacacggtcttctctgtcttccatgacatcgcactcgggaaagactcggtgctattttatcaagtcttccttagcctgtggatcatttctatcattggcagcctgactgatttcaccactttatgttacacaagtattgttgctgttctgaccatccctgcattgtaccagaagtatgaggaatgcattgacagatacatgaggtttgcgtatttgaacctgcagatgtacgagatggtgtacgagagattctctgccaagtgcttccacagggctagggatttggttattgaggttctgaaagagccatgacctgatcaatattgtgtttgcttgtacaagatggtggaattgggtttttaactggatgatgattgatttgttgtttcctgtatagagagagggataggttgattgattttttcccccatggagtgctggttttgtttgtttgatttcaatcatatgcagatagttggggccttgatggtcagagatgcagttcttgttgagatgcctgtaatggttgcgtttgtaaattgtgtccaaagggacaaaacagtgtgcagattttggtttcttttggccttcgatcactagtttcc

SEQ ID NO: 24698 - DNA, 1368 bp, Oryza sativa; identical to SEQ ID NO: 22069
  ref <308>: DATABASE ACCESSION NUMBER: AK100140
  ref <309>: DATABASE ENTRY DATE: 2002-08-28

SEQ ID NO: 24699 - DNA, 1351 bp, Oryza sativa
  ref <308>: DATABASE ACCESSION NUMBER: AK100141
  ref <309>: DATABASE ENTRY DATE: 2002-08-28
ggttgcccaactctgtgctccgccgtgttgccgccgccgccatgggctcctgcctctcctccgacctgcctccccgcgccggcgccggcgcgggagcgtcacccgggtggccgcagcggtggcggaggaggaggcagcggggggtggagcggggcggggctgtttccggcggcggcggcggcgtcttctccatcggcgtcggcggcaagaagctgcaccacggcggcggaggaggaggggagatgacggaggaggagctcgcgaaggtcgaggggagggtgtgcgtcaacggcgcgagcgcggcggcgtgcctgcacacgcagcaggggcggaagggcaccaaccaggacgccatggtcgtgtgggagaactttaatacaagtgatagtgtcttctgtggtgtgtttgatggtcatggtccatatggtcattttgttgccaagaaggtcagagattctcttcctgtcaaaatacgcacactatggaaaaccagtgccaacgaggacactagttcccaccaaaatggaagcatttctggaagtgttaattcagaagagtcacctgttgttgatgatgaatggggtgaatatgctgatgacagcgagaagcttcctgagatgtttcttccacttaagcagtcttattttaaggctttcaaattgatggacaaggaactcaaaatgcaccctacagttgattgcttttgcagtggatcaacagcagtcacgttagtaaaacagggattggatcttgtggttgggaaccttggggactcgagagcaataatggggacacgagatgctgccaataatctaactgctgtacaactcacagttgatttgaagcctaaccttccaagggaagctgcgaggatccagcagtgtaggggaagagtttttgctcttcaggatgaaccagaagttgccagagtatggttgccaaataatgactctcctggattggcaatggcaagagcttttggagacttctgccttaaagattatggtttaatatctgttccacagatatcctatcgtcgtcttactgaaaaggatgagttcataatactggccactgatggggtttgggacgtcctctcaaacaaggaggctgttgacatagtagccgcagctccatctcgtgcaacggctgccagggctcttgtcgactgtgctgtcagatcatggagattgaagttcccaacatccaagagcgatgactgcgctgttgtgtgcctattcttagaccatgcaaagtcacctgacttgattcaagagaacgagagcgaggaagaaactacagaggatgttgcaatcccagacaccgttgctaaggttgaccaagacattgc

SEQ ID NO: 24700 - DNA, 1393 bp, Oryza sativa
  ref <308>: DATABASE ACCESSION NUMBER: AK100142
  ref <309>: DATABASE ENTRY DATE: 2002-08-28
gacggcacgcaggtcgccgtcaagaacctgctcaacaacagggggcaggcagagagggagttcaaggttgaggtggaagcgattgggcgggtgcggcacaagaacctggttcggctgctgggatactgcgccgagggtaaccaaaggatgcttgtgtacgagtatgtcaataatggaaacttagagcaatggctccatggtgatgttggtcccgtaagccctctcacatgggatatgagaatgaagattatactaggaacagcaaaaggcttaatgtatctgcatgagggacttgagccaaaggtggttcatcgtgatgtcaagtcgagcaacatcctccttgacaagacctggaatgctaagctttctgattttgggctagcaaagcttttgggctcagagaggagttatgtaacaaccagagttatggggacatttgggtacgtagctccagagtatgctggtactggcatgttaaatgaaactagtgatgtctatagttttggaattcttatcatggaaataatatctggtcgggtaccagtggattacaacagaccaccaggggaggttaatcttgttgaatggctgaagacaatggtgagcaaccgaaactctgaaggggttttggatccaaagatgactgagaagcctacttctagggcactgaagaaggctttgttagtagctctgcgatgtgtagacccagaagcccgtaagaggccaaagattgggcatgtcattcacatgcttgaagttgatgattttccctacagagatgaacgtcgcggtggcaaagctccaggtcaagtgaaatcgggagaaataccgccagttgaagctggtgatagcagcgggaacaatacgccaaaagaaacaccaaaaggtcaaccgaaagatgaacctttcaagtggagaaatcaagcggcggcctagctattagcaagatggtgattcttctgaattcagtaagacgacgatttttctgaattcttacacctgatcaagaaaccgaatgccgcaaacttgcaaacagctcatttgctgctcgttagttgggttggggcacggaaacatggaacgcgccgagatcgtgagagcatctgtacattattgggttagtatgttagccatagcgattttttggttggtttatttggttatatttatgtactaagtgataattcttgtatgacaaattcatgttactcttgaggtaaaagttgatgagcggtgcttagataaaaccttccatgtagcaatatatcccccaaatgccagtttgctcatcagtcatcatacaatgctcagtttcttatacttttgagatccatacttgtcacctaaattgtgatgattcaatataccagactgaatcctcaggtgtgtgccc

SEQ ID NO: 24701 - DNA, 1577 bp, Oryza sativa
  ref <308>: DATABASE ACCESSION NUMBER: AK100143
  ref <309>: DATABASE ENTRY DATE: 2002-08-28
ggcccccacgacgctcgctctctcctctctctccctcttccgccgccgcgcttggggaaggaaggagaaagcaagccatcggcccccgcctccgcctccgaagggacattgttgctagttggtgatggctgagcaggctaatcaaccgactgtccttcagaagttcggtggccagttccaccttggctccagcttttctgaaggtgtacgggctcgtaacatctgcccatctgtctcatcctatgacaggcgctttaccacaaggagctacatgacccagggccttgtcaatggtggcatcaacgtcccaatgatgtcgtcctctccaatttttgctaatgctccagctgagaaaggtggcaaaaacttcatgattgatttcctcatgggtggagtgtcagccgcagtttcaaagactgctgctgctccgattgagcgtgtgaagctgcttatccagaaccaggatgaaatgatcaaggctggtaggctctcagagccatacaagggtattggggactgcttcggacgcactatcaaggatgagggttttgcttcattgtggagaggaaacactgccaatgtgatccgttacttccccacccaggctttgaactttgctttcaaggattacttcaagaggctgttcaacttcaagaaagacaaggatggttactggaagtggtttggtggcaaccttgcctctggtggtgctgctggtgcttcatctctgttttttgtgtactcccttgactatgctaggacaaggttggccaatgatgcgaaggctgccaagggaggaggtgaaaggcagttcaatggccttgtggatgtttaccgcaagactctcaagtcagatggcattgctgggttgtaccgtggatttaacatctcatgtgttgaaatcattgtctaccgtggtctgtactttggaatgtatgattctctgaagccagttgtactcactgggtctctccaggacaatttctttgcaagctttgcccttgggtggctgatcaccaacggtgcaggtcttgcctcttaccccattgataccgtccgcagaaggatgatgatgacctctggagaggctgtcaagtacaagagctccatggatgctttctcccagatcctgaagaacgagggtgccaagtcactgttcaagggtgctggtgccaacatcctacgtgccattgctggtgctggtgtgctctcaggctatgaccagctgcagatcctcttctttggaaagaagtacggctcgggcggtgcctaaactggcagaaaatgatgacgaacaagtgtttattcctggtcctgcactaacgggatctggtgaattttgcctttttaacattgaaaacaataataattcttgtaggggagaacactccccgacattcgttttttggtggaagcgtttatctccaaacattgtcataggcggaggcgttaatcgcaaacagtttaccatcatagggttgagtttgagttgagtctggccggctctgttatgtctggcgattttcctaccatacattaccctcggtgaaatatcgaaagattattgagttgctgtc

SEQ ID NO: 24702 - DNA, 2283 bp, Oryza sativa
  ref <308>: DATABASE ACCESSION NUMBER: AK100144
  ref <309>: DATABASE ENTRY DATE: 2002-08-28
gaaagtaaagaaacaacgaaaattgaagcagcacatcgattcatcgagagtaccaattcaattcggacatggccgtgttcatcatcgccaataatcctttggcgcgctatgccgtcttgtttgctgctgctgtctttcttgtcgccgccgcgcaggcacagcctaccacgcccccgccgccgccgccgccggagatggactgcaacggtatactcctcacctacaacctcgatcgccgtgacaagatcaggccattcgtcgccgcacccgaagccgacgcccagccctactccttccgcgccaccgccaccgtcctcaactccggcacccgcgctctccgctcctggacgctgcgcctcaccttccaccaccgcgaaatcctcgtccaactcgatggcgccgtgctcacctccggcgccgacctgccctacaacaccacggcagacaacgccacctccttctccggctacccgcagacggacctcctcaccccgatcgccaccgccggcgacctcaccaagatacaggccacgctcaacctggtcggcacgctgttcgcggggccaccgccgtacgtcccgctcccttccgcgctctcgctcgccgacccgtcctacacctgcccgccggccatcaacgtctccacgtcgaccctctcaacctgctgcatcctcacgccggaggccgcggcgaacgcgagcgccggcgacttggacgcgggcagggcgacgtcgtacctcccgcgcggcgcgggcgacctggtgatcacctacgacgtgctccaggcgcacgagaccacgtacctggcgcaggtgaccctggagaacgacgcgctgctgggccgcctcgacggctgggagctgtcgtgggagtggctccgcggcgagttcatcagctccatgcgaggagcctacccgcgccaggtcggcgccaccgactgcgtctacggcgcgcagggagccttctacaagggcctcgacttctccaaggtgctcaactgcgaccgcaagccggccgttcttgacctgccgccgtcgcgccgcggcgacgaggacatcggagggatcgaccactgctgccggaacggcaccatgctgcccaagtccgtggacgcggcgcagtccaagtcggcgttccagatggaggtgtacaagatgccgcctgacctcaaccggaccaagctgtacgctccggccaacttcagggtgtccggcgcgtcgccgctgaatccggagtacgcgtgcgggcagccggtgcgggtgaccccaacggagctccctgacccgagcgggctcgcgtcgacgacgctggcgctggcgacatggcaggtggtgtgcaacatgacggcggcgccgccgtccaagccgcccagctgctgcgtgaccttctccgcgttctacaacgagtcggtgatcccttgcagaacctgcgcgtgcggctgcccggcgagccccgcggcggcctgcagcacgacggcgccgtcgatgctcctgccgccgtacgcgctgctgatgccgttcgagaggcgggggagggaggcggtgtggtgggccggcgagaagcggctgggggtgccgaggccgatgccctgcggcgacagctgcggcgtgagcatcaactggcacgtggcgacggactacgccggcgggtggagcgcgcgggcgacgctgttcaactgggagggcgcggacgtggcggagtggttcttggcggtggcgatggagaagcaggcgtacgacgggttcgagcaggcgttcacgttcaacgccacggcgatggggaacggcaccaccatgatcttgatgaaggggagggaagggttccagtacctcaagagggagagcaacatgagcggcgtcgactaccccgtggccgggaagcagcagtcggtgctgctgttcaccaaaaagaggggcggcggcggcatcgacgtggtcggcggcgacgggttcccgacgagggtgttgttcaacgggcacgagtgcgccatgccgcagaggattccgagcagtgcccatcgtcgttgtcttgtcctattgtggactactcttcttgtattcatgtcgtccattctactggtgttgtcgctgctgtaaaaacgttcaacgcgtcgctggtagaggagacaggaggcgctgctaggatggtttgtgatatgatgtatggcggcggtgggggtggagatgagaggagggctagggttgtgatttatcgctattaaattttgtaacacattcagacatgtaaataatctctaatgaaaatgttatcaactacaaaatc

SEQ ID NO: 24703 - DNA, 2219 bp, Oryza sativa
  ref <308>: DATABASE ACCESSION NUMBER: AK100145
  ref <309>: DATABASE ENTRY DATE: 2002-08-28
ggccagggactccaactccaaccgccatgccgctcctccacgcggccaacctccgcgtcctcctcgccggcgccgccttgcgcacctctcctcccccgccgccaccgcgcgcgcctcctccccgtccgcccctccccctccggctcccccgccgccgccgcgcgtccgggccttcgcctcctaccgcgcctcgccgcctcccccgccgccgccccaaccatcctcgccgtcgccatcccgcgccctcgcctccgcggccgccgcgtgcgagcagggggcgaagcccgcgatctgcacggcggatgagctgcactacgtgcccgtgcccggcacagagtggcggctcgcgctctggcggtaccgcccgccgcctgaggcgcccaagaggaatcacccgctgatgctgctctcgggagtggccaccaatgcgattggatttgacctgtctcctggggcttcatttgcacgtcatatgtccatgcaagggtttgatacatggattgtcgaagtgcgtggtgcaggcctgagcatgcgtggatctgaactagctgtagctgacaccacatctgacatgtctcgaagttctgcattggatgagattactacacagaaattaaatggcgctggacctgccaaggatgattccacttgtctagctcaaaatttcgaagttccagtagtagaagataaatttgaagttccagtagtagaagataaggatgtaatagagagtaatgcattagaagaaccacagctggtgacaaagttatcaaatactttggcacgattgggtgatacattctcaggttatgtaaaagatagtcgactgagaagtatcgctgatggcttttttaatcaagtgtcagaacttgttcctgatgcctcattaactagtagtcttgaggaagtctcagaaaaaattttgggcttactggaattgccacaaacatcagcaatatcagatcaaataagccatttaagtctacgtcttgtgaatattcttggggaaggtcaacagaatatatcacctcggctatttggttggcaagaacgcctgtctgcaacaatagaagatctacagaaacaattggagctcattattagctatgattgggactttgaccattatttggaggaggatgtacctgccgcgatgaattatattaaacagcaaagcccaacaaaggatggcaaactgcttgccattggtcattcaatggggggaatattattatatgcaatggtttcaaagtgtggatgtgaaggtgctgagccagagctggtagcaattgttactttggcctcatcagttgactacacaacatctaactcatcactcaagttgctattgcctcttgcagacccagctgagatgttacgtgttcctgctatccctgtaggaacattactgtctaccacttaccctatatcgtctcgtgcaccctatattctgtcattgctgcgctctcaaatttcatcaaaggacatgatggatcctgatctgctttcgaagcttgtcttgaataacttctgcacggtgccagcaaaggttttactacagctgacaactgcattccgtgatggtgggctgcgcaacagggctggtacctttttcttcaagcagcatctgcacaaaatcaaagtgccaatacttgcccttgctggagatgaggatctgatttgccccccggaagctgtttatgaaacggtgaagttaattcctcagcatttggtgacatataaggtttttggaaagcccgaaggccctcattatgcgcattatgacttggttggagggcgaaaggctgtccacgaagtgtacccttgtataatagagttcctctcccagcatgatgaagtgtcttcctaagttttgttattggcgtaaatgttagatgttagagctccaacacgctattgcacgagtgcacaatttcatcctatattggaactgaaatcatcaaaatggtaatggaatggtgaggtacaaaagtgtgttattcgtttcgctcccttttctatatccaaggtccaagcttgtagtttattaccacaacagttgatttataacctatatatgtaaatgttttattccttcacaaaaagagacaagaggcttacacgggcacggtggcactgatcatcgcctgcagaaatgccagaaacacatatcactattcactagtaatgtcagataaataagaaaaggtctttttgcc

SEQ ID NO: 24704 - DNA, 741 bp, Oryza sativa
  ref <308>: DATABASE ACCESSION NUMBER: AK100146
  ref <309>: DATABASE ENTRY DATE: 2002-08-28
ggcacgcctgccaatcccgccacgttcttgcggcccagccatccatccaatcctccctcccccccccccccccccccttcctgcacgattcgcgcggatttccgcagcggcaaacattcgttcgatcaattgaccgatcggccatggcggccatggtggcgtccacggcgacctccttctcctaccacaagccgcgattcgcggtggagtgcaggaagaaggaccgggaccgggacagggacagggagcggccggagcgggagaaggagcacaagtacccgttcaaggtcgtcgagatcacgccgccgccgcggtgcctcggcgtccgctgcttccccaccaacatccactgcggggagagcgtgacgatcgaagggcaggcgtacacggtgtctgcggtgacgcaccggtaccagctgcgcaaggggcgctacgagcccagcgagaagcgcctcgacgtcctctccaccggcagatacctcctcaacctctacctcgacggcctcctcgacaagtcctgatctgattagattatgcatctaatctactactactccagtatttacatgagcataccagtacaattaattaaacatcgatcaacttcttttttttgtcatgagagatgtgtatatatgtatctgtaagtaagcactggcactgtaatcgccaacacctgtgtgatggaccaaggatggcgtgctctggatggattcagaggcggagcaacagaaagagact

SEQ ID NO: 24705 - DNA, 3682 bp, Oryza sativa
  ref <308>: DATABASE ACCESSION NUMBER: AK100147
  ref <309>: DATABASE ENTRY DATE: 2002-08-28
gatctttttctcgcctctccttcctccgagccgtttctctccctctctctctcctcctccttcccctgcgcctcctccaccgcccgtgtcgccgccgcgcgcgtctatcccctcgccgccgccgccgtctacgccgcgtgaggtccggattggttgaaaggctgatcgagtgtagagactctgaagctcatatggttggcattggttgatatgataacgtgtcacgttgtgagatgcagacccccgttatgggggttgattgaatgaagtggatagcactcttataactttcttgctcgaagtttcttgataccaaggcaagtagcttataagaagatttggactttggtggcataaatggatgaactaactggcggcttcaacgtggtgttgattacaggctcttgagctaccaagtatgtcagcttcaaatgagaagtggattgatgggctccagttctcatcactgttctggcccccaccacaggattcacaacaaaaacaggcacaaattctggcctatgttgagtactttggccagtttacagctgacagtgagcaattccctgaagatatagctcagctaattcaaagttgctatccatcaaaagaaaagcgccttgtagatgaagtattagcaacttttgttcttcatcatcctgagcatggccatgcagttgtgcatccgattctgtcacgcatcatagatgggacactcagttatgatagaaatggtttcccgttcatgtccttcatctctttatttagccatacttctgagaaagagtactcggagcagtgggccttggcctgtggagaaattcttagagttctaactcactacaacaggccaatcttcaaagttgatcaccaacatagtgaagcggaatgtagcagcacatctgatcaggcctcatcatgtgagtctatagagaaaagggctaacggttctccaagaaatgaacctgaccggaagccattgaggccactatctccttggatcacagacatattgcttgctgcacctctgggtattagaagtgactattttagatggtgtggtggagtcatgggaaaatacgcagctggtggagaattgaagcctccaacaactgcttacagccgaggatctgggaagcacccacaacttatgccatccacgcccagatgggctgttgccaatggagctggagttatactaagtgtctgtgatgaggaagtagctcgttatgagacagcaaatttgactgcggcagctgttcctgcacttctattacctccaccgaccacaccattggacgaacatttggttgcggggctccctcctcttgaaccatatgctcgcttgtttcatagatactatgcaattgctactccaagtgctactcaaaggttgctttttggtcttctcgaggcaccaccatcatgggccccagatgcacttgatgcagcagtacagcttgttgaactccttagagcagcggaagattacgattctggcatgcggcttccaaagaactggatgcatcttcatttcctgcgtgctattggaactgcaatgtcaatgagagctggtatcgctgctgatacgtctgctgctttacttttccgaatactctcccaaccgatattactttttcctccactgagacatgccgaaggagttgaactccatcatgagccactaggtggctatgtatcatcgtacaaaaggcagctggaagttcctgcatctgaagccactattgatgccactgcgcaaggcattgcttccatgctatgtgctcatggtcccgatgttgagtggagaatatgtaccatctgggaggctgcgtatggtttgctacctctgagttcatcagcagttgatttgcctgaaattgttgtagctgctccacttcagccacctactttgtcatggagcctatacttgcctttgttgaaagtatttgagtatttacctcgtgggagtccatctgaagcatgccttatgagaatttttgtggcaacagttgaagctatactgagaagaacttttccatcagaaacctctgaacaatccaggaaaccaagaagtcaatctaagaaccttgctgttgctgaactccgaacaatgatacattcactctttgtggagtcctgtgcttcaatggaccttgcgtccagattactatttgtagtattaactgtttgcgtcagtcatcaagctttgcctgggggaagtaaaaggccaactggtagtgataatcattcctctgaggaggtcacaaatgattcgagattaaccaatggaagaaacagatgtaagaagagacaaggaccagttgctacattcgactcatacgttctagcagccgtttgtgccttatcttgtgagctccagctgttcccttttatttccaagaatgggaaccattcaaatctgaaggactccataaagatagtcatacctggaaaaaccactggtatcagtaacgagctacacaatagcattagctcagcgattcttcatactcgtagaatacttggcatcttggaagctctgttctccttgaagccatcatctgttggtacttcatggagttatagttcaaatgagattgttgcagcagctatggttgctgctcatgtttctgagttatttcgtcgatccaggccatgcttaaatgcactgtctgcgctgaagcaatgcaggtgggatgctgagatttctaccagggcatcatccctttaccatttgattgacttgcatggtaaaacagtgacctccattgtgaacaaagctgagcctctagaagctcacctgacccttacaccagtaaaaaaggatgaacctcccattgaggaaaagaacattaactcatcagatggtggtgcattggaaaaaaaggatgcttcaagatcacacaggaaaaatggttttgcaagaccactcttgaaatgtgcagaagatgttatactaaatggtgatgtcgcaagtacttctgggaaagccattgcaagtttacaggtggaagcttctgatttggcaaacttcctcaccatggaccgaaatgggggttacagaggttctcaaactctcctaagatctgtactgtcagagaagcaggagctatgcttctctgttgtctcattgctctggcagaagctcattgcatctcccgaaatgcagatgtctgcagaaagtacatcagctcatcagggttggagaaaggttgtggatgcgctttgtgacattgtttcagcctcaccgaccaaggcttcagctgctatcgttctgcaggccgagaaggacttgcagccctggattgctcgagatgatgagcaaggtcagaagatgtggagagtcaaccagcgaatagttaagctgatagcagagcttatgaggaaccacgatagcccagaagcattggtgatccttgctagtgcttcagatcttcttcttcgagcaactgatggaatgcttgttgatggtgaagcttgtactttaccacaattagagctattggaagtaaccgccagagcagtccatctcatcgtcgaatggggagattcaggtgtatccgtcgctgatggcctctccaatctgctgaagtgccgtctatcaaccaccatccgctgtctttcgcaccccagcgcgcatgtccgtgcactcagcatgtccgtccttcgcgacatcttg

SEQ ID NO: 24706 - DNA, 2329 bp, Oryza sativa
  ref <308>: DATABASE ACCESSION NUMBER: AK100148
  ref <309>: DATABASE ENTRY DATE: 2002-08-28
gttctacctcccaccacacgcgaagaaccaagagatttttcttttttttttcctcttatatttaatttaattcgaggaggagaagaagcagaggaggaggagtaggttgggagaggaggagaggcattgccgatgggctcggtggcggacgatgcggagatcaccggcccgctcctcgccgccgccgccggcggcggcggtgacagcgccgcggcggcgggggtggagagggtgccggcgtggagggagcaggtgacggtgcgggggatcgtggtgagcgcggtgctgggcgtgctgttctgcctcatcacgcacaagctgaacctcacggtgggggtgatcccgtcgctcaacgtctctgcggggctgctcgggtacttcctggtgcggtcgtggacggcggtgctcgggaggctagggttcgtcatcgcgcccttcaccaagcaggagaacaccgtcatccagacctgcgtcgtcgcctgctacggcctcgccttcagcgggggttttgggtcatatatgcttgcaatggatcagaaaacatacgaacttattgggccagattatcctggtaacagggcgatcgatgttatgaatccttcattgggttggatgatcgggttcatgtttgttgttagcttccttggactatttagtcttgttgcactgcgcaaggtaatggtgattgattacaagttgacctatcccagtggaactgcgacagctatgttgataaatagcttccacactaccagtggagcagagcttgcagaaaagcaagttagctgtctcggaaagtatttgagcattagttttttctggaactgcttcaagtggttcttcagcggcgttggggattcttgtggttttgacaatttcccatctctgggacttgcagcatttaagaacacgttttattttgatttcagtccaacctatattggatgtggtcttatatgcccacatattgttaactgctctacacttcttggagcaatcatatcttggggtttcctctggccatatatatctacaaaagctggggactggtatccagctaacctaggaagcaatgatttcaaagggctatacggatacaaggtttttatatctgtatctgtgatacttggtgatggtctttataacctcatcaagatcatctatgctactatcaaggaagtaatgaatgcacggtcgaagcaaggaagacttccccttgtgcgggttcatgatgatgatgaaggctctaaattatcagctgaagaaaagcttcggaatgacacgtttctaaaagacagaattccatcatggttagcaggatcaggttatgttggccttgcagcaatctcaacagcaactgtgccaatgatcttcccgcaggtcaagtggtaccttgtcctgtgtgcctatgttgtagctcccctgctcgccttctgcaactcatacggctgtggcctcacagactggaaccttgcgtccacgtatggaaagattggcctttttatttttgcctccttggttggccgaagcggtggcgtgattgctggcctagcagcttgcggtgttatgatgtccatcgtatccaccgctgccgatctcatgcaggacttcaggactggttacctgaccctctcttcaccaaggtccatgtttgtgtcacagttgattgggaccacccttggctgcatcatcgcccctctgaccttttggctctactggactgctttcgatatcggcaatcctgatggcatgttcaaggctccatatgccgtcatctaccgtgagatgtcaatcctgggtgtcgaaggattctcagcgctgccccaacattgcctggcgatctgctcggtcttctttgtcgcagctattttgatcaacctcctgcgggacgtcactccgaagagcgtctccaagttcatcccgctcccgatggctatggctgtcccattctacattggggcgtactttgcgatcgacatgttcgttgggacggttatcctgtttgtctgggagagggtgaaccgcaaggaatctgaggactttgcaggcgcgattgcatctggtttgatctgcggtgatgggatctggagtgttccatctgcgatattgtccatcatgaggattgacccaccaatgtgcatgtacttcaagccatcccttaccagctgaaaatagcgcaaaatccgttgtttatttgggtgccaaaatagaaaagaattttcacatgtatatatttctctctgttgtaaattagactgcgcaaaagtgcagtaactttgttctttctgttaatatatttctctgtttatgatatgttcattactgaacc

SEQ ID NO: 24707 - DNA, 1408 bp, Oryza sativa
  ref <308>: DATABASE ACCESSION NUMBER: AK100149
  ref <309>: DATABASE ENTRY DATE: 2002-08-28
gtttattcttttgtatttaaaacttattttgaccatatgtttggttatagttatgaccactagattgttaagagcaatatttattttagcagcttcatgtaatgtaaaaaaatatttggatgacagttatcgtagaagtaagcaatagaattaaccatttttgtcggctacattgcttttcctttcattttggtactacaacatgagctagggcctaggagatggtgcatatggatgttgaatcaaactctttgaatgtaatgctggtatgattgttcacccagaaatttgaactttgggcttacaagaaacagttattgtctttttgtatttgtgattttgtagagaccagaaatttcccaagatagtgatattttactgagtagcccagcatgtttgcgcgttgtaactcttattgggctaattctttcttatatcatacttgttgtcaaagttttgactagggtcgtattattttgtgagactgtttcttatgtaggtcattggtgcagttggtttcatgaaccacaggttggagattcctagtgaaacagatcctcagtggacatcacttatcctgagttgttgggaaactgactcacaactccgtccatcgttccaacaacttctggagagacttcgagagctgcaaaggcagtacaatgtccagactcagatgcagcgaaatgcatccgctgctgcaaaaaatagcagcattgaggaatgaatggagatcccttatgaggcgaacgatcaattgacacaattttgcaggcggtgcagcgacacgctagcctgatcaggattcgcacctcccgcgtggttactgctgatgatgctgattgatacagccattgctgaagattgagcaagacgagggagctgcctcctgaatcctcttggcctgaagttccacctgcagcttcggaattctgaccaaggtagagagtactggagctgaggctggcacttttggtgaattcttccatgacaactccaatttatgcctagtcgaatgtcgaccaagctcgactctgtaacgcgaaggcgacaatgatcttgtgtagattgttctgacgatcgacaaccaaattgtattcgagttgctgatcctgattatgcatgaaagttgcaccatcaacattgtaaggttcaacctgttcttttgttctgctctgattccttctctgttactgtaaccatgttgtttagaatcccatcagaacccaatcattcttgctacttcgaccatggatggaagaaatatggaattgtgccttcaatttcacattattcaaactttggctgcaaataatttaaatgtcatctaagaaatacccagtagcattattagatttgacatctgtttttaagttttaacacgaatttattcataaagattgaagtt

SEQ ID NO: 24708 - DNA, 999 bp, Oryza sativa
  ref <308>: DATABASE ACCESSION NUMBER: AK100150
  ref <309>: DATABASE ENTRY DATE: 2002-08-28
gtagtggtactgtggtggtagtagtagcaccactgcaaaaccacataataatggcatatgcttcagagaagaaaagaagagatgatcaagatgaggagactgaaagggaggtagaagaagaagattacagaaccctgagctagagtcccagtatagcttaagcttatacatatgtataataataataatactaacactactagatactaatgcaattatggtccaaggagcaatgtctcactcactgaacaacactgagatgatcgcgtcggatttgtcgtctttactgcagcggcgcttgcactgtcacgacgaccggggtgttcacggcgtgcctcccgtcgctccacgtcaccgcgccgctcctcacctgcgagctcccgggctccatcttcttggctggcgccgcggcctccacccgcaccgtgaagctcagcttctgcccgtcgcgccggaacgccagctgccgcggctgcacggtcaccgcgcacccctcgggcgacctcaccgtcgcgcggtacaccgccgcccgccgccgacgttggtcaccgtccggatgaagtgggtcttcatcgtcgccctggtgccgtccgcggcgaacgtggcggacatggacgggtagttgaggttcccggcgtgccccgcgcgccgcgcgccgcggcagtccgcggggcgccgcgtgatcgcccggatgttctgctcggtgtagttcaggttgcagaggaagttgacgtatccacgggggtgatgtcgtaacgagaccagggtcatggcgcgatcgggtcaagtgcccgcgccgaatcgaaacgtcggcacgagcccgtggactcgtccacatggtgcgttgctgttgtcttgatgtaggggtggtcatgagcgctgacttgatcgccgcggggctccaggtaggatgcgccgccttgagcgatgcggcgagggcggagatgtgcgggcaagcatggacgtgccgagaagatgttgaattcgtgcggcgccgtc

SEQ ID NO: 24709 - DNA, 2751 bp, Oryza sativa
  ref <308>: DATABASE ACCESSION NUMBER: AK100151
  ref <309>: DATABASE ENTRY DATE: 2002-08-28
gttggcttgcgtcccttttgacgcgctctcatctctgtcctcccttctcttcctatacaagtcctccctttattcttcttcttcctcccctttcttgtagtagtacccttgtttgtgtgttgagccgtggctatcaccgggtcaacacactaccatttcaacctctttgccctgttcaacaccagctcatgcttccattgctagtggtataagactcggattttccctcatgaaccatccaaatattcagtcttgaagaaggaggagaggggagggggaaggcgatgaagtctaacaggaacctgaccaggggagacggtaggaggctggggaatgcggcactgatagcgtttatgctgggatccctacttgtgctctccctcgtcagggcaaggttctcccccatcgggaagccaggggaagccatcaaaacagaggagcaggaggcgatgaggaaggggagtgtgaagatggagaccctcgaggccgccgatgaggctgcagcatcagctgcagcagcagaagaggaagaagaaacgcagcccaaggctggagacaccacagctggtggcggtggcggtggcgcaagcagcgcagctgttgcagcagcgtccaccacggccacggaccacctgactaagccggtgtgttacgagtcaagccggcggtcggacacgtgcgaggccaccggcgacgtccgcgtgcacggccgcagccagaccatccacatcagcccactggagcaggagtggaaggtgaagccgtactgccggaagcacgatgccttcgcgctgtcgcacgtcaaggagtgggcgcttcggcccctctccaccgccgacacatacccggcggtgccgcattgcacggttaacagttcggccaccgcgttcgtgctctccaccggcgggttcacgggcaacccgttccacgactacacggacgtgctcatcccggcgttcatcaccgcacaccgcttcgctggcgaggttcagttcctggtgagcagcttcaagtcgtggtggacgaacaggtacatgcaaatcttccagcggctcagcaagtacgaattggttgacatcgacaatgatgacgaggtccgatgttaccggagcgtggtggtcgggccgacgttccacaaggagctcggtgtggacgcgtccaggacgccgtcggggtactccatggtggacttccgcacgatgttgcgtggagcgctcgggctggagcgcgctgtggctgagcccagcggcgaccggtgggacatccggcgccgcccacgactgctgatcatctcgcggcgcaactcccgtgcgttcctgaacgagcgtgccatggcggacatggccatgagcctgggcttctacgtgcgtttgggcgagccggacatcagcacggacgtgtccaagttcgcccggctggtgaactcggcggacgtgatggtgggcgtgcacggcgcagggctgaccaacatggtgttcctccctgccggcgccgtgctcatccaggtggtgccgtatggtggcctggaatggctcgcccgcggcacgttcaaggagccggcggccgacatgcagatccactacctcgaatatatgatccagctcgacgagacgacgctgagcgagcaataccccaaggacgacccggtgctcaaggacccctactccatccacaagcagggctggaacgctctcaagatggtctacctagacaagcagaatgtgcggccacatttgggcaggctcaagaacactttcatggaggccctcaagctgctgccccatgggcacaccaactgagtaacatacttattgatcatggagcccaggtaattaccaggaacaccatatcatgtacttaatttgcgtgatcggtcgactagatagtggttgaagatgctaggttctcttcctttggatgtaacaagtctgagtttcaagggtggagtttctcattgatctgtaaatgcgagttaggaggcgcattccctcctctctgtttttctgctctcttgtagtagtattttgggagtagtactacaaaatgtagtttggaggatgtggaatctaataagaatggagggattgcatgggatcagatagaagggtgttggtgattgaacaagagaagagaagagtaccaaaatataatgctatctgttgttagatgtagtagtgtgaaatgtatcaccgatggtctgttttacactatgggtgtgtttagatggtggagaagttggaaagttgggagaaagttggtagtttggagaaaaagttggtactttacgtgagtaggaaagttttcgatgcaatgtgatatgatggcaagttgggaatttgggtggaactaaacacggcctatgcttataaagcgggaccaacgggttacaacaagcgggggttaagggtgaacgacgacgacaggaatccggatgccaagaggttttgtgggagctcactcaccaattcaccatccaaatgcattcctcggtccctgttcttgtaacctgtctcgtctttctggatcgctcttgacacgggctgcacagggattaggatcagttgtagtagttgttatagtgactgcaactttagctgtagccgatttgagtcgttcaaaaggaccggaaggttagatctaaaggcaccaacacgacccaacctgacagactgtagctagccttcaatgtcgttttcttcttcgtctatctttcttcttcctattatcaaaagaagttctcttcttcctctc

SEQ ID NO: 24710 - DNA, 3231 bp, Oryza sativa
  ref <308>: DATABASE ACCESSION NUMBER: AK100152
  ref <309>: DATABASE ENTRY DATE: 2002-08-28
ggatcagggtgtgggcgctcgacgaggtgttcgccgggtggggcgcaggcgcgaggcgcggcgacgaggagagcgcgccgttccgcgagggcatgcccgcgccgcccgcgctctgcgtcgccgtggacagggctaaccggctgctgtggacggggcacaaggacgggaggatccggtcgtggcgcatggacctcgacgcggccgccaccgcgcccgcgcctccgcctggtggcgcaggcgacggcggtgggagcgttgggggaagcaaccatggcgggccaagcaatgcgccggtgttcaaggaagccctcacgtggcaggcgtacggccggactcccgtgctctccatggtcgtcacttcgtatggcgagatatggtcgggatccgagggtggtgtcataaaggcatggccttacgatgccattgccaagtcgctctcattgtcaccggaggagagacacatggctgcattgttggtggaaagagcatacattgatctcaggaaccattgcacagttggaaatgtgtgctctttgcctgcttctgatgtgaagcacatgcttgccgattattctcgcgcaaaagtgtggacggttacaagcatgacatttgctatctgggatgctcgtacaagggagttgctgaaagtatttgggatggacgggcaagttgagtcagctcggcttgagacaccggtcatgccagagcaacctatcgaggaggaggtcaaagtaaaaccttcaaagaaagataaatcccagggttctttgaacttcttccagaaatctaggaatgccttgatcggagcagctgatgcggtgcgcagggttgcaacaaaaggaacatttgtcgaagataaccgtagaacgggagcagtggctcaagcaatggatggaacaatttggtcaggatgcacaaatggttccattatactgtgggatggaaatggaaacagagtgcaagaattccagcatcatacttcttctgtgcagtgcataaaggcacttggagaaagggtgtgggcgggctatgccagtggcattgttcaagtcatggatgttgaaggtaaccttcttgcaggatggactggacatagttgtccagtcataagaatggcaattggaggttcttacatttacacgttggcgcaccatggtggtattcggggatggccactgacatcaccaggacctcttgatgacattttgcgcactgaattgactaacaaagagctttcatacactagaatggagaagataaatataatggttggaagttggaatgtagcacaggggaaggcatctgctgagtcacttaaatcatggttgggtagtgtatcatctgatgttgggttggttgtcgttggcttacaagaggtcgagatgggtgcgggtttcctagccatttctgcagcaaaagaaactgtaggacttgaaggcagtgctaatgggcaatggtggatagacaatattggtaaagcacttgatgagggaacatcattccatcgagttggttctaggcagttggccgcattgcttattgccgcatgggcaagaaagagccttaagccatatgttggtgatgtggaagctgctgcagtgccatgtggttttggacgtgctatcggcaataagggtggtgtaggattaagaataagagtctatgatcgtaaaatgtgtttcgtcagcaatcattttgctgcacatttggaagctgtaagcagacgcaatgctgactttgatcatatttaccggacaatgtctttcaacaaacctcatggatccacagcttctgcgacatccgtccaattgcacagaggagtaaatgtaaatgggaaccaggtcgatgaggtcaggccagacttggctgaagctgatatgattgtcttccttggtgatttcaactaccggctttatggtatcacatatgatgaagcaagggacatggtctcacaaagaagttttgattggctaagagagaaggatcagcttcgagcagaaatgaaagctggaaaggtgtttcaaggaatgcgtgaaggtctcatcaaattccctccaacctacaaattccaaaagcacgctccaggtctaggagggtatgattcgggtgagaagaagaggatacctgcttggtgtgatagagtactataccgcgacagccgtcctatatcagtagctgactgttcactggagtgccctgtagttgcttcaattacatcgtatgtagcttgcatggatgtcacagagagtgaccacaaacctgtgagatgcacatttagcgttgacattgcaagagtggatgagttaataagaagacaagagtatggagaaataatcgaaacgaatgaaaaagtacgttctatgcttgaggagtcttcttttgtcccagacaccacagttagcacaagcgagattatactggaaaatcaagaaaatattgtctttcggattaccaatatatgtgagacaagcaaagcagctttcgaaatcacgtgtgaaggccagtcaagcaaaaaggaggatgcaacaaaatcagagattcttccaagggcatcgtttggcttccctctttggcttgaggtccaaccagcggttggtcttatcaaaccaggagaaacggcggagatcacgatccatcacgaggacttctacacgcaggaggagttcgtggacgggataccacagaactggtggtgcgaggacaccggggacaaggagtgcgtcctcacggtaaacatcagaggcagcacctccaccgagaccaagccgcacgcgatcagcatccggcatcactgcccggcgacgtcggcgccgccgctgatcatcagcaacccgctgtcatcgtcggccgccccgccgatcaatgccctggccagcgaagggccgccgtcgaagcgctcctccaagaagagggagtcgaaccaccacaagcgggagcagcagcagcaggactacgctcagttcgggagctcggaggtgcatgacctgtgccgcatgcgctgcccttgatgaactatagacctgtagagagatcagaattcagaagttttcgtaggtgtgtttctgatatatatatatatatatatataacatcagggaggagtttgctctaaagttctgtacatatgcttcacttacctctaccagctgctactgcttctaatgtaacccaacaaaaggagtgtagagtcattggcataccactgctaataatttgtgtgtttttttaatt

SEQ ID NO: 24711 - DNA, 752 bp, Oryza sativa
  ref <308>: DATABASE ACCESSION NUMBER: AK100153
  ref <309>: DATABASE ENTRY DATE: 2002-08-28
ggggcactaccaccactcgcctcacactcactcgctcagcactacttgcaccccctagctgagatcagtagtaaacggtcagtcaattgttgcaaagcgatcagctactggcgatggctcagggaaggggcagtgctgcaggacgacgcaacgccgccgtgctggcgatggtcctcctctgcgtgctcctccacggcgagctcgccgagtcggccgtgtacaccgtcggcgaccgcggcggctggggcttcaactccggcggctggctcaggggcaagcgcttccgcgccggcgacgtgctcgtgttcaagtacagcccgtcggcgcacaacgtggtggcggtgaacgcggcggggtacaagtcgtgcagcgcgccgaggggtgccaaggtgtacaagtcgggcagcgaccgcgtcaccctggcgcgcggcaccaactacttcatctgcagcttccccggccactgccaggccggcatgaagatcgccgtcaccgccgcctgatcggccggccggtcgccggagtccggcgggatcgaatgtagtagtggcaatctctaaatatccgggaagtagatccaataattctgtcagtgtcctacgttgctgaatgaccgtcttcgtgtttaggcctctgctttgttgcaggttagttgattgttggcaagtatagagaggaatatatgatttatgtgatgtgtattttgagaagaatttaataaaagccaaacagctgcgttctggcccagccgt

SEQ ID NO: 24712 - DNA, 955 bp, Oryza sativa
  misc_feature (32)..(32): "n"=any one base of a, t, c, or g
  ref <308>: DATABASE ACCESSION NUMBER: AK100154
  ref <309>: DATABASE ENTRY DATE: 2002-08-28
gaactctctctctccctcgtcgccggcgaacntccagaggcgggggcagcgcgagcgcatggagtcccccaccgccggcgggggcgggggagggggcgaggccggcgccgcgtcgtcgtcgtcctcctcctcgggcccctccacatcgtccgccgccgccgccgccaccgcatcgacatccgcgtcctcatcagccgtcgccacccgctacctcgccaagcgcgtgctccgcgggaggccgtgctccacgtcgcccagggctgcttccgctcccccgactgcgtcgacgtcgttctctgcaaggaaaattcactggaattggttgttattggtgaagatggtgttttacaatcaatctgtgaacaaaccacatttggtattataaaagatgttggtgtcttaaactggcgctgtacacactttggtttaatgccgaagatagaagggaaagaaattctggttatactttcagattctggaaagctatctcttctttacttttgttctgagatgcataggttctttgcaattgcaaatattgaactatcgaaaccaggaaatttgaggcatcggctcgggagaattttagctatagaccgagaatctaggtttgttgctgtcagtgcatatgaggatgagtttgcatttgtacgtgtttcagtggatcacaaacttcatgctcctaatggaaaaattgaagaggatgctaaaatcatcagtactgcatataataccagcagtatccatggtacagtttggagtatgtgcttcatatcaacatgcctggatgaagaatattatcgtgtagttgcaatgatagttaacaggggctctgatgtaaatgacttggcactctatgggctagattccataaacgtctattgaccgcatatctactatttaaagctggacatttgcactgaaatctcaaattccccactgtatggcttgactt

SEQ ID NO: 24713 - DNA, 1603 bp, Oryza sativa
  ref <308>: DATABASE ACCESSION NUMBER: AK100155
  ref <309>: DATABASE ENTRY DATE: 2002-08-28
gaatttcctcgaaccctaccctaacgccattccccaccccagcagcagcagcagcagacgccagtcacctcgcaatctcacgcggtcacccgccgcatgaccgcggctcgatagcgccgccgcctcgccgccgggcgtcctcctccccggcgccaccgcgtcggcctccctcccctcccctcccctcccctccccgagcgcccaccgcgtcgacctccaacccccgggcccccacaccgcgtcctcttcgagatccgcatccgcccccgccgccgcctcttgtcctcttccccggccgccgctgttcctcgatcctgatttgctggtggccggccgccggcggagcagcccggaaggtctacggcgcgccggcgatgtcgcccagcaccctcgctgcgtcgaccagtatgaaatggagcagctgaatccccaagcctcactttaggtctgccgctgttacaatgagtccatcaaggagcaggagcaacagcaggagcagaagcagaagcagaagcgggagcaagagcaagagcaagagcaagagcaggagtcgcagcaggagcaggagccgaagccgaagccctcggcgagaaaggctgcgtagtgagcgtgtatcacgtcgcagccgcagccgcagccgagccgtagcccaattcgtagaagagaacatcgcggccacagacacttcgcagcagaatgcacttctgaaactgtttgttggaactgcaagcagtctggccacattgctaccgaatgcaagaatgacgccctgtgtcacacctgcagcaagacaggtcatctggcacgtgattgcccaagttcaggatctagtaagctatgcaacaaatgttttaagccaggccacattgctgttgactgcaccaacgagcgggcttgcaacaactgtcgtcagcctgggcacatagctcgggagtgcacgaacgagcctgtttgcaacctgtgcaatgtctctgggcatcttgctcggaactgtcaaaaaacgaccatttcttcagagatacagggcggccctttccgtgacattacctgccgcttgtgtggcaagccagggcacatcagccgcaactgcatgacaaccatgatctgtggcacctgcggtgggaggggtcatatgtcatatgagtgcccatctgcaaggatgtttgatcgtgggctccgcaggttctgatgacagccatccatacgcactgctggttctgatgctcggaatttcgcattgttccattgattctgcttagatagcttgcttgactataccgaaacggttcttttataccttttgctctctgggagttgaggaatgattctgtaggatgtatttgggtgaaacttttgcttgtgttaatcagggtgttgtagcctttcgtgggggaacaaaatgatgtatcttcccaagagagacatccagaaaaactgctttggtagaccaggccatatcaagtattgtgcatgactgtttgagctatttgactcctccaagcttgctcctccccactgactgttgcgtcgagttgtcctcattgttctgtattctcatattatcttcctggaagaaaagttgacgagtgagatcaggataacc

SEQ ID NO: 24714 - DNA, 1286 bp, Oryza sativa
  ref <308>: DATABASE ACCESSION NUMBER: AK100156
  ref <309>: DATABASE ENTRY DATE: 2002-08-28
gaagtgaggccggagagctcggagaagggcccgacgaagcgcaggtggggatcacctcgccggcgatggcgcggaggaggggaagcgcggcggcggccgcggcctcgccggccgtggtcggggcggtctccgtgttggcccttgtgtactactccacggtgttcgtcttcctggaccactggctcggcctcggcaacgcggccggcgccgcccacgccgccgccttctccctcgtcgtcgccgcgtgcttcttctccttcttctgcgccgcggccgctgacccgggctccgtgcccgcctccttcgcccccgacgccgaggacccgcagcggcagggattaaaatcgaggtattgcgataaatgctgcatgtacaaaccttctcgaactcaccattgcaaggtgtgcaaaaggtgtgttcttaaaatggaccatcactgtgtctggattaacaactgcgtgggctatgcaaactacaaatcatttatcatctgtgttctaaatgcaaccatcgggtctctttactcatttgtggtatttctatttgatctcttccggacagaacatgaatacgatgttccttatgtgaaggtcatacatgtcttggtcggtgttcttttgttcttcttaagcttgacaataggttctctgttatgctggcacatatatctcttatgtcataacatgacaacaatagagtaccgagaggcaactagagcgaaatggcttgcacagaagagtggacagaagtatcggcaccgctttgatcttggcacacgaaagaatattcaaatgatcatgggcccaaacatcctgtgctggctttgccctactgcaacggggcatctcaaggatggcactgagttccagatcacaaacaactgatcggatcaacaaggaagcaattgctgcacacgtacatacttcatacatacattgtagatttgcgagtttatttggcgaccaaagttcttggccgttccatttgcttgttgcagtagagagctccacatttgtcaccagaatctttgtatgacagcatgtgaaatgttccatttccctcctaatctccatgtattctcttgcttcaatttatttgtgtgcagagctgtagatagatcaagtgatttgagttttgagcattgtgtactgacatattgaacggcaaaactatcaatttgaccagaattttcatgtcaatttcgcttattcggggaataaacgaaacgacatatttgcaaacgaaatacaatttgtgaataaaatttttatatatgtgttcttagc

SEQ ID NO: 24715 - DNA, 939 bp, Oryza sativa
  ref <308>: DATABASE ACCESSION NUMBER: AK100157
  ref <309>: DATABASE ENTRY DATE: 2002-08-28
gtgttgcgttgcccaaggggaagggaaaggcgtcttcctcgacacgattcccctctcccacccaaaaccctactgcgccgccgcctcctctgatgaggtgatctcccctctcctcgctggccgcgtcgactccgagcttcacctgtcggtattcgaatactacctcttctggttcgcgtactaccccatctcagctgccacggccaaggccacaggaatggctgcggctcgggccccaaaaattccgccctccatttcagaacaatcacttaagtcgctcggccgcattgagagctggatgtccaccctaggttcatcagccggacgcaatctgggtcagaagctagagagctcgctatatctgaagcttctgtactcctaccttaaggagttcgtgcccagcggatgtgtaccgccgcgtaatatgggtggaactctgctgcatcgaactgtcaatgatggtattgatgctgctgaatccttcaggcgagctgagttcttcgtgcacacactcatccagttctggcttgttggagatgacttctcgccactggctgtgcagacttgccgtgcatatgggctccctttactgtctcttcagtctcatgcaaatgccacattggttgagcagccgccagcaccaggactcggcgatgcggtgaagctttttgtgatgtatatgaacaggatcaatgcttctgtggatatagatgcgccaaatgtcttcgagggaatatcttcatggagggaggcatgcaacagccctgttggatactggaatccattgatacagaggcctctgtatcgatttttgctcaggacattcttgttctgcccatgggtgtagaataaaaatgtgcaaggtttcttgcatgaaatcttaagggcaaggaactcagaggtgattggagcgatattgctctcagttgcaaattcacg

SEQ ID NO: 24716 - DNA, 3208 bp, Oryza sativa
  ref <308>: DATABASE ACCESSION NUMBER: AK100158
  ref <309>: DATABASE ENTRY DATE: 2002-08-28
gatcagtagttaagttcatctctccatctgcacgacttcaagccatccaatgctacaatcttcagaggaaaacccaagattttcttggaatctttgagctcaactccatgagctctgtagagaacccaagcaatggcaggagcaatggccatgctcctgccaacgcttctgctgctactgctaattcggcacaagcgacgcagcaaggccaaaccgagcagaatccgtgcgacgcgggctccgaggccgatctcctgtggaagctgaggaagtacctggtgctgcttgccatcctagcagcggccatcaccttccaagccgggctagggccccccggcggcttctggcagcaggaccagcacggctaccacgccggcgacgtggtgctcaggtacagctacccgaggaggtacctcgtcttcttctactgcaacaccacggcgttcggggcgtccctcatcgtcctcatactgctcctcgtcaaggagctgagccgcgacgccatttggctccggtccctccagttcgccatggtgctcggcttgctcggcctcatgggtgcctacgctgccggcagctgcagggaggtgaggacctccgtctacatctgggctttgcttgttggcatctttgcatatatcactctccatgtcgtattcttccggcatctggcacctcaatggctgtgtgaaatattctacacgattcggaaacactggaaggagattctggggagtatacatggagatggaggaaccgataagacgggagaaactggggattctgaaaagacgaaacgtctggaacagaatcgcagcttcttgctggttcttgccacattggctgcaacggtgacatacactgcggggctaaacccaccaggtggattctggcctgatgacaacaagcctagccatcttgccggtgacccggtgctgcgagatcactacccgcgccggttcaaggcgttcttggtctgcaatgccactgcatttgctggatcacttgtcatcatcatcatgctgctcagcaatacagcagtggatcatgttgtcaagtcaaatgctctgcggttgtgtgtgttggtgagcctctttgggcttatgggtgcctatgctgctgggagttgcagggaagtccatacatctatatatgtctttgcccttgttggtgctgttttcctctacctctgtattcagtggatcgagcatatggtgccaataccttgcataaagagttccatggaatgggtgggaaaaaagaagacccatttacttcagaagctgggttctttcatcatgcgggggactaggaatcctactgaagaatcgcgctctactcccagagcacaaaatccagtgaacaacagaaggtcaggcacttccgatactgctaaggatgatgttgagaagttgcgcacatatcttctgttgcttggtatccttgctgccactgtcacataccaagctgggctaaatccaccaggtggcttttggcaagataataatggacatactgctggtgacccaatcttggaggccatcaatcccaagcgctacaaggcattcttctattgcaatgctaccgcgtttgtggcatctttggtgatcatcatcttacttcagagtcaactgattactgttggtgccatgaagcgtcacatattgcaaacagccatggcattagacctttttggtcttatgggggcctatgctgctgggagtagcagaaagttctcaacgtcagtgtatgtgttcatcttggtccttgttgttttcacttatttcacgcttcatgttctgctgtccatggctctcaagactcaactgaagacaaaaattgaacatgtgccaaacttattccatcgttttacgagattttgtttcagaagaactgaaggggggagtgatgatggacgaagtgattcggtggagctgcaaaatgaagaaaaagatttggagaagcggcgcaagtttctgatgatgcttgcgattctagcggcttccatcacatatcaatctggtctaagcccaccaggtggcttctggagtgacaacgatcgtcaccgagcaggcgatccagtgctccatgatgagtttccaggccgttacaggattttcttctacttcaacgccactgctttcatggcatctctggcagtgattctgttgcttgttaacaagaggctgtgtgacaagggtctgaagtcctatgctttgcgcgcttgcgtgctggttgatttgattagtctcatgggtgcttttgctgctggaagctgcaggagagtgtcgacatctatctacgtcattcttgtcgtcgctgcagtatttgcatatgtcatgattcaaatcctggttctacaagttgcagaacaaaaagtggacttactgaagaagcgccgttctggttttgagagccagcaaagatccatgactctgactggtccaactggaagcactgataagaaacgaacagaacacaaatggcgcaaagatttgatgctgattggaactcttgcagtcactgtcacataccaagctgggctactccctccaggtgggctttggcctagtgaccaaggcaaccattatgcgggagacccaatcctcaaggttacccatcctataaggtacaaggtattcttctattgcaatgcaacagcattcatggcctcaacggtcatggtcatcctccttctgaacaacacaataagcaagtacaagagatcactccttgccatgaagacagcaatggtattagacttgcttggtctccttggggcatatgcagccggcagctgcaggaagttcaagacatctgcatacatttttgcacttgtcatcgccgtgtttatctacatcgtcattcatgtattgctgtcatttgatgaggtcgcattgttagtgaaagagaagggaaagaaatggatgccatgccttaagatgtgggatcagattgaaacaggagcttcggatcaaccttctgctacgcaatcaggagctccacctgtgtaatagcatgattcattgtgccactattgtgacatttaaacaacctgtaaagcagatttgcgtttcattcttgtatagagtcatcgtgtagaattgttttctagggagcattctgagcctgtgaggtttgctgccatttctgttagcagattttggtaaaataacagaccaaacatgcctcaaatacttctattatc

SEQ ID NO: 24717 - DNA, 1783 bp, Oryza sativa
  misc_feature (378)..(378): "n"=any one base of a, t, c, or g
  misc_feature (385)..(385): "n"=any one base of a, t, c, or g
  misc_feature (395)..(395): "n"=any one base of a, t, c, or g
  misc_feature (397)..(397): "n"=any one base of a, t, c, or g
  misc_feature (400)..(400): "n"=any one base of a, t, c, or g
  misc_feature (404)..(405): "n"=any one base of a, t, c, or g
  misc_feature (407)..(407): "n"=any one base of a, t, c, or g
  misc_feature (409)..(410): "n"=any one base of a, t, c, or g
  misc_feature (417)..(419): "n"=any one base of a, t, c, or g
  ref <308>: DATABASE ACCESSION NUMBER: AK100159
  ref <309>: DATABASE ENTRY DATE: 2002-08-28
tcgttcgtttgggtgtgggggttggggtttctgaaggccccgccgctgttgagcggccagtcggcggcgagctcggaggcggagagcagcctcaccgacatcctcgtccggaagccatcctcctcctccgccacctctggcaacttgaatccaaatgtgatgttcgagcttttctctctgtaccgtgaatggcaagaagagaaggccaagaaaattagtgaaacacaggaagagatagaaaacaagatagaaacagcagatgctttgtccattaagcttctccagcggttcaattattctgttacttccatgagatcaacctctcacaaccttgctgaagtccgtccactgcaggtggaagttggtgagttgccaagnttggttntatagtgtcncntanatanngntnnagctctnnntaggtggacactatagaaccagatccggcttccagacgcttctctcctcctctaatctcaagtctctgtctcgtcgtcctcgcatctccactcgccatgggcaagattaagatcggaatcaacggtttcggaaggatcgggaggctcgtggccagggtggccctccagagcgaggatgtcgagctcgtcgccgtcaacgaccccttcatcaccaccgactacatgacctacatgttcaagtacgataccgtgcacggccaatggaagcacagcgacatcaagatcaaggactccaagactctgctcttgggcgagaagccggtcaccgttttcggcatcaggaaccctgacgagattccgtgggctgaggctggtgctgagtatgtcgtggagtccaccggtgtcttcactgacaaggagaaggctgctgctcacttgaagggtggtgccaagaaggttgtcatctctgccccgagcaaagatgctccgatgtttgtctgcggtgtcaacgaggacaagtacacttcagatattgatattgtctcaaatgctagctgcaccacaaactgccttgctcctcttgccaaggtcattcatgacaactttggtattatcgagggtctgatgacaactgttcatgccatcactgccacccaaaagaccgttgatggaccgtccagcaaggactggaggggtggcagggcggccagttttaacatcattcccagcagcactggtgctgccaaagctgttggcaaggttcttcctgatttgaatggcaagcttacgggaatgtccttccgtgttcccactgtcgatgtctcagttgttgatctcacagttagaatcgagaaggctgcctcatatgatgctatcaagagtgctatcaagtctgcatcagagggaaagctcaagggaatcataggatatgttgaggaagacctggtttctactgactttgttggtgacagcaggtcgagcatcttcgacgccaaggctggaattgctcttaacgataactttgtcaagcttgtcgcctggtacgacaacgagtggggttacagcaaccgtgtcatcgacctgatccgccacatggccaagacccagtagaatccttttgcttgccatggtattccatggccgccgagccggagataccggtatgctttgtctatgctgagaataaaacgtggacggtgttcatcaggacccaccccctctgttaatgctagttgggataatgagttgcattttgttttccaatctacctacttgtaagttgtaacgatgctgatgatatggacctgagtctacttttttgcttgtgaagaatataagccgtccagtgcagttgtaattttgtt

SEQ ID NO: 24718 - DNA, 2136 bp, Oryza sativa
  ref <308>: DATABASE ACCESSION NUMBER: AK100160
  ref <309>: DATABASE ENTRY DATE: 2002-08-28
gacgcgcaaccttccattatagccccaaaaatacagacacacacaaaaaaaaaagcagagaatttgtgtgcaagcatccccttatcgcctccccccttgtgtctcctatccttcgccgatcgaatcatttgagcttgtgggtctcctcaaccatattcgattcgtgagggaggggatcgagctctgttgcggtgttgtagatcattatcactcttggtttgtgattctcggaagtcggaagtgttcttcgcaagctcgattttcttttttttgcgatatttttttgtatcgttaaatctcgaatcccgacgggggaggtggttgagtccgagttcgatgctccggggcctcaagatccagtctcgacgccgttcttgagctctccgtgttgatctctgcgccgcgaagggagatgggcaacgccggtagcaacggcggagggggttcccctggtcaccgccgacgaggctccgccgcccagggccacggccaccatcaggtccacggccaccaccaccagccgtcctcgcctcccccgcctccgccgccggagtcgtccccgagccactacgtgttcgccgccgccacgccgtaccctccgccgcagtacaccaaccccaacctgccgcggtactaccctcagtacgggaactactacccgccgccgccgtccctgcaggtgcccctcccggcgccgtacgaccaccaccacaggggcggcggcgcgggggtgcccgccggaggggagttcccgccgtcggcgcacccgcaacactacccggggtggcctggggtctctgggcggccgcacccctgcggattgcagccggccatgccgacgccgtacgtcgagcaccagaaggctatcacaatccgcaacgacgtcaacctcaagaaggagactcttcggattgagcctgatgaggagtgcccgggccgcttcctcgtcgccttcacctttgacgccacccttgctggaagcatgactgtttacttctttgcaaaagaagagctcaactgcaatctaacggcggtgaaagaagacctgattaagcctgttactgtaagcttcaaagagggtcttggtcagaagttcagacagccttctggcactggaatcaacttctccgtgtttgaggattccgagttattgaagcagggggacatggatgtatatccacttgcagttaaagctgaaacaaccatgcctgttgatcaaaagttggaaggagaagatcaaaagatgaaaactccaaactcacagatcacacaggctctgtttgaaaagaaagaaagcggtgattatcaagttcgagttgctagccagatcctttgggtcaatggaactaggtatgagttgcaggaaatatatggaataggaaactcggtggaaggcgatgctgatgccaatgatcctgggaaagaatgtgttatttgcctctcggagccaagggatactaccgttctcccatgtaggcatatgtgtatgtgcagcgagtgtgccaaggtcctgaggtaccagacgacccggtgcccgatctgccgacagcccgttgagcggctacttgagatcaaagtcaacaacaaagctgaagagcagcagcagccgtcacccgattcaccgatcaaagtcaacagcaaagccgaagagcatcagcagcagccatcccaatcgctgccaatcccacacagggaagaggtgtagctgcgacaatgtcgggcgcatatgatcatgatatatgatcctagattgtggccttccgaccttccccgtatcgcgctctgcgctctcgccttgagcatggggaggagatgtaacagatgtgtaccttccagtgtatgttagcatgtaagcttctggcataatgtggcttcctgacctgacctgtgtgggtgaaggtcttagatgccaagaggagtggagtgggtgtaccatatacacatcacatggattcatgcgtgtactattgccctaacctgaagaagtggagaacatctcatacttaatgggatttccctccatcaggagtaaaaagagttacagcagatggactccagatttgtacaaaatttcctcatgattctcattatatttttgccttgatgagatgagatgacaccatatatgttctgccc

SEQ ID NO: 24719 - DNA, 1045 bp, Oryza sativa
  ref <308>: DATABASE ACCESSION NUMBER: AK100161
  ref <309>: DATABASE ENTRY DATE: 2002-08-28
tccggcgacctcttcgccgcctgcttcgtcctcccaggccagcgcgaggccgccgtcgagaccgtgctcgactcctcccgatacttcgtgctccggatcgaggatggcagggggaagcacgccttcgtcgggctcgggttcggcgagcggaacgaggcgttcgacttcaacgtcgcgctgtcggatcacgagaagtacgtcaagagggagcacgagaaggaggcggccgacggcggcgccggcggcggcgaggagaacgacgacgggcagattgacatccacccggcggtcaatcgccggctcaaggaaggtgaaaccatcaggataaatgtaaaaaataagccatcaactggaagtggtatgctttcatcagctggtttatctggaggggccagtgcaaaacccaaggcaagcatgctccttgcgccgccaccgggttcagctgggaagcttcgatctcctcttccacctccaccaaatgaccctgctgccgcaaggatgaattctggctctaatgctggaatcagggctccaaaagaacccgccaagagaaatagcgacgccttttcagatctttctgctatgaagcaaaacctaccgtcatcgacagagtcggcgcaaacaaaaagcacaggtgctggttgggcagcattttgacaatgagtctgccatctgctgttgataaccttttctcaggaaaaggaaaagaaaattgtgtaactgaaaaaaaagaaatcccttggaggaagcctgtatccgctcgaatcacatggtgataatgacttgctagcatccacttggtactcgaaaaaataaaggatttacaggatgatgttgttattcatcgtgcgatgccacatggattcctggagctttggaagtctgaaaaatatgagtatggctttccttgtttgtcatatttgtgttgtcagatttttcgcatatgaaacaagaatcatactgacctcattgtgttgtacccttaaagatttgagaacactgttatgaatgcggcagcttatgtcactgatgccaaattttctgt

SEQ ID NO: 24720 - DNA, 2066 bp, Oryza sativa
  ref <308>: DATABASE ACCESSION NUMBER: AK100162
  ref <309>: DATABASE ENTRY DATE: 2002-08-28
tcggactcaaaacttttttttgtggcacacgcgtaacctccaactttcttaatggcatatgggtaaaagactcctgctccttcgcttcgcttctgttcgtctctccgccgtgcgccgtccgtcgtccgccatggaggttgctggccctcctccgttgaccagcgcttcccctagcccctgccgctcaacaccaactgtggccggatctagttgtttggcggctcgcgagaaagaagttttggtggtctagatctggtcagttcatcctccctttcgagctgatctctcaccaccgagccttttccccacatcccttctcgtcgttcggtttgaggtggtcagatctaccggcggcaaagctgctggatgccctcacttcgtgtggctgtgagatcatcggggttagaactgccagaatcgcttggactcgaggaagaaggagagcgagcaagacgagggatgcaaatgggcgacgacctgggtgtggagcggtgaccccagctatcggatgcagcagtttgcacgcgcgggtgcaacacggagcacgcgctcagcctggctgagtagcgaagtttgcccgaatcgggcgttcctccggagcctggctggcgaccgctttttgcacgcgctgggcctggctgggaggtccatgcaagcaaccaacaaggtaaatttgtatgcataggtgcgggccaagcctgatgcaggcaaccaaacagaccctcagtccatctgcacattgaaaatgctcaaggtccaagagatgtgatagtatatcagatggcatgccattgacttgtgtgccagaagattctatgaagtaaaaaactaaaatgcttgatttttctttgctctctatggtttatattcaaatttttctctactgatagattaatatcacttttgaacagctctactaaacaattaatttaatttgtgtgaattttatgttggtgtcaaaatttggcactttaagaccttggcatagcaatttcattctttgtatcccctgctctaagttggtatcatttcagtttacttgctttataattactaaacttgaaggtcgacatgcacttcactgggaaattttaagtgaaaccctgaatccctcaaatctcctattgaactttatcatgaattgctaaagttgctgattttcttgagtaggaaccaagctattcacttaaaattcatgtactagcctctcaaaatttgtatgaatattggggttttattttaagagcaaattagatcagagttcagagtctactcatgctgcttgctgttgggtatacctcccagggaagggatgctcttatccatcttccaggaaattggtggtagctgatttcaaatgcgaaattagttattattgtttctgttctaatagaaattgatttcaccgagtcaataacttgccatatttatttatttactcttaaattccattcttatgaatgatttgacaaacaattttttccttgtcacagaacaagcatgtaaacgtgtttgtttacacaatacatgaaacaatatgtagaatcatactttacactgccattttctccaaagaggctgtgataagcacttctgcatccacttgaactcatatatacttgtgtgccctttaattttgtaggataattatatgaaagaagcccctctatatctggagttagggagcacatttttactagcaggattgtagttttgtgactaataagcaacagctgcttgcagaccctctgaagtgagatgtttacctatctcactatttcaccctcacatgtttgttatacaattgaatggatatgcatatttttttaataatatttattcaaatagagttatcaaccacaagaaaaagctaagcaagcatatcttatgttaatgttcttgtgtagatttgaaatatcatgtgatgaacaaggtcatttcatttgttgccttataaacatattaagcagaccattttaaagtgcactttcacactactcttttatatgttgtatgcttttgcagctctacataagaattttataataaaaaatacatagtttccc

SEQ ID NO: 24721 - DNA, 746 bp, Oryza sativa
  ref <308>: DATABASE ACCESSION NUMBER: AK100163
  ref <309>: DATABASE ENTRY DATE: 2002-08-28
gaagcacacaccgcagtgcatgcactccaaccatatcgatcccgcgcgcccgatcagctaggtcatggccgtcgacgcgatgttcggcagcgtcgccgtcgcgctgctggcggtggtggtggctgctgcggcgctgcggcggtggaggcggccgacctccccaagctgcactacctccggtgcgtcgtgatggagacgctccggctgtacccgccggtgccgctgctggcgccgcacgagtcgtccgccgactgcgtcgtcgccgggttccacgtcccccaggggacgatgctgctggtgaacacgttcgccattcacagggatccccaggtttgggatgaaccagaagccttcatcccagataggtttgcggatggaaaaaacgaagggaagatggtgatcccgtttggtatggggagacggcggtgcccaggagagaatttggggatgcaaatggtaggacttgcccttgggacattgatccagtgttttgattgggaaagggttggggaagagctggttgacatgagggagtgctctggccttacaatgccaaaggagttgcctctcgaggccctctatcaacctcgagcttccatggttgatcttcttacgaagatttagtcagcaccataaaaaataatttgttgttcaacttttgtaatgtaaggaataatcgggcaagtgcggtttcaaagataattgggctgttcatcttctttaaatttccaagattcacctctacc

SEQ ID NO: 24722 - DNA, 2185 bp, Oryza sativa
  ref <308>: DATABASE ACCESSION NUMBER: AK100164
  ref <309>: DATABASE ENTRY DATE: 2002-08-28
gagccgagaccaccctgctgcagctgctgtgctgcgcgggttaaaaagagagagatctattaactggccctcctctcccacagcaaacacactcgtgtcgtactgagcatctgagctcggtggttgccgaggaggattcgccggcggcggcggcgggggggagatgtcgcagcatgcggtgtgctgcggggcgatgttctgggtgtacctgatgtcgtgcgtggggctggtgatgttcgccgggctcatgtcggggctcaccctcggcctcatgtcgctcagcctcgtcgacctcgaggtcctcgccaaggccggcaccccgacggacaaggacaacgccgccaggatcctgccggtcgtcaagaaccagcacttgctcctctgcaccctcctcatcggcaactccctcgccatggaggcgctgccgatatttctggactcgctcgtcccgtccttcggcgccatcctcatctccgtcacgctcatcctcgccttcggtgagatcatgccgcaggccatctgcacgcgctacgggctcagcgtcggggccaaggcggcgcccgttgtccgggtactcctcatcgtcttcttcccggtcgcctacccaatcagcaagttgttggattgggtactcggaaagggccatgttgcacttatgaggagagctgagctaaagactttagtcgatatgcatggtaatgaggctggcaaaggtggagagctgactcatgatgaaaccactatcattacaggagctttggagatgactcaaaagactgcaaaagatgccatgactcccatatctgaaaccttctcacttgatataaacgctaagctggacctgcacacaatgggtatgataatgaccaaagggcatagtcgtgttccaatatactctgggactccaaacaatattattggccttatattggttaaaaacttaattacttgccaacctgaggatgaagtgcccattcgaaatgttactatcagaaaaatcccaagggtgtctgatgatcttcctctctacgacattctaaacgagtttcagaaaggtcacagtcacatggctgtggtggtcagacgcataaaagaaccaggagcatccattgaaaagacttatagtgacagatcagattacaaaactaacagcgacagatcagattacaaaattaaccacagagatgcccatgctgatggtttgtcaccctctcgtgtcagcattgctggaagtcgtcgaagtaacattgaaaagaatggagaggtgcgcttatataagaaatcagaaaaaaagcgggacaatattcttgattttaatagcggtccacttccaagctattcattggatcaagaagcagtggggataatcacaatggaagatgttatggaacaattgctacaggaagatatcttggatgaaacagatgaatatgttgatgtacataacaagattaaaataaacatgctacctctgggcaaatcattatcaccaactatatctccaagtaatgggccccattcccaaggactcaggaggacccctatgacttctccattgtcatcataccatcatggtggctccatcttacgttcccctgcttcaaacaatcctcagtctcctgggactttgccgacaataatttctcctgaaagatcgcctgcttctcaagcaccttcgcgtagttcacctaattcaactcaggtctcaaggaattcgtaaaacggcgttgagagctaaagagctctaaggacaacgtttcctgagaaatggtaaaatgtcaacataaacagattaagacattttgagcttaggactgaattatacagatcagcatatctcttgtactgttgatgcttatttgttgattacatgcttgtatatacgtatggcttagcatctggacatcgctatagatggaagtctcactacctactgtagatgtatttttgtcagcttgcaattaccattgcagaggaaagcttgaagataaaaatgtaaaaggaatgcactagtatgcatttgtgctgttcttgtatgcatgcccccatcattttaatgatcagcaagcagatgttggtgcattcactgatggctatccacaccatttaagcactgtacaagtcctctcatattgtatcagaaattcagattagtgataaggcgcaagcttatgtttgtgatgct

SEQ ID NO: 24723 - DNA, 1894 bp, Oryza sativa
  ref <308>: DATABASE ACCESSION NUMBER: AK100165
  ref <309>: DATABASE ENTRY DATE: 2002-08-28
gtcgtggctgcgtgtgcttgcgctactgcttggtctcactgtgtgaacaactgctgccgccgcctgccggcggtgtgctccggccgcgcgcggtcgtgatggctgcacggcgagcgaactgcgcgctggtgctggtgctggcgctcgcgctgttggcggcgcgggatgctggtgccgcggcggtgcccaagcccaactggctgggcgggctgagccgcgccgcgttccccaagcggttcgtgttcgggacggccacgtccgcgtaccaggtcgagggcatggcggcgtccggcggccgcgggccgtccatctgggacgccttcgcgcacaccccgggaaatgttgcaggaaatcagaatggagatgttgcgacagatcaatatcatcgctataaggaagatgttaatctcatgaaaagtttgaattttgatgcctaccggttttcaatctcatggtccaggatcttcccagatggtgagggacgagttaaccaagaaggcgtagcatattacaacaatcttataaactaccttctgcagaaaggtatcactccttatgtcaatctttaccactacgatctccctcttgcgcttgagaagaagtacggaggctggttgaatgcaaaaatggcggatctattcacggagtacgcggacttctgtttcaagacctttggcaatcgtgtcaagcactggtttacatttaatgagccaaggatagtagcacttcttggttatgaccaaggaacaaatcctcctaaaaggtgcacaaaatgcgctgctggtgggaactcagcaacagaaccatacattgttgctcataattttctcttatcacatgctgcagctgttgcaagataccggactaagtatcaggcagctcagcaaggcaaagttggaatagttctggacttcaattggtatgaagctctttccaactcaactgaagaccaagcagcggctcaaagagccagggacttccacattggttggtatcttgatccattgataaatggacattacccgcagataatgcaagatcttgtgaaagataggctgcccaagttcactcctgaacaagctagattggtcaagggctcggctgactatattggcatcaaccaatacacagctagctacatgaagggccagcaattgatgcagcagacaccgacgagttactcagccgattggcaggttacctatgtttttgcgaaaaacggcaaaccaattggaccacaggcaaattctaattggctttacatcgtgccatgggggatgtacggatgtgtgaactacatcaagcagaagtacgggaatccgacagtcgtcataactgaaaacggaatggatcaacctgcgaacctcagccgcgaccagtacttgcgcgacaccacgagggttcatttctacaggagctacctcacccagctgaagaaggccatcgacgagggcgccaatgtggctggctacttcgcctggtctctcctggacaacttcgagtggctgtcaggttacacgtccaagtttggtatcgtctacgtcgacttcaacacgctcgagcgccaccccaaggcgtcggcctactggttcagggacatgctaaagcactgagaatgaaagacacgcagactgaagttgaagttgccatccattgatcatcatgttcagttctaggctgccgcttgggtggcatcagagctggctatgaactatgtgatggaaataaaaggactgcaaattgattcgattatgcaattcgcgtctatgatcagaattgtggccgtctagtgaacttgtagaagtgtactcttgatgtgtgatcgatcttgagtaatcaatgtttgatcagatttcgccttataatttattagttgatgagatttggcttggtg

SEQ ID NO: 24724 - DNA, 1785 bp, Oryza sativa
  ref <308>: DATABASE ACCESSION NUMBER: AK100166
  ref <309>: DATABASE ENTRY DATE: 2002-08-28
ggtggtcgcctccctcctccggccgccaccatgctgctccgccgcctcctccactcctcccgccgcctcggccaccgcctccaaaccctaactccggcgagcgcagccaccgccgccgctgcctcgtcctctcccgtctccgctccccttccatttcgtcgtcccctccccgcctccagcctcctctggccgcggctcctctccacgtccggccgcgacgacgaccccaacaagccatgggcgttcacgccggaatccggcgatccggatcccttcgccgccggtgagggcgtcgaagctcccgccggcgaggatccactaggattgagcgccgccggcgaggacccgtgggcgaaggatttccgcgcggagggcagcgagaagggggacgtgttcgaggagatcttcaaggaagaggctgccaccgccgccgtcgcttctggagagaaggctccgggggcaggcgccgacgagctgtggacgctgagtggggaggatgagaaggatcctttcgcggaggccgtgctcgggggtgggcttgaggggatcggaggtgatggcgctgcgattgatgaggccgatgcgggggaagacgaggaggaggaagagcgaaaacggctagagagaagggcgagggagcaagaactaatggagacactcaaaggtccaaatcgtgcatttggtgatctcattgaggcctctgggattacagaggatatgattgctagtttgatcctcttaaaggatgttaggggtgttcctggattacctcccctaagagaaatagaagatgaaactatcgaaaaaatgaatgcaacatcaagcagagctgatgtagaacgccaaaagcaagaggaaattgctaaagcacgtgtaagacaagtcgatgagaaaggaagggcttatggaacagggaaaaggaaatgcagcattgcccgtgtttggattcagcctggtgatgggaagttcattgtcaatgacaaacaatttgattcttacttcccaattctggatcatcgggctgatcttcttcgcccatttaccgtgaccaaaactttggggcgttgggatgttacttgtactgtgaaaggtggtggtgtctcaggacaagttggagctatccggctagggatcagcagggccttgcagaattgggaaccaggactacgcccaaatctcaaagcagctggatatttgacaagagactcacgggttgttgaaaggaaaaagcctggaaaggcaaaagcaagaaagagcttccaatgggtcaaacggtaacaggtacctgctcttgttttttttctggtcatggcgttctgtatttgcagttggactgatattttcggaaggtccttttgagctctatactcatatattccagcctttaccgataatgggcataatgagacacaagcattctggttttctttaatgttgacaattgacacagcaaactgatcccagggaaaaaaaaatcatttgacctaattaagatgcagaagatacattgttataagctgtcattaaaatgggctgggctaccgatggaattcgttgtctagctcccagaagttatttctgttttgctgggatggcatggctgtatgcctgtatatcagctgctgccacatttttcctccatgtatgtctgtgcatgctctctgactatggtaaatgagaagttatgcgtccaactctgtaagcagtaataagaccaagtggaatattttccaaacgtgagatgtcattgtgcttctctctgagcaatccaccaccttgttcacg

SEQ ID NO: 24725 - DNA, 2445 bp, Oryza sativa
  ref <308>: DATABASE ACCESSION NUMBER: AK100167
  ref <309>: DATABASE ENTRY DATE: 2002-08-28
gactctctgtaaaaacaagcaaacaaagaaagaaaagcatcacaaatctcacgcactgtctctcgttcgcgcaaagcacgctgcttttctccgctttgcgagcaccatagcctagcccaccatgtgcggcggcgccatcctctccgacctcatcccgccgccgcggcgggtcaccgccggcgacctctggctggagaagaccaagaagcagcagcagcagaagaagaagaacaagggcgcgaggaggctgccactgcgccaagaggaggaggatgatttcgaggccgacttcgaggagttcgaggtggattccggcgagtgggaggtggagtccgacgccgacgaggccaagccgctcgccgcgccccggagcggcttcgctaaaggtggattgaaaaacactactgttgctggtgctgatgggcctgcagcaaggtctgctaaaaggaagagaaagaaccaattcaggggtatccgccagcggccatggggcaaatgggctgcggaaatcagagatcctcgcaaaggtgtccgcgtctggcttggcaccttcaactctcctgaggaagctgccagagcttatgatgctgaagcacgaaggattcgaggcaagaaggccaaggtcaatttcccagatggggctccagtggcttctcagaggagtcatgctgagccctcctccatgaacatgcctgctttcagcatcgaagagaagccggccgtcatgtcagcaggcaacaaaaccatgtacaacacaaatgcttatgcctaccctgctgttgagtacaccttacaggagccatttgtgcagattcagaatgtctcatttgttcctgcaatgaacgcgattgaggatactttcgtgaacctgtcctctgatcaagggagcaactcctttggttgctcggactttagccaggagaatgatatcaagacccctgacataacttccatgcttgcaccgaccatgacaggtgttgctatacaacagcaactccagcaactacagcaaatgcagcaagttcagaatgatcagaagcagaagattcaaccagatcaaagctaccaagttcctacaagtgcagttctcccaagtccaacatcattaccgagtcatttgcgagaaaaatttggcttctctgatcctaatgcgaattcttcaagcttcatcacctctagcagtagtgataacatgttggattcgagcttccttcagggaagttcgaaagctgtggacttatctcgatttaatcagcctgtagctagtgagcagcagcagcagcagcaacaggcatggaagcagaagtttatgggttcacagtcagtgtcttttgggggctcggttttgcataactcacccacaagcaaagatggttctgttgaaaacaaaattggtcgtgatgtgcaaaaccagtccctttttagtccacaagttgactcttcatccctcctgtacaacatggttcctaatctgacttcgaatgtttcggatggcaacttatcaacgatcccttctggatcaacttatctgcagaatgcaatgtatggttgcttggacgactcttctggtttattgcaaaatacaggagagaacgatccagcaaccagaacatttgtgaaggtttacaagtcaggttcggttgggaggtcgttggacataacccggttctctaattatgctgaacttcgagaagaactgggtcagatgttcggcattaagggtcaattggacgaccctgatagatcaggctggcagcttgtattcgtcgacagggagaatgatgtgcttctccttggagacgacccttgggagtcctttgtgaatagtgtatggtaaatcaagatactttcacctgaggatgtgcataagatgggaaagcaaggaaatgatccacggtatctgtcctgaagtgagagaacatggtgccatttctgggcttccaggaggattctgcagtgcatggtggcactcttgctctcgacaatgcacgtcgtcagaagtcccaaatttgtatcttgcatgtacgccgtacatgtttccagaactctctgttacctattcggtgcaggccaccggaaccacgaaacctgatattttgtaggttccacttaggaatcagtatcggtttaactcttatcctagatgatttgtaactcgcacggcagtccactgttttcatgtttcatcgagtcttcctagacattaaacttagttgatattgtatcaggatttatgtgtattgagattcctctacatgctttcaaccaaaaaaaactgcaataatcgaagcgcacgaggattgtttcaattcgtgttgtaggatctggattttcaccgattgtccggttatgtcagtttcgagaggagctgtcaatctgaagttttttctgtagtgcctaatattttgcttttattattaatgctaatcatatactgttgtgatg

SEQ ID NO: 24726 - DNA, 1006 bp, Oryza sativa
  misc_feature (998)..(998): "n"=any one base of a, t, c, or g
  ref <308>: DATABASE ACCESSION NUMBER: AK100168
  ref <309>: DATABASE ENTRY DATE: 2002-08-28
ctattttccctttttttttctgtattttacttgttgaaaattttcatgacattgcttaatgtagttagatttgtacttggttttttctgaatggggactttatatctgcaccaacaaacttttctagcacccctggtgtaggttctgttggaatgcatgatgtctcaagataatttcctattttgcttcatggatactacatatatgtttcattcttgatttcaggtgatttcattcttgtgaagtcatgaaacaaagaatgcaagtccaaggtacccaaaaatcttgggcatcagctgtagctaaaggaagtatttctcaaactcatggtactcatatatatgggtagtacattgctggctgttctatctggagagatcatggcttgaaggggctttatgcagggtatattggcactgttttctcccgcatgcctgccacaagtaagacttactcggactgtgtgcagcgctgccgccttactatcggatcggcggggccaagccacagagcttgaggcacgtcaccttgggcctgcacgccatgctccacaacctgatgcgtcgggatctgctgtccctgcgctctagcctctcgaccctggtggtcaggatccccacacaaggtatctgcgccgtcgtgctcgtagtctcgaagctggagctgctgcaagggactcacgccaccacaaggagctttgctcagcgcaaaggctaccgctgcttcgtgcgcaaaagatcgtaacaaatttttctacatttaaggcttaagccctgatttatattaacaagacaacttttttccatctattatttagtcaccttccttcatggactttactattcagtaggtacaaagttaccatagactctacagaagatatcaagtcttaattttatataattggatatcattatatgccgtacatgaataatagttatatagatgagcgcgcacatttaggtcgtggtatgacatgggaaagtacatcaaggagntatccagc

SEQ ID NO: 24727 - DNA, 2672 bp, Oryza sativa
  ref <308>: DATABASE ACCESSION NUMBER: AK100169
  ref <309>: DATABASE ENTRY DATE: 2002-08-28
gatagattgcaaaagctagctgtctgggagatggtggtggatgaagggatgtgctgctagcagaaatggtgatcgggagcaaatgtgggttgatgattctcgtaccagaagcattgtttgatacgattttgatcagctggcgggagaggaaacatgtcatcggaatcggatcaagccccctcgccaagctcgccctcgtcgtcgtccgtcgtcgtcgtcaggaaatggttccaacaaggcgcctccgccggaagagtctgataattcgagcagcaatgggtcgtcgtcgtctagcccgacacctccttcgtcgcagagctccgactccgactccggaggaggctcgagttcgccgtcacaaggctcgtcctcgcctagcccgcctccgccgtcggggagctcttccgagtcgcattcgtctccaccgccggcgccgccccagtcttcttcttcttcttcttcttcttcttcgagtggtggaggttccaagtcttcgccggaggcaccgtctccgccatccgagtcatctggaaatggtggcggtggcggcggcggcggccgctcctcgccgccgccaaactggtcgccccctccgcagcagcagcagcagcaccagtccggaggctcaactccatcacctcctccgtctccgtcctctaaccagccaccgccatcgagtggctcgtcagcgtcatcgtcggaaccatctccgcctcgctcatcgccgccgccatcgccgccgcaatcaagtggcggcaataatggccaaccgcctaaaccttccggcgggcagcagcaagctcctccgcagtcacctccgtcggcggcgaaccagtcggtggtgttcattcccgtcccggtggcgtcgaacagccctcccggaatgctgccgccaccgcaggtgatcgacgccacgccctccggcgccatctcgtcgaccaacttccccggaggaagaaacagcacggcgggctcctccaacacttcattgtcacagcagcaacacacaaccgtaagctcgacggcccaggccagcagcagcggccacatagccgccgccatcgccggcgccgcggtcacgggcctcctgtgtgccatagtggccatctacctcatcgtgtcgagccggaggaagaagaagatggatgggctggtctaccactacgatggcaacaactacttcgtgccatcgtctcagtttggcgggtcaagccgcaaccaccacccaccaccgtcggcgattatgctcaactccggtggggcgtcagcggacggcggcgggtactacaattcggggacattctcgggcggagaggggacagggccggcggggtccaagtcgcggttcagctacgaggagctgacggggatcaccagcaacttctcgcgggacaacgtgatcggcgagggcgggtttgggtgcgtgtacaaggggtggctaagcgacggcaagtgcgtggccgtgaagcagctcaaggccgggagcgggcagggggagcgggagttccaggcggaggtggagatcatcagccgcgtccaccaccgccacctcgtctccctcgtcggctactgcatcgccgcgcaccaccgcatgctcatctacgagttcgttcccaacggcaccctcgaacaccaccttcatggccgtggcatgccagtgatggactggccgacgaggctgcggattgccattggtgcagccaaggggctagcatacctacacgaggactgccacccgcggattatccaccgggacatcaagaccgccaatatcctactggactactcgtgggaagcacaggtggcagactttgggcttgcgaagctggcgaatgatacgcacactcacgtgtcgacgcgcatcatgggcaccttcgggtacctagcgccagagtacgcctccagcggcaagctcacggaccgctccgacgtcttctcctttggtgtcgtcctactggagctcatcaccggccgcaagccggttgaccagacgcagcccctcggagaggagagcctcgtcgaatgggcacgaccagtgctggcggatgcggtagagacgggtgatctcagtgagctggttgatccacggctagagggcgcatacaaccgcaatgagatgatgacgatggtggaagcagcggccgcatgtgttcgccactccgctcccaaacggccgcggatggtgcaggtgatgcgggtactagatgaggggagcatgacggaccttagcaatgggatcaaggtggggcagagccaagtgttcactggtggcagcgacgctgctgacatccagcaactccgtcgtatcgcattcgcctccgaggagttcaccggagagtttgagcagagaacaaccaactccaactctgagtcgcggccgatgaatcggataccagagtaataacgccttgtatgttttgaagtgcttagcaccggtgcaattacgtgataagggtgacaacaagaggtgagtccatatagaactgaactgaactcaaaaacacatgtaggaaattcagggttttgggtctaattttcggcagtttgtacttatgtacttcaaaacccttttgcacatggaggacattcaatcaagtgataaagatatagggaaatcagtctattaggatccataatggtttgctaagcacataccatcagcatgatgattt

SEQ ID NO: 24728 - DNA, 2824 bp, Oryza sativa
  ref <308>: DATABASE ACCESSION NUMBER: AK100170
  ref <309>: DATABASE ENTRY DATE: 2002-08-28
gcccttctcctgttggcttcatcaccacagctcagcagcatcatcgccttcgccttcgcctccctcccttctccccgtctccatttcttttgtctctctctcgctcttcaaatccagctgctgccgtacgaacgcgcattgcctcagcagttcttggctcctcgcctcgcctccggttcgcctccggttcgcccccatctcggggttggaggtgagcttggagctccctgttcttggaggagccgctggttcagctggtggtgttcttcgatggggaggggcagccatggctgctccgttcttgggtcgtcgctgctgctgctgttctgtctgggctccgccgccgcgcagaaggcctcgacttggaagacactgagcggcaatcctccagcaatcatcgccaagggcgggttttcaggcctttttcctgattccagtgattttgcttatggctttgttgcggcggccagctctccggatacagccctgtggtgtgatgttcaattaaccaaggatggtgcaggcatctgccttccggacatacgaatggataattgcacaaacatagctaatgtttatccaaaggggaagaagacttacagtgtcaatggtgtatctacgcctgggtggttttccgtggactatgacagcactgggttgagtaaagtaaacttggtacaatccctattctcccgtgtgccttactatgatggaactttacccatacttcctgttgaatctgtatttgctaattataaggcccctgctgtttggctaaatgtgcagcatgacagtttctatagccagtttaatctgagtatgagaagctatatcctgtctgtttcaaaacaatatattgctgactacatctcatcacctgaagtgaacttccttaccagtttatcaggaagagttaacaagaagacaaagcttgtgtttcggcttcttaatgaactcgctgttgagccatctacaaaccagacatatggctcaatgttgaaaaatctaacattcatcaagacttttgcatctggaatacttgtccctaagaactatatctggcctgtaacacaagacaattatctgcagcccagcacatcggtcgttggtgatgctcataaagcaggactagaagtttatgccgctgattttgcaaatgactttttgctcagctacaactacagctatgatccattaacagaatatcttaacttcattgataatggtgccttctctgttgacgtgtattgactgatttccctattaccccttcagaggccattggttgctttagtaacctcaacaacagcaagacagacaatgcgaaacctctcatcatctcccacaatggtgctagtggtgactacccagattgcactgacctagcttatcaaaaggcagttactgatggtgcagatgtcatcgactgtcccgtacaagtaaccaaagatggcatacctatatgcatgagttccattgacctaatggatgtcactactgtttcaacgtcacaattttcttctcaaacgactgtcataaaagatatcaagaatggtgctggagtctattccttcaacctcacatgggatgatattgcgaagaacctgaagcccaagatatcaaacccaatgaccacatttgatgtgtacagaaatcctagaaacaagaatgcaggaagtttcatgagactatcggacttcttggcctttgcaaaaggaaaggagttgtcaggagtcatgatcagtatagagcatgctgcattcatggcagaaaaacttggatttggtgtagtagatgcggtgatcaaagcccttgatgactccggctatagcaaacagactgcccagaaagtcatgattcagtcaaccaacagctcagtactagtgaagttcaaggagcaaaccaagtacaaccttgtttacatgcttgaggaggatgtcagagatgctgcaccttcctcccttgcagatatcaagaagtttgctaatgctgtttcagtccgcacaacgtccatttacccggagagcaaacattatttgataaaccagaccagtcatatcgtccagaccctgcagtccgctggccttcccgtttatgtttacgtgctcatgaacgagtttgtttcgcaaccgaatgacttcttcgcagacgccacaacacagatcaacacatacgtgcagaagaaaggtgctggagtggatgggatcatcacagatttccctgcgacggtgcacagatacagactgagcccctgcacgagcaaggaaagcaacttgccgaccttcatgctgcctgtccagcccggtggcctcagcgggaccatcatcgatccagctgcacagccaccagcaatggcgccaatgcctctcttgacggactccgacgtcgcggaatcacccctaccgccggtcaagaacgtcacagctccagccccgggcgcttcacgagccatcaagatgcggaccgacgcctcgatcatcgtcgcgctgctggtgctatgcgcttctctgatcatatgatctaagtgtagtcttcacctctcctgtgtagcagaagcatggcggggctagagcttttgagaatttgtgttgagctacggatagttattctttttattttaccactcctacgtagccattcttttctcttctttttttttcttttgctgtattcttggggatggatgttcagcttgataccttgacgcctggcactattgtgggctgccgcccctagctactacattttggtacatatgtgtgatgcaatgaattgtttcagtttctggccgtatatctgaaatctgtctgaaatgctagttggg

SEQ ID NO: 24729 - DNA, 2298 bp, Oryza sativa
  ref <308>: DATABASE ACCESSION NUMBER: AK100171
  ref <309>: DATABASE ENTRY DATE: 2002-08-28
ggtgcctgcgccgcgcgaaacgcggcgcgcgatgccagccaccatttgcagcgcggagcgagcgaggatggagatggagctcgacgtccaattttagccgccatggcggccgggattagaaggcgggaaagatcacgagaggaggggacaaaggagaggtcagcccccttcctcggtctctccgccgccgcctaccatggggtcgtcgtccctcccccgcgcggccgtcctcgccgtggcgctcctcctcctcctcgccgactccggcgaggcgttcttcgacctcttcagcatcttccgcccgcgctccgacagcgattacttcccgttcgatgggtcgccggggcaggcgaagcggaagccgaagatcgagcaggaggaggatggcgccgcgccggccacagccacgggcctcaccaaggtgccgccgctgggcgcgcccagcaaggcggcgctcgacaccatcgtcctccccgtcgacgactccgcggggcacgccgggtcgtggaccatcgtcagcgagaactccggcgtgtcggcgatgcacctcgccgtcatgcgccacggcaaggccatcatgttcgacaccagcaccaccggccggtcgctgatgcgcctccccatgaataactgccgcgccgacccgcgcgccaagagggaaggcaccatggactgctgggcgcacgccgtggagttcgactacagcaccggcgcgctccggtcgctcaagaccgccaccgacacgtggtgttcgtccggcgcgttcgacgccgacggcaacctgatccagaccggtggctacttcgagggcgacaaggcggtgaggcggctcgacgcgtgcgacacctgcgactggcgcgagtacccgaacagcttcgccgaggggaggtggtacgcgacgcagcaggtgctccccgacgggcggttcatcgtgttcggcggccggcgagccttcagctacgagttcgtgccgcagccggggatgaccaacggccagtccatcaagttcccgctcctccgcgagaccaccgacgacgtcgagaacaacctctacccgttcgtcaacctcctccccgacggcaacctcttcgtcttcgccaacgaccgctccgtcgtcttcgaccacaggacgggcaaggtcgtccgcgagctccccaagctcgccggcggcgggcggaaccacccggcgtcggccatgtcggcgatgctcccgctcgacctccgcaacctgacccgcggcgccgacccggagccggaggtgatcgtctgcggcggcgcgctcaagacggcgttcaggctgggggagaacaacacgtaccagccgacgctccgcgactgcgcccggatcagcctaggcaagatcgacgcggtgtgggcggtggaggcgatgccggtgggccgcgtcatgggcgacatgctcgtcctccccaccggtgacctgctcatgctcaacggcgccgccaaggggagctccgggtgggggttcgcgcggcagcccatcctgtcgccgatcctctactcgccgcggcacccggaggggtcgcggttccggccgctggcggcgtcgacggtggcgcggatgtaccactccaccagcgccgtggtcccggacgccacggtgctggtcgccggcgggaacacgaacgcggcgtacaacttcagcggcgtggacttcccgacggaggtgcgggtggagcggttcgcgccgccgtacctgagcagggagctgaccgggaaccgggcggtgatcgacgtggcgtcggtgccggcgggcgggatgcggtacgggaccaagttcacgttcaggttccacacgccggtggcggcggtggagtggggcgacgtgagggtgaccatgtacgcgccgcccttcacgacgcacggctactccatgaaccagcgcttgctcgtgctgcccgtcgccggcttctcggcgcaggggcagatgtacgagctcaccgtcgacacgccgcggaagccggagctcgcgccgccggggtactacctcgtctacgtcgtatccaaggacgtgcccagcgaggccgcttgggtcaaaatacagtaaatgttggtgtaactaatccatgtacactcttcctctctctttttttcctgtgtctgttaccccttttacttaggtagggaaggtatatacggatatcagatcgaccaaactggtgctttcttgtgctctatcgtatgcttgcgctagaaatatgaccatgcacaaagtgattttaggtgtagctggtctccacaaattgatcttcacaaaatcattttagatatccattttat

SEQ ID NO: 24730 - DNA, 966 bp, Oryza sativa
  ref <308>: DATABASE ACCESSION NUMBER: AK100172
  ref <309>: DATABASE ENTRY DATE: 2002-08-28
gattttcattacaagcagggcaccaagaatgccaatgtgttcccttcatgcctctaccatgatttttcttctttattggatattcagttcaattcatctctgtgcatccgacaaccgccttgtccctggtaagccaatctctcctggtagcaccattatctctgatgatggaacatttgccctgggttttttctccccatccaaccccaagaaacactattatgttggcatatggtacaataacatccccaagttcaccgttgtgtgggtagcgaaccgtgccgcgccaatcactgttccttcatctgcagtgttcaccttgaccaggagctccaacctcaccttgtctgatggcaatggccatgtcctttggacgacaatggccaaaagcagaatcagcatcagctccccccgaaacaccaaaaacatctcaacagaagccatgctagacaacaccggaaacctcattctccggtcattggctgacaatgccatcatatggcagggcttcgaccacccgaccgacactctcctgcctggcatgaacctcaggctcagccacaatacacacccactgcagcgcctcatttcttggaaagacatacgagacccatcccctggtcccttctcctacggtgcagaccccaacaacctgcttcagcgcttcatctggcatggctcggtgccgcaccggcgaacgcctgtgtggaacaactacctcctcattggtaaatacatgaacaacctcaattccacgatttacatggcgataaaccatgacagcgatgaggtgtacatgtcctttggcatgccaactggccccttcagtgtgctgatcaggatgaaaataacctacctaggcaaggtaaatatgttaggttggcagagcaacatctcagcatggacaaccctgtactcggagcctgtgcatgactgctatatctacggctattgcagtccaacagt

SEQ ID NO: 24731 - DNA, 1378 bp, Oryza sativa
  ref <308>: DATABASE ACCESSION NUMBER: AK100173
  ref <309>: DATABASE ENTRY DATE: 2002-08-28
gcccccctccgcctcgcactctctctcgctatagcctatagcgtctctcccgaaggctcgagacaccacacctctcttctctttggctcctctcatcgctgcattgcgatcccaagagctgtgagctttaggagcttgttcatcacgacctgaaaatcatggagttcgaagaccgctgccacaaggtccaggagcccaaattcgactgcctgctgtttgacctcgatgacactctgtacccactgagctcggggatcgcgtcccatgtcaagaagaacattggagattacatggttgagaagctgggtattgaggagagcaagattgagaaccttggcaatctgctgtacaagaactacggcacgacgatggccggactcagggcaataggctacagcttcgattacgatgagtaccacagttttgtccatggaagactgccctacgagaacatcaagccggaccctgtcctgaagcacattctcaagaacctgcgcatccgcaaactcatattcaccaacggcgacaaggaccacgccgtgagagccctcaagaggctggggctggaggactgcttcgaggggatcatctgcttcgagaccctcaacccgccgtgcccgtcgccgccgtgcgacggggaggccagcatcttcgacatcgccggacacttctccatgcccggcgccgccgccgacgagcttcccaggacacccgtcctctgcaagcccaacgtcgacgccatggaggaggccctcaggatcgccaacgtgaaccctcacaaggcgattttcttcgacgacagcgtgaggaacatccaggcggggaagaggatcgggctccacacggtgctggtgggcacgccgcagcgggtgaagggcgcggaccacgcgctggagagcatccacaacatcagggaggcgctgccggagctgtgggaggaggccgagaaggcggaggacgtgctcatctactccgaccgcgtcgccatcgagacatcggtgaccgcgtaggccacacctactgtctctcccgactccggcgaatcgctcagaacgagcaaccatccatccatccatgtccatccctggccgggcaggtgatcatcaggtgggaattcagaattggccgggacaacaatacgttccaagaaaaaaagaggagggtgttccgtggaagttcaggattcagaatgtaacagcaatgttggaacgggtcctgtagtatatatatgtatcggtcagatctttgcatgtaaattagtactcctagaagcaataataataataattaataaagagaatgggggttatttatcacttcttgattgtgtatttatctctcgtgtttaactgaagctctgaaggatttttattagccc

SEQ ID NO: 24732 - DNA, 1484 bp, Oryza sativa
  ref <308>: DATABASE ACCESSION NUMBER: AK100174
  ref <309>: DATABASE ENTRY DATE: 2002-08-28
gatccatccttcgttcgctcatcgcgtctcgactccactactgtggttgcatatactactacacttgcagttgcatccagagcccgccccgcgtctctactcgctccgccgcgccgtcgtctctcccgacttcggcgacaagcgagcgacgcaggccaccgcgcgcggttcgttttcgcgagggaggccgccgccgaccagccgccatggtctcgccggacaccatccgcacggccatcggcgtcgtaggcaatggaaccgccctcgtgctcttcctctccccagtgccgacgttcatacggatctggaagaaggggtcggtggagcagtactcggcggtgccgtacgtggcgacgctgctcaactgcatgatgtgggtgctgtacggcctccccgcggtgcacccgcacagcatgctggtcatcaccatcaacggcaccggcatggccatcgagctcacctacatcgccctcttcctcgccttctccctcggcgccgtccgccgccgcgtcctcctcctcctcgccgccgaggtcgccttcgtcgccgccgtcgccgccctcgtcctcaacctcgcccacacccacgagcgacgctccatgatcgtcggtatcctctgcgtcctcttcggcaccggcatgtacgccgcccccctctccgtcatgaaaatggtgatccagactaagagcgtggagtacatgccccttttcttgtccctggcgtcactggtcaacggcatctgctggactgcctacgccctcatccgcttcgacctctacatcacgatccccaacgggctgggagtgatgttcgcggtggcgcagctgatcctgtacgccatctactacaagtcgacgcagcagatcatcgaggcgcgcaagcgcaaggaggccgaccatgtcgccatgaccgatgtcgtcgtcgactccgccaagaacaacccctcctccggcgccgccgccgccgccgccaacggccgctactagctcacgccgccctctttacttcaccagctagccagtcactcaggaggcatggccaccgatgaggccttcatgacttactagcaaagtggagtactacctttagctaagccgtcccaaagggatattactacatgtctcaaattaattagctaatctaatcaccatcaccctgcctaatccgctgctgttaattagtatggcagagagcaaaagaagaacaaattgagctgcacttcttatatgtactctcaagtgcagtgctactattgtcagtcccattgggggtaatttactgtcttatttacaggaggagggcctggctgctcttgttaaaaacagctagccctgccttttcttttttcaatatcatcatcatgccgtgcttttcgatctactctactgtaatttttccttgctttttcttgcctttctgtacctgccgtaatgtaccttggaggccatccagatggtgttggggattatgatacctggaaaatg

SEQ ID NO: 24733 - DNA, 2364 bp, Oryza sativa
  ref <308>: DATABASE ACCESSION NUMBER: AK100175
  ref <309>: DATABASE ENTRY DATE: 2002-08-28
gtctttgtggtggtgataacatggcagcgtcgccgctgccgaggtgggctccgacgccgagcccgacgaggccactgagaacgccaggaaccccgagcgccggcgccggcgccgcctcgtcgtcatcgtcatcgtcatcgtcgtggcgcagctgtgtgccgttactcaccaccttcagttccgtcttcggatcatcagctgcgcggcgcggtggtggtctctccggcggggagccaccgccggcgctgccccacgccggtcgccatgacatcgtcggcggcattgcgcctctcgacggcgtggaagccgccgtcgaacggcgccggaaggacgagatgatgatgagcgccacgacggcgtgtagccgtggggtgttcctgacgtgggacgatctgtccgtgacggcgccggcagctgccgccggctgcggcggccacggccgccgcgccgtgatactcgacgggctcagcggctacgcgcgccccggcgaggtgctggctctcatggggccttccggctgtggcaagactaccctgcttgacgccttagctgggaggctgagccccaacatgaaaatgagaggagacatcctgatcaatggcctgcgagagaaactttcgtttggaacatccgcctacgtgacccaagaaaacgtgctgatggcgacgctcacggtgacggaggccgtccactactcggcgcagctgcagctgccggactcgatgccggcggaagacaagcgggcccgcgccgaccgcgccatccgccagatggggctcggcgcggtcgccggcgtccggatcggcggccgggtgtgcaagggcatcagcggcgggcagcggaagcgggtgagcatctgcgtcgagctgctggcgtcgcccgcgctgctgttcctcgacgagccgacgagcgggctcgacagcgcggcgtcgtaccacgtcatgagccgcatcgccggcctcgccaggagggacgggatgacggtcgtcgccgccgtgcaccagcccagcacggagatgttcgagctcttccatggcctctgcctcctggccactgggaggacggtgtattttggagcagcttcagatgcaatcgagttcttcgaatctaatggcttcccatgtcccttgaggaggaatccttctgatcacttcctgagaatgattaacaaagactttgaggaatctgaagaaggatctaccattatttctccacgtgctgccgaagtgatccaaaaactaatgggttctttcaaatcttgtggtaccttaaggacagaaaaggaagcatgtgcaatgattaatcagggtgcctctccaattcctcaaaggcaggcaacattcttgaccaaaacatatgtgctaaccaaaagatcaattgttaacatgcacagagatgcaggctactattggttgcgatttgttatctacattgccatttgcttaagcattggtacaattttttttaatgttggctcaaattttgcatcaatccaagcaagagcttccatgctaatgtttacatcaaccctattaacaatgatggcaattggaggttttccatcttttgttgaagatatgaagatatttcgaaaagaacggatgagtgggcattatggtgcaacagaatttgtgatatccaacacactctcctcaattccatacctaggcctcatctccataattccaggggcaatagcctattacctgacagggcttcaaagaggaatagaccacttcatctactttgctgcagttttgtgggcctgcacaatgctggtagaaggattgatgatgattgttgcagcagttgtgccagattttctgctagggataatcactggctctggtgtacaaggtgtactgatgctcaacgctggtttcttcagactcccaagtgatctgccaaaaccagtttggaaatacccaacatacttcatctcctaccacaagtatgcaacgcagggactgtacaagaatgagctgttgggcttggtctttgaagatattggcggtggcgggctcacgattagtggcgaatacatcctaaagaattacttacaggtggaattaagctactctaagtgggtggatcttgcgatattagttgcaatgatcataatttacaggttgcttttcttagttattataaagatttccgagattgtgaagccaaggatgcttcactttctctgtgcttcaaaggtatagcattattctagttgttgttgagtacaatagtatccatggaacgtatgtagatccttcttatatatctatcaataatttatcgtgatgatcagaacaccatcatgtataattgtatattactgaatcaatgaaattatctctccttttatcccct

SEQ ID NO: 24734 - DNA, 1036 bp, Oryza sativa
  ref <308>: DATABASE ACCESSION NUMBER: AK100176
  ref <309>: DATABASE ENTRY DATE: 2002-08-28
gcggccttttctcgctccccttcctcctgcgcacgcgttctcccgatgcgccgccgcctcctgctcctcacgccaccgttctgtgccgccggccccgcaagggaccaccgcgccgccccgcctcggaaaccgcctgggcgccgccacctcctgccgccgtcacctgcgccgacttcgcgaggagccgccgcgtcgcctgccttgggaagccgccgcctgccacctgggagcacccgccgtcgaagtccggcgccggttcctcgccgggaaccgccgccgccgccgcaagctcctgcccgagctacgacgaacgccgcgccgagcaccacgccgctgcacgccgcctgcaatgacgcctccagccgcccgtgaactcgccgccccaaaccacgctgcccacgaaatcagagtgtacgtagcctacgcaaaaataggattgggagtcaaaaggaagaaacgaagcatatcgtgaattggtcagccagccacattaccaattttctccggcagcattgaggtatagaaatcataatagacattagagtctagctctcggctggttgatcttccacacactgtaactgttggtgtagtttaacaaaccgatgaagcaatgtagtggagatgctctagttgtccagacgagaaatggcggcactgaagctggtcagatcaggatgaagcagcaaaggcctgccgttgttggccaagaaattctgaaactatcaagtacaccttcaggatcaatatatggtagcatcatccttttgaagcgtcgtctaaaatccttacgtaccaagccctgttagctcagtttttctactgaacatgaacacatttacttgtctatagctagctagtatttatcgatccggaggttagaaacacaaacaaaaatgatatcgtggtccgaccaaaatgggacggacataccccacaatggcgccgtgtggacccaactgaaacattgggtagttggcgacagctcttttgggctgaaacttctaagttttcaagtgatgaggtatattctatt

SEQ ID NO: 24735 - DNA, 1206 bp, Oryza sativa
  ref <308>: DATABASE ACCESSION NUMBER: AK100177
  ref <309>: DATABASE ENTRY DATE: 2002-08-28
gtctactagtgtacagtgccactgcgagctctcctctccgcccccgatctggtcgcctcgctcgcctcaaaccctagagctccatccaccgacgagccctcttgggcggaggtgcttcattgctgctgctgctgccatggaccccgcccccacgctcgccgccgagctctggcgaacgccgtacctcggtggcggtggtggtggaggaggaggagggcgtgggttggaggcggcggcgtccggggtcacggagcagagcaatgggagccgcgggggtggcggaggaggaggcgcagggcggaggaggcagcgggaggcccccgcgctcgaggacgactcgtccaggatcgtctccgcttccggaggaggaggcggcggtcaggatttgactgattcagaagcaaagcgtttcaaggcaagtaaatcaagtggagataatagcagtttaagaacagaggctgaaactgattcaagaaatgctagcaagtctggtgatcaaaatccgccaccaccagaaccaccaaagcaagactacatccatgtgagggcaagaaggggtcaagctactgacagccatagccttgccgaaagggcacgtcgtgagaaaataagtgagcggatgaaaattctccaggatcttgtccctggatgcaacaaggttattgggaaagcatcagtacttgatgagataattaattatatccaggctttgcaacggcaagttgagtttttgtccatgaagcttgaggctgttaatgctcatgtgaataatggaatcgaagcatttccacccaaagattttggtgctcaggtatacaacacggctcctggattgacgtttgatccacaaacaccaagagaatacgcccagggatcaacaccatcggaatggctccacatgcagattggtggcacctatgaaagagtgacatgaacagaacaaagtcaggatggtggcccaaaataaagcataccatgagttcagtcagaaaccacggctttagattatttttcgaaactctcgtgctcaaaattcgatttcattcatagcatggagctcatgtatttagagactgcgagcacagtatttttacatctgtaccgggatacaattctcatcagattcatgtattccacggaatttcggcaggtcacgctcattcgtagcatgaaagaaaagtaataaccatcaataattctcttgct

SEQ ID NO: 24736 - DNA, 1261 bp, Oryza sativa
  misc_feature (622)..(622): "n"=any one base of a, t, c, or g
  ref <308>: DATABASE ACCESSION NUMBER: AK100178
  ref <309>: DATABASE ENTRY DATE: 2002-08-28
ggccacttgctccacccaacgcgcgagtctgtgtgccgccgccgccgccgccgctccgatggaaaccgccgcggcggcgccgccgcgcgtgcaggccctagccgacgccggcgtctccttcctcccggcgcagtacgtccagccgccggaactccgcccggaccccaccaccaccacccaccgccgcgccccgaccgccgtcttcctctccgtccccgtcgtcgacctctcatcgcccggtgcgggcgacgccgtccgccgcgcgtgcgccgagtggggcgccttccacgtggtcggacactgcgtccggccggggctgctcgacgtgatgcgtggggcggggctcgccttcttgcgctcccccatggaggagaagccttggtttccctgcaaccaggcctggggcgccgtcgtcgaggggtacggcatgcggatgcttgccaacgatgactccgggcttgactggcgctactacttcgaccaccacacccttccgtattcccgccgcgatccgatccggtggcccgatttcgttctcgctacatggacactgttgtgaatacagcgacagcatgaaagatctcgctcaaaaattgctgcgcattgactctgaaagtctgancttgccaccttcgtatatagaagaagcagtgggggaagtttatcagaatattactgttagctactattctccttgcccacaacctgatcttgctcttggattgcaatctcattctgatatgggtgcaataacacttctaatacaagatgatgtgggtgggcttgaagtactgaaggacgggctgtggatacctgttccttctttgcctgatggaatccttgtaattttggctgaccagacagagatcataaccaatggaagatacaagagtgctgtgcatcgagctattgtcaatgctgatcgtgcccgcttgtcagtagcaacattctacgatccatccaaatctcgaaaaatttgtactgctccacagctcgtttgcaaggagcatccacagaagtaccgggatgtgatatatggtgactatgtctcatcttggtatagcaaaggcccagagggcaagcgcaacattgatgccctcctgatcgagcaatagaaccagaggcagcattatatagacagaatagagacattcatgcgtgttgtgatgctgtccaagattgccgatcttgattaataaagagaataacattgtaccatatgaatggttcctggtttttgaagtttctatgattcttatcg

SEQ ID NO: 24737 - DNA, 1311 bp, Oryza sativa
  ref <308>: DATABASE ACCESSION NUMBER: AK100179
  ref <309>: DATABASE ENTRY DATE: 2002-08-28
gacactgccaagctccgcttcaagtgagctagtctagccagcgtttagacaccatcaccagcaatggcgatcgctggcgttctcttcctcctcttcttggcacggcaagcctccgccgccgggtacggcgggtggcagagcgcccacgccacgttctacggcggcggcgatgcttccggcaccatgggcggggcttgcggttacggcaacctgtacagccaagggtatggcacgaacaccgcggcgctgagcacggcgctgttcaacgacggcgcggcgtgcgggtcgtgctacgagctgcggtgcgacaacgccgggagttcgtgcctgccgggctccatcaccgtgacggccaccaacttctgcccgcccaactacggcctccccagcgacgacggcggctggtgcaacccgccccgccctcacttcgacatggccgagccggcattcctccacatcgcccagtaccgcgccggcatcgtccccgtctccttccgcagggtgccgtgcgtgaagaagggtggggtcaggttcaccgtgaacgggcactcctacttcaacctggtgctggtgaccaacgtggccggcgccggcgacgtccgctccgtctccatcaaggggtcgcgcaccgggtggcagcccatgtcgcggaactggggccagaactggcagagcaacgcgttcctcgacggccagagcctctccttccaggtcaccgccagcgacggccgcaccgtcaccagcaacaacgtcgcccaccccggctggcagttcggccagaccttcgagggtggccagttctagccgccaccgacatcgccgtctccgacacccacatataatagcacggtgtccttcttcgtcttcgttctcgtcgtcgtctttcttccttgagagattatttattttgagcaagagagaaagaaaagcctcttcgttatagtggagaagaggttttgggctatgctgaggctgctaattagcacccgcttagacgttttccttctctggacttcgtccaataatgactggaccggtccaccatcatcaagtgtagtggtagtagtaaaggggagtactaagcttagtactacttgaagaaaaaatcaataataattgtattgattaaatttctacttttgagcgttttcttgtaccggagtgatggccttgcaacggaattaaaaaccgcgaggccgtgttttatttatcaaggggactattgatgttgtactttgtcgtagctagcggctgtagcttctctgttcctgtattgtttgggtgtaatggaggagtaatcaattaaggtgc

SEQ ID NO: 24738 - DNA, 4695 bp, Oryza sativa
  ref <308>: DATABASE ACCESSION NUMBER: AK100180
  ref <309>: DATABASE ENTRY DATE: 2002-08-28
tgatcctctacaacctcgtccccgcccaacccctaaaccctagcgccatccccaaccctaaccccgacctctccatcgccgccgccgagcccccctcctccgacggcgccacccctcgccgcgtcaggcccaggaagtccccctcctcctccgaccgccactccaaggtcgccggccgcggccgccgcgtccgcatcccggccatggtggccgcccgcgtcttccagctcacccgcgagctcggccaccgcaccgacggggagaccatcgagtggctactccgccaggccgagccctccatcatcgccgccaccgggacgggcgtcaccccggaggaggcgccccccgccgccgtcgccatcggctcttcctcggtcgccgccgccgccgccgccggcgggcatgggggcgcgttcgtccatgtgccttactacaccgcgctcctcatgcagccgcctaacgcggacgagccccccatggcatccgctgcctccgcctcgggcaccaccgccgccgacgagaacaataattaatttagaactgccgctgttaggtttaggagcttggagcgtgttagggttagggttccccggcttatttaggagaggtctccccctcctcaataatttaacctcattgtccttgtggcggttgcggcggcggcatggatttaggttatttagatgccttattcaggcaagcaaatgagggggtgattcagatggtttcttagagaggagggcagaaaaatggagagctctctgtaagtggtgggtgaggactggagtgagtggtactgatgttctgatgaaacaatgcctgagttattgtgaatgtttagatctgctgatttattctccgtgtgcgctttttatgtgctatagtagatgattccatttggtgtttaccttgactaggaagtaggaacatggtttggttgtgccgcagaaggaacagtcttgggttgtatcatgagaggagcttggaagttggaaacataaccaaattgacttggctgttactgtcagctggttatttttgaatctaaccagaattcagatgcagattaacaaaaaaggttttatttggaaattgcttggaagggttttagtgctcaggacatgtgttctgcggttgcatcttgtcgtattctgaagacgacggttctggattgccaaatacatgcttttattcctactatgcttgttttggacgtcaaataaaatgcatgtgctcttccacaagtggatacacatctcatttggaggattaggtttccttttgttgtaactgtttgctctatttcttgtttattacttttgtttattcttaaatcatgtagaagaactatagttgtagtggttaatgttttttgtctgtttggtttcccttgtcataaaaaattataccttttgtctttgagttgggaaacgactttatatgatgcttaatttatttcattgctttctggacatatttatatcaatagcaatgtgttggtgcattcaacttgctactgaagacctacagtttgttgacctcaatgcttggcatggctgcaaagattcaggtatggtgcttttgctatgctatagtattttctctaaaaattagcttcttcacatgatcttccgaagcattagtcttctgcagaaattaaaataatacagctagccttgtggatgtggaatttagtgatagatttaaaattttcattattctcatatgccatcattttccattttatttagatgtaaatttgcatggattttccccaagaatgcttgatcgtttcacgatttacaggtaacaggctatgtacctttttggaattttataattgttgggcatttaaatgttattgagtaatgttatatgtatactaacaagcaaacatcagatcaaaactgagtcgtgtaaggaaatttttgggttggatgttccagaacatcttgataatccatcaattcttttaaaagcggtacgcggtttcatgtggtcaccacacctcgtagcgcttatgcggcataattggccgcttatgcggtggattggccgcttatgtggcttaagcggtacaaggttggggcacctgttccttgtatgcggccttgtaaatgtttttttagaacactgtaatccactattttgatcagggggctgatatggtaactggatccttgttctaaattagtaccctgtacaatcaatttttgtttattaacgtggaatttttatatccaaagaaggcctcacgcagggctggtgcaccaattttgatgggtagctgaatacccatttattttgtgtctatgttatatcgtgataaaatggagttttgctctattggttcatatattttctgtatctatgtatatagtgaagaaggtgaattttgctctattggttaggccttggatgcatcattctggctgtgggtttgattcccatgctctccagccccatgtcacctttttttcccagtatctcttgttcgcctcaatatctttgtattgtttctctcttccacccggtaagatttgagaaacctgccatattttctcagaaattcatcagttcttttcaaaaacaacctatcattgcataaaaaaacttgcatcttttctactgacgacattaaatcttttatttaaataccaccacataagcttcatatctcctgtgtttgccgctgtgccaccgcttgtcctagcgccatatgctccacgctcctccccttgtgtctttatctttgccccatctactattgtgcacttgggtcttggtcaaacagctcaacatggaatcaatcgactcaagcctagcctatcatgcaacttgtacctctcccctacaatcaggttgttaccacactgccataggcagattgccacctagctgccacacatttccttgccttgcagcctccaacatggctctaatccctgttgagcggtgcagatatgctaattaggtgcatcacaaactgtcatacttgccagttgcttgacaaaatgattgacttcttaaactttgaaccatttgtgcatgtactctgtccttctgttggataaactgtagtgcttgtgagagtgacgtggtaattccatttaacgtcaaaggtggagtctaggggttgtgggatttcatgtcaaaggggagtccagttatcctgccatttcagtatttagcagttcattatttccttttgaccatgctccatgccgatagattatgcaactggggcattaattgaaccatgttacgatttctctatattcagtcgagtgattgcttatattgcacctggtctgatcatgaatgaggttatgaacctgactactgctttccaattgctctttgggatgatatatgaatctatgttctctgaactgcatgctttagattattgcaaacatgttgaccattaagtataaataatgtagagttctcaatttgcagttcattttgatatattttcatttttctatgttctttgcagctgatacttgaaggaaatgcttctgattgttgtgtgtgcaactgtgcatgtcactcatttttcaatttggttaagtctaatcatggattccaggtgtagttccctcttcgcacattcatacctacgcaacatcctgtttctgcatatgtattgccgttaattgttgaaactgcatcataaacaaattttgcactgagaatatttgacttcttacctttgtggagaatgcgtggccagagcatagctcataacaaaatggtaagagtgactaaagtcaattgtcactggttagagcatggactgtttctaagtaagatttctttcttctgtaacatttactggttaacatatctgagttctgtgggtgctcacaagtgagcgtattgtttatgtatattgacatattgtttcacttctagacgataaagaaatcacgaatttgtagataatgtgggccattcctatgggcttctccttttgcatctgcatattacatctttaagtcttcaatatgaacaagaaatgatctttcttgattgggaaaaagtcagttatgtcaggtcactggttatttcttgattgttgaaatggactttgatcatggatcagaacatggtattttctccattgaattctacaggtacagtttcttttccttgttactgaccaatgcacttttgtcatcatctgattagtgttatcatctgaaaaccaatctgtatttcaatgtgttttaatcttcatctgaaacccattgtaccagctctgttccttgaccacaaatccaacttgcagagaagtacactgacctaggatggctcccaagcaaggaccaggaagtatacatctaaaaaataaagcattttttgtgcccaaacatttatggtcttgaacatcttgggtgtgttttgggagtcgttttttagcagcggtagcagctggagcagttcaaagtggctgcagtttgcagcaattttgaactgccgcagcctcagcagctgtggcaggtatggctgctgaacagagcccttattgttcaattatcaccctgtgacaggactttctgaaggcaagcttctgcatctagaatttctattttggtacttatagttcttgcgtgacatttgttctggcacaatgtaccaacaattttgatagtgaataactgagtacaatttaaaagatgaactttc

SEQ ID NO: 24739 - DNA, 2205 bp, Oryza sativa; identical to SEQ ID NO: 19281
  ref <308>: DATABASE ACCESSION NUMBER: AK100181
  ref <309>: DATABASE ENTRY DATE: 2002-08-28

SEQ ID NO: 24740 - DNA, 2759 bp, Oryza sativa
  ref <308>: DATABASE ACCESSION NUMBER: AK100182
  ref <309>: DATABASE ENTRY DATE: 2002-08-28
ggtgaccccgagccgaggcggcgagagagagagagagagagtattagtagtagtaggagagggaagcgagtctcctcttcctcctcctcctcatcgccgttagctgctgctttcgccgaaggattgttgctgggccgcgtcgtgaccatggatggtgagacgagctgttcttcctgggacagcgacgatgagtaccagaagttcatccaaaagatgaaccctccaagggttgtgattgacaacacatcatgtagacagtgccaacaagtatgggatactgttagaggtagtgcaggtcctcaccgagctgcaactcatagtgaaaaaagcctacatatcatcagatggtggatggttcatggatggtacgatgcgattcttgagattttttttcttgaaatcgattagttcagaatggttaatttatcctgagctgttgatttttttatgtcagtgttcaatgtgactgatcaaaatgggcagaagataatggatgaatcggtactggatgagatagtaaagtatattcataagtgtcttggggctgattcttgctttcttccttcgcggaggagatctgttggagtggaaccttcctctgactacactttgatagagctaactggaactgataggcccggtctgctctcagaagtgagcgctgtgctcacaaacctggaatgcaatgtggtgaatgcagaggtgtggactcataacaaacgagcagcagcggtcatgcaagtcatggataggaaaacggggctggcaatctcagacacacaacggcttgctagaataaaggagcgacttagctatgtgttcaaagggagcaacaggagtcaagacaccaagacaacggtgacaatggggataacccacacagagcggaggcttcaccagctgatgctggaggatcgggattatgaaaggtatgataaggataggacgaacgtcaaccccacaccggtggtttcggttgttaattggctcgacaaggattattccgtggtgaatattcggtgcaaggatcggccaaagcttctcttcgacacagtttgcaccctgacagatatgcaatatgtggttttccatgggagtgtggattctgagggccctgaagcttaccaggagtattacattaggcatattgatggctcacctgtcaactctgaggcggagcgacagcgagtcatccagtgtcttgaagctgctatagaaaggagagtatccgaggggctgaagctagagttgtcgacaggtgatagagtgggactgctatccgatgtcacacgcatcttccgtgagaatggcttgacggttacgagagctgaagtttctactaggggtgacaaggctgtcaacactttctatgtccgcgatgcagcagggagctccgccgtcgatctgaagactcttgaagctatacgccaagagataggccagacagtgcttcaagtaaaagggcaccctgatcaccgcaaatcacctccgcaagagtcgccatctaggtttctcttcagcaatctgttcagaccaagatcgctgtacagcctagggctgatcaggtcctgagttcttgggtgcctgctcaatccgcggatcgacaaatcatagcatgccatgtcaacaaatacatcgcggtgtatactctccgcagtctcagtcccaggacaaggctgatgatgcatttgactcaggtggcgtaccatcattcatcagatgaaaaccatgaagcatgagcatcccccaagcatgggagcaacagttgcgtgaatacagttggttctgtgaaagcgccccacccaccgctgtacataaatcccaatcttctagcatagaactgtaaataccaatatccccagcggcgtcagtcgtcgacaacatttacaaagaaccagccatgatttcgccgatgtcaagctcacttcttgctcaaccagaatggtctgaaaacatcagtgtctgctgacctgcatgtaagccgacgatgacgtcagcgatgactcatgaggacctggagtaggattacccaacaatgctgtcatcagatgaagagagagagggtgtagacgacaatggcaccattgtcgtcgtcgtcgacggtgacatggcggctgccagtgttcaccattctgcgtgctgggtaggcgcacatgccgaaaatgggcgccagctcggccgggggccgggctgcctgggcgcaagttggtgtggaaatggagatacacttggagagttggggatgcgtgtggaggatgcactgcctttgtttcaagctgtttgtcttgctaggcaggcagaggcaattccgagaaacatttgggaaaaacttttggtctcacctgtgtttcctgcactgtcatgtccgggccctgctgctgttgctccatttccacatgtctgcgtcccggcaaatatctctactactactagtgaacactttgatggctttctttttttttctttctttctttctctgttcaatcctgtttcactcgtgcgtccaccagattcacctgttcatcggtgcttccagtttattggcaaaactctgcctttcttttggggcttgttggtaagtgctgtttgtgcactgtggttgagacaaattgttccttgcattgacgaacacctttttcgttcatatgctcaataagttactgcttttatttttgttaaattaatcacatgtccgtgcgttgtaacaagatatatggaaacactggctgattacacgtggttaatttttattttacctc

SEQ ID NO: 24741 - DNA, 1982 bp, Oryza sativa
  ref <308>: DATABASE ACCESSION NUMBER: AK100183
  ref <309>: DATABASE ENTRY DATE: 2002-08-28
gggagagagaggaactgaggaagcgaagcgaagcgagagaggaggagaaagcccggagagcttgccctcgccgcgccgcggagatccgcttccccatccccccaacacgtcgccgccgccgccgccttccttgctgcgcggggtaatgcgcggccatgggactgcaagggaataaggcgacgcacgacttcctctcgctgtacgccgccgccgccaccgccacggactactcgccgctcccgcgccacccggactccaagccctcggcgccggcgccgccgcccgctcaagatttcttcctcaagacacacgacttcctgccgcaggtagagaagagagccgaccagacaccaccgccgccgccgccgccgccgccccacgccgcggtcaccgccgagaagcagctgctccaccagcacgcgttggccgccgccggcgcgttcaccatcaaccacgccgtggccgcggccgccaccgccgtcaagcaggagccgcccttcgcgccgtggtgccagcccgtcgccgccgtagatccccgaggtcaccagtggtcgctccccttcgccgcgcgcgccgtcgccgtcgcctcctccaggccgcagcagcagcagcagcagccaccgccgccggagaggaagggtggcggtggattcatggacgccggctccagatccagtggcggcgcgggcttcgacgacgacgacggccatgccgcgcgccgcgaggtctcctcctcgctgaaagagctcacggtcagggtggaagggaaaggtgggagctgcagcggcagcgctggcacggatcagatgccgaacacgccgcgctcgaagcactccgccaccgagcagcgcaggcgcagcaaaatcaacgacagatttcaacttcttagagacttattgcctcataatgatcaaaagagagacaaagcatcatttctcttagaggttattgaatacatacggtttttacaagagaaagtacaaaagtatgaggtttcatacccggagtggaaccaagaaaatgcaaaggttgtgccatggacaaacatctatttccgttcttcctggaaaaatgcgcagaacaaaggccaagttcctgcagatcattcacctgaccctccagaacttctgaaaaatggttccccctatatgttcccttttacagggaactctgataataacaatgcagttgaaactgcagctgcttcaggtgcacaggatcaggcagaaactgatccaatgagtcgtgtgtcttacagatcagtggacactcccagtcccaataatgttgcagacaaagttacatctcagccacacgctcaactggtgagaccatcacctgcagagaatcacacagtaaactgcgacaagttaaataattctgaccttgccatcgatgagggaacaatcagtctatcaagccaatattcccaagagttgcttaacaagttgaatcatgccctggaaaactcgggtatagatttgtcccaagccagcatctccgtgcaaataaatcttggcaagagggctatgaagagatctactcctgctgcaacctccacttctaaggagctcactgatccggcatctaatagtcaagcaatgggccgtcagcttaggttgggtgatggcgctgaagaacatcgacaagcctcaaagcgacacaaatcagataacagctgatggtttgctcctgaaaaccccagatattcaaccattttttgctcctaactgtgtacggggagccccaaggttttatgtatattaagtttacctgtgacgtctcgacaaaacaaggccttgatgtattctttcatttaatcacttcgccgttctagcccctagggaagaaaggaagcttccattgcagattgtgaagctgcttttgtccatatgcttccattcatatgagaagtttctcccaccctctgacagaatgtcttttgtaacataattcagaaatgagctatccaaagttccatc

SEQ ID NO: 24742 - DNA, 1050 bp, Oryza sativa
  ref <308>: DATABASE ACCESSION NUMBER: AK100184
  ref <309>: DATABASE ENTRY DATE: 2002-08-28
gagaagaaaagccttgtgagttggtaattgatagtagcaagacaatgtgtgggggagcgatcatcgccgacttcgtcccgcccgccggcgcccgccgcgccgctgcctccgacatctccgacaacgccgtcctctccgctgccggtgccggtgacgagtcgttcgcggcggccaaggcgccggcgccggggaggaagacggcgtaccgcggcatccggcgccggccgtggggacgctgggcggcggagatccgcgacccgaggaagggcgcccgcgtctggctcggcacctacgccaccgccgaggaggccgcccgcgcctacgacgtcgcggcgcgcgacatccgcggcgccaaggccaagctcaacttcccgccgaccatcggcgccgccgccgtgccaccgccgtccaagaagcgacgcaaagccgccgccgcggcgaaccaccaccaccaccaccaccagcaggagagctcaggctcctcgtcggcgtagtcgctgcctcccaccccgccgcgggccgcagagcaccagcttcgcgagtgcatgtccgggctggaggcgttcttgggcctcgaggaggaggaggacgacggcggcgccggtgagccatgggacgccgtcgacatgatgctcgagtaggctcgccgggaatggcagcgttgccatgctcatgcatccaagcttattcatgcatgcagcagcaagatatacaactttagtactactactatgttaattactacttactgcgtaggtaaatgaaataaaatggggttggttaattagggtgttcttctgggaatccttggctttgctaattgctagtactactatgtactttggcgttaagcattgcattgccaggtgatgcatgtcatgtaatcgtggtaattatatggccgtcctcctagagctagctagcagattagatttactatataaagtggtagtagaaatatatgtcctcctagagctaactagtgtcttgtaatgatttcagacttcttgggcaacatgagcaatgcatttcgacttccactttacatct

SEQ ID NO: 24743 - DNA, 1473 bp, Oryza sativa
  ref <308>: DATABASE ACCESSION NUMBER: AK100185
  ref <309>: DATABASE ENTRY DATE: 2002-08-28
gttggggtccatattcccctcctcaccgctgctcctttcttcggcatggtcggcgatgtcgtagccgccggatccggctatctctatcgagtccagtcgctttttggcgaggcgctgccgcgaccgccgccggatcggggtcgtccatcgccgtcgcgagcgccgtgtggctctcacgtcgttgggggctgccgaagccgagcggggaagcacgtgcgcgatctccggttagttgaagaggacgggggtggcgcggcccttgatggcacggcggtggcgaacgtgcagagccagatgcgcgagttcttgcgcagctctcagatctccgacacccacttgccccaactccacatgctgctgctagatccaacgggcggcgagcttcgtcggtggagagcttttgcgccgactgctcgagcatccagcaaaatgtaaggtggaggtggtgcggtggttgggtcacggatcggccagggtggcgagcctgggggaattggcaggcaggcaaaggagggaaagacgggccaaacattaaaaaaaaataaaggttgccagtggaagaaaacaaactgtagaaggcaaatccggtgacttggagctgctaaggggctgtttggtttccagggacttattccaagtccatgtcacatcggatatttggacactaatttggagtattaaacatacattaattacaaaacctattccataagcttggactaattcgcgagacgaatcttttgagtctaattatgtcatgattttgacaatgtgatgctacagtaaacttttgataattatggattaattaggcttaaaaaaatcgtctcgcggattagctctcatttatgaaattagtttttttattagtctatgtttaatactctaaattagcgttcaaacatctgatgtgacttgggctaaaaagttttagccccatctaaacaccccctaagcaaatccggcgacttttgctatctcgctgttctgattgccagcaaatttgatgatttggagctgctaagcaaatccggcgacttctgctatctcgctgttctggttgccagcaaatttgatgattgccactggttgcatgttgtttgctattgacttgatttgttgttggctgtgggatgtgaatccgatcgtcaaagcagtcggtttcggtgacagtcatagcagtcggtttcggtgaataatagcagtagtttggaaaagttttggctataggaatctttgcatgtcaatccgtgtgctacactgtttcagtgaaaagtagtagtatttttatgtcgtgctatgagtagtactccctccctccgtataagcatattttcaaatctgaaaattctatgaaaattctatttttgataagcatatttcaatttaacaatctatcatcttaatgactttctcggatttaatgtatgactctccattcttctatacaagattggctacttgagcatcgcg

SEQ ID NO: 24744 - DNA, 1120 bp, Oryza sativa
  ref <308>: DATABASE ACCESSION NUMBER: AK100186
  ref <309>: DATABASE ENTRY DATE: 2002-08-28
gagcgatttcatccaagcaccacgccgccgccgccgtcgaagccgatctcctgcgcgcggagcggatcgcctctgtcagtcaccagctatacagtatgagttcactggagagtgcaagagcagatcttgctctgcttattttatacctaaacaaggctgaagcaagagataagatctgtagagctatacaatatggctcgaaatttgtgagtaatggacaaccagggcctgcacagaatgttgacaagtcgactagtctagctcgtaaagttttccgactttttaagtttgttaatgatctgcatgctttgattagtcctcctgccaaaggaactccactacccctgatcttacttggaaagtcgaagaatgcactgctatcaactttcctctttctggaccaaattgtatgggctggaaggacaggaatatacaagaacaaggagcgagcagaattcctcagcaagatagcattttattgcttcctgggttctaacacatgtactagtattattgaggtagccgagcttcagcggctatccaagtcgatgaagaaactagagaaggagcttaaacaccaggagctgttaaagaacgagcaataccagatgaaactgcagaagtgcaacgagaggcgtctcgctctcatcaaatcgagcctcgacatagttgttgctatagggctgcttcaactggctcccaagaaagtgactccgcgtgtgacaggggcgtttggatttgctagctcactcattgcttgctatcagttgctcccagccccagccaaatccaagtgatccacctgaaggggtgtcagtgggcagttccaatgttgcaaccagtaagaaataaaagtggagctgcttgattgactcatgtggacttgaaaatcctttgtgggttatggttaatatgatgatctagtggattgctgcagctgtaattttaaggtgcagtacttgtgacaaaaaataagaaacttagcatgggaaaaatgttgcattgtttgccaatggtttagtgttgggactagctaataagaacattgccattatatcaacatctgtttgtgtgccttgttcgagactgatgagtggttaaatatgctgtgcttgcttcc

SEQ ID NO: 24745 - DNA, 1060 bp, Oryza sativa
  misc_feature (571)..(571): "n"=any one base of a, t, c, or g
  ref <308>: DATABASE ACCESSION NUMBER: AK100187
  ref <309>: DATABASE ENTRY DATE: 2002-08-28
gagctgcggccgctcactccaccattccaccaactagctagctagctagccacgccatccctttctcctcctccttcttcttcttcttcttcttcttcttggtccggagagagtagagaggagggcgcgcagcgagatggcttgcccggcgcagtcgatgctgtcggcgagcaccaccagctgctgcgcgttcctgaggagcagcgccgccgccaagccacaggccgcggcgtcggcggcggcgagcctcgcgcgaggggggaggctgttcctgctgtcctgcaacgcctcgtcgtcgtcgtcgtcgccgtcgccttcttcacctccgccgccggcgccggcggcggaggactgcaacgaggaggagtgcgcgccggagaaggaggtggggagcctgagcgcggagtggctggcggaggagcggaccaaggtggtcggcaccttccctcccaagaagaagggatggaccggctacgtcgagaaggacaccgccggccaaaccaacatctactccgtcgagccgacggtgtacgtggcggagagcgccatcagctcgggggcggcgggcgcngcggcggacgggtcggagaacacggcggcgatcgccggcggcctcgccctcgtcttcgtcgccggcgtgtcgtccatcctcatccaggtcggcaagaaccagccgccgccgcaggccaccgtctactccggcccgccgctcagctactacgtcgccaagttccagccgtccctcgccgcggtcgcgctccagcagcagcccgccgtcgacgcgcccgccacagaggacgcctcgtcgccggcgccggcgtcccccgccgccgccgccgcagaggaccagctctcctcctgaactgctgctgctgcagatagagaagaagaagagaagatcagaaatgtctgtgacttcagacatgatgcttgtatacgtatcatcacagttcacaaagattcaaatgtactgatgaaggatatgcacggatacactacatggtagattgatgaaaccatttttaagtttcgtatatatacaagcatagatttgatcacg

SEQ ID NO: 24746 - DNA, 3897 bp, Oryza sativa
  ref <308>: DATABASE ACCESSION NUMBER: AK100188
  ref <309>: DATABASE ENTRY DATE: 2002-08-28
gagtggagcgcgagctgaagaggaggaggggagtggaggaggcggcgctgcagatctggaggcggagcggcgaatggtggtgtcgccggcggccgccgcgatctaggcttgccgcgcgcgcgcggatctgcgagctgcgtagccgtttctcgctgtgagtggaggaggaggaggaaggggaggaggatggcggcgaacgcggggatggtggcgggatcccgcaaccggaacgagttcgtcatgatccgccccgacggcgacgcgccaccgccggctaagccagggaagagtgtgaatggtcaggtctgccagatttgtggcgacactgttggcgtctcggccaccggcgacgtctttgttgcctgcaatgagtgcgccttcccggtctgccgcccttgctacgagtacgagcgcaaggaagggaaccagtgctgcccccagtgcaagactagatacaagaggcacaaaggtagccctagagttcagggcgatgaggaggaggaagatgttgatgacctggacaatgaattcaattataagcatggcaatggcaaaggtccagagtggcagatacagagacagggggaagatgttgacctgtcttcatcttctcgccacgaacaacatcggattccccgtctgacaagtgggcaacagatctcaggagagatccctgatgcttcccccgatcgccattctatccgcagcggaacatcaagctatgttgatccaagtgttccagttcctgtgaggattgtggacccctccaaggacttgaattcctatgggattaacagtgttgactggcaagaaagagttgccagctggaggaacaagcaggacaaaaatatgatgcaggtagctaataaatatccagaggcaagagggggagacatggaagggactggttcaaatggtgaagatatgcaaatggttgatgatgcacgtctacctctgagccgcatagtgcctatcccttcaaaccagctcaacctttaccggattgttatcattctccgtcttatcatcctgatgttcttcttccaatatcgtgtcactcatccagtgcgggatgcttatggattgtggctagtatctgttatctgtgaaatttggtttgccttatcctggctcctagatcaattcccaaagtggtacccgataaaccgtgaaacataccttgacaggcttgcattgagatatgatagggagggagagccatcacagcttgctcccattgatgtctttgtcagtacggtggatccactaaaggaacctcctctgatcacagcaaacactgttttgtccattctggctgtggattaccctgttgacaaagtgtcatgctaggtttctgacgatggttcagctatgttaacttttgaggctctgtcagaaactgcagaatttgctaggaagtgggttccgttttgcaagaagcacaatattgaaccacgagctccagagttttactttgctcaaaaaatagattacctgaaggacaaaatccaaccttcctttgttaaagaaaggcgggcaatgaagagagagtatgaagaattcaaggtacggatcaatgctcttgttgcgaaggcacaaaaagtacctgaagaggggtggaccatggctgatggcactgcttggcctgggaataacccaagggatcaccctggcatgattcaggtgttcttggggcacagtggtgggcttgacactgatggtaacgagttgccacggcttgtctacgtctctcgtgaaaagaggccaggattccagcatcacaagaaggctggtgcaatgaatgcattgattcgtgtatctgctgtgctgacaaatggtgcctatcttctcaatgtggattgtgatcactacttcaacagtagcaaagctcttagagaagcaatgtgcttcatgatggatcccgcactaggaaggaaaacttgttatgttcagttcccacaaagatttgatggcattgacttgcacgatcgatacgctaatcgcaacatagtcttctttgatattaacatgaaaggtttagatggcattcagggtccagtttatgtgggaacaggttgctgcttcaataggcaggccttgtatggctatgatcctgtactaactgaggctgatttggaacctaacattgttgttaagagctgctgtggtggcagaaagaaaaagagcaagagctacatggatagcaaaaaccgtatgatgaagagaacagagtcttcagctcctatctttaacatggaagatatagaagagggcattgaaggttatgaagatgaaaggtcagtgctgatgtcccagaagagattagagaaacgttttggtcaatcgccaatttttattgcgtccaccttcatgactcaaggaggcataccaccctcaacgaacccagcatctctactgaaggaagccatccatgttatcagttgtggatatgaggacaaaactgaatggggaaaagagattggctggatctatggttcagttactgaggatattctgactggatttaaaatgcacgcaagaggttggatatcaatctattgcatgccaccacggccatgcttcaagggttctgcgccaatcaatctgtctgatcgtcttaaccaagtgctacgttgggctcttgggtctgttgagattctgcttagcagacattgtcctatctggtatggttacaatgggcgtttgaaacttctggagaggctggcttacattaacaccattgtttatccaattacatccattccacttatcgcctattgtgtgcttcctgctatctgtctcctcaccaacaaatttatcattcctgagattagcaattatgctgggatgttctttattctgcttttcgcctccattttcgcaactggtattctggagctccgatggagtggtgttggtatcgaggactggtggagaaatgaacagttctgggtcattggtggcacatctgcccatctcttcgctgtgttccagggtcttctgaaagtgttagcaggaattgataccaacttcactgttacctcaaaggcgtccgatgaggatggtgactttgctgagctatacgtgttcaagtggaccagtctcctcattcccccgaccaccgtgcttgtcatcaacctggtgggcatggtggcgggtatatcatatgccattaacagcggttaccaatcatggggtcctctctttggaaagctcttcttctccatctgggtgatcctccatctctaccccttcctcaagggtctcatgggcaggcagaaccgcactccgaccatcgtcatcgtctggtcgatcctcctcgcgtcgatcttctcccttctgtgggtcaagatcgatcctttcatttcgcctactcagaaagccgtcgccttggggcaatgcggtgtgaactgctgatcggcaccgttacgaagatgaacttcaatcaatcaaggtctacccccccttgtgtaaatacctgaggggggctagaatgggatcttctttttgtgtagatgaagaccttttttatctaagttatgccactgtttattagctacttcagtgctggcgctagctgctgatacgatggaactgtgaagccttattttgcctgcgaagaagccagcccagcagcgtaaattgtgaatttttttcttcttttgtgacacccgttattttagtcatttgtttgaggggtcgttgttacacatactatgggatgttatttatacggatatattccaattacattcttttgcggtgaacattttaattatattcgtagcatataatgtaaggcaactcagtatttcagctgttcacttgacaagttgcaacacatatacatcttgagttgtttgttcatgacatttgcattctctgtttctggagctt

SEQ ID NO: 24747 - DNA, 1621 bp, Oryza sativa
  ref <308>: DATABASE ACCESSION NUMBER: AK100189
  ref <309>: DATABASE ENTRY DATE: 2002-08-28
gtgtagtagcagtaatgacggcagcaactagcaagaacgtcgtcgtgctgttccccttccctggccatgggcacctcgccgccttcttgtccttcgccggcgtcctccaccgcgccctcccagacgtcgccatcaccctcgtctcgacgccacgcaacgtggccagcctgcggcgagccacgtcggcaggacatgactcctttctattacacgagctgccgttcgtgccggccgaccatggcctcccggcgggctgggagtcctccgacggcgtcccccacaatcgcttcccggacttcctcgaggccttggaggtgctccagccggccttcgacgacttcgtcgccggcgccaccgccgccggcgacgtcgctgtctgcgtcgtctccgacccgttcttggcgtggacggtgaccgtcgcgcggcgccgcgggtgcgcccacgccttcttcgtgtcgtgcggcgcgttcggcagcgccgtcgtgcactcgctctggagccacctccccattcgccccgacgaggccggccggatcctcctaccggagtaccccgacgtggtcatccacaggtcgcaggtgtccagcaacgtgctccacccgcccacggccgtgaagcaccgcgtcgaggcgttcttcgggcggcagatacagctggggtacaagacggacgcgctgctcatcaacaccgtggaggagttcgagcccaccgggctcgccatgctccggcgaaccttcaggctcccggtaattccaatcggcccactcgtgcgcgcctccaccaaaacaacctcgccggagacggacgccaccgccggcgccatcaccagttttctcgactcccaccctccgtcgtcggtgctctacgtatcgttcgggtcacagttctccatccaagcagagcacatggcggagctggccgccgcactggaggccaccggccggccgttcgtctgggccgtgaagccgccggacgggcacaacataaacggcgagatccagccgaagtggcttcccgacggattcgaggagagggtgacggcgaccaagaaaggcctcctcctccatggatgggcgccgcaggtggggatcctggcgcatcactccacaggagcgttcctgagccactgcgggtggaactcggtgctggagagcatgacgcacggcgtgccgatcatcgggtggccgctcgccggcgatcagtactacaacgccaagatgctcgacgaggagtggggggtgtgcctccgcgtggagggggcacggggggacatggacatgagtgccattattgtggacaaagcgacgctggttgccgtggtggagacggtgatgtctccaacagcgaaggcggccgagatgcggcagcgggcgagagcgatcaaggagatcatggaagctgcacgggagggtggacatggctcgtcggcaaatcaggcattggaggagttcttcaaaacaatgaagctgaacggctgaagttggaacaaaatccaaggttacttatttactatgctagccgctgtgttattctgaatcatttgttattacttaccacatccacaatgttgcatgtaaaatgatcttaaggaataaagtaatatatttgttttacctctacc

SEQ ID NO: 24748 - DNA, 1719 bp, Oryza sativa
  ref <308>: DATABASE ACCESSION NUMBER: AK100190
  ref <309>: DATABASE ENTRY DATE: 2002-08-28
ggtccgtcgcgttgctccggtgctcgatcggtctccccgcccggccgccagacgacgcgccacatatgaagccccgctcctcgcgcgacggccataatgccgccgccgccgccgcgctcctcctcgcggcgctggtcctctccggcgacgtcctgccggcggtcgtggccggtggcgccccctcgttcaactacaaggacgcgctcaccaagtccatcatgttcctcgaggcgcagcgctccggcaagctgccgcccaccaaccgcatcaagtggcgcggcgactccggcatggaagacggcaagctcgccaacgtggacctgactggcgggtactacgacgccggcgacaacgtgaagtacgggctgccgctggcgttcacggtgacgacgctggcgtggacggcgatggcgttcgagaaggagctgaaggcggcgagggagctggagaacgtgcacgcggccatcaggtggggcaccgactacttcctcaaggcggcgaccaagaaggaccacctgtgggtgcaggtcggcgaccccaacgccgaccaccagtgctgggtccgcccggagaacatgcccacgccccgcaccctctaccagatcaacgacaagacccccggctccgagattgccgccgagaccgccgccgccatgaccgcctcctccatggtcttccgcaaggataagccctactcccgccgcctcctcaacaaggccaagctgctgttccagttcgccaagacgcaccagggaacctacgacggcgagtgccccttctactgctcctactccggctacaacgatgagttgctgtgggcggcgacgtggctgtacctggcgacgaagaggcaggtgtacgcggacttcatcgggcacgaggcgatctcgtcgagcgtggccgagttcagctgggacctcaagttcccgggcgcgcaggtgctcctcgcggagctcaacatgacatccagcggcggcctccagagcttcaagtcccaggccgacaacttcgtgtgcgccgtgctcccggacaccccgttccaccaggtgtccatcaccccgggcggcatgatccacctccgcgacggcgccaactcccagtacgtcaccagcacggccttcctcttcgtcgcctacagcgacatcctccgccggatcaaccagccggtgatgtgcggcgcccaggccgtgcagcccgcccgcctcctccagttcgccaagcagcagatcgactacctcctcggcgccaacccgcgcggccgctcctacgtcgtcggcttcggcgtcaacccgcccacgcagccgcaccaccgcggcgcctccaccccggtgctccccccgggctaccaggtcaactgcgggatgagcttcagcgagtggttcacccccgaccggcccaaccccaacgagctcaccggcgcgatcatgggcggccccgacggcggcgacaacttctccgacaagcgtggcaactcgtcctgcaccgagccttgcacgtacatcaactccctctccattggccccctcgccgccctcgccatccgtggcccaaacctcatcgccacccagtaattaatcaccattattatacactgattaattactgctaaattaactaaagatattgagtatattactatattactcctcctcccctgtattaaatctcgacgatatatacaaattaatttgttgattaatcggaatcgaaattagagct

SEQ ID NO: 24749 - DNA, 1659 bp, Oryza sativa
  ref <308>: DATABASE ACCESSION NUMBER: AK100191
  ref <309>: DATABASE ENTRY DATE: 2002-08-28
gagccggtggtgccatcgtccgcacgtacggcgtccgtcacccggctgggaggtctcacgaaattacgcacttccctgagaccttccccgcggtgacgcgtgcgtcgtcagccggcgagccggaccaccacaaataaaggcatacattgatacatatggatatatatacgacatcacatcacagcacaataatggcagcctcctccgtcacggggagccgccgcctctgcattctcttctacctcctcactgtcgtcgccaccgtggtcaccgcggcgtcggcgcacacggcgcacaacgccaccgccgacgaggagtactgggagaagcgcgccgaggaggcccgctcgttcaaccgcgccgcctacgtgagcgaccccgtcgccaccctgaaccgcttcaacgccgacgtgctccgcgccaccacgcgccgctcgctggccaggtacaccggcccgtgcatggcgaccaaccccatcgaccgctgctggcgctgccgcgacgactgggccaccgaccggaagcggctggcgcggtgcgtccgtgggttcggccacaggaccgtcggcggcgccgctggcaagatctacgtggtgaccgacgccagcgacgacgagatggtcatcccgaggaaagggacgctccggtacggcgtgatccaggaccggccgatgtggatcgtgttcgcgcgcgacatgatcatccagctccggcaggagctgatcgtgaaccacaacaagaccatcgacggccgtggcgcgcaggtgcacatcaccggcgcccagatcacgctccagggcgtccagcatgtgatcatccacaacgtccacatccaccactcggtgccgcacggcggcggcatgatccgcgactccaagcgccactacggcctccgcacgcgcagcgacggcgacggcatctccatcatgtcctcctccaacatctggatcgaccacgtctccatgtccaactgctccgacggcctcatcgacgccgtcagcggctccaccgccatcaccatctccaacggccacttcaccaagcacgaccacgtcatgctcttcggcgccggcaacagcgacgcccaggacgaggtgatgcagatcaccgtggcgttcaaccacttcggcaagggccttgtgccgcgctgcaggttcggattcttccacgtcgtcaacaacgactacacgcactggctcatgtacgccatcggtggcaacatgaacccgacgatcatcagccaggggaacaggttcatcgcgcccgacgacttgaacgccaaggaggtgaccaagagggagtacacgccgtacgacgagtacaaggagtgggtgtggaagtcgcagggcgacgtgatgatgaacggcgccttccttaacgagtccggcggccagaacgagcgcagctacgaccagctcgacttcatccctgccaagcacggcaagtacgtcggccagctcaccaagttcgccggcacgctcaactgccacgtcggcatgccatgctaattaactagacatatcagcaacgatatggaagaggacgagagaaagctaattaaccatgccttaatttgtatatatatgaaaatctgacaaatttgtacatgtgtaaaactttataattctcaaaagagaaaaaaaaacgtacattatatac

SEQ ID NO: 24750 - DNA, 2368 bp, Oryza sativa
  ref <308>: DATABASE ACCESSION NUMBER: AK100192
  ref <309>: DATABASE ENTRY DATE: 2002-08-28
gaagcttcagctcgtgatcccatcagatcagcaagcagtcgcgaaatggtgccgatggctaaggctctcgcggtcgtgtccgctttctgccttcttgtggcgccggccgccgcggcgcgtagcctcgtcgacgtcatcggcggggcgttcggtggccggaaggactactacacgcccggtcctactggccagcaccactcttctagtcccagtcattcgcacaaggctccgccctgcgcgccgacgccgccacagggaggtggtggaggctacaacccaccctcgccgtccattggaacctctccgacaacgccgggaggaggtggaggctacacgccgacgccgagcgacacgccaccctctccgtccagtgacacctcgccgagcactccgggtggcggctgctcgtcctcacccacgccgtgcgacgcaccgccctcaccgtccagtgacacgtccccgacaacgccggggggaggtggaggctactcgccgacaccgagtgacactccgccctcgccgtccagtgacacctctccgacaacgccgggtggaggtggaggctacacgccgacgccgagcgacgcgccgccctcgccttctagtgacacctctccgacaacgccaggtggaggtggaggctacacgccgacgccgagcgacgcgccgccttcgccgtccagtgacacctctccgacaacgccgggtggaggtggaggctacacgccgacgccgagcgacacgccgccctcgccgtccagtggcagctccccgacaacgccgggtggaggtggaggctacacgccgacaccgagcgacacgccgccctcgccgtccagtggcagctctcgcactacaccgggtggatgctccactcccacgccgtgcggcacgccgcccgcgccgtcgagtggaacctctccgaccacaccgggtggaagctactacccgcccacgccgtccattggcgacgtgccaccctcgccgtccagcgacacctctccgaccacaccgggcggaggctccccgtccacgccatgcgacacgccgccctcgccgtccagtggcacgtccccgaccacgccaggtggaggctactacccgcccacgccatccgtcggcgacgtgcctccctcgccggccagtggcacctccccatccacgccaggtagtggaggctactctccgtccacgccatgcagtgcgccgccgtcgccttcaagtggcacctccccaaccacgccgggtggaggctattctccttccacgccgtgcaatgcgccgccctccccttcaagtgacacctccccgacaacacctggtggcggcaactacccgcccgcgcccaccattggcaacgtcccgccatcgccatccagcggcacctccccgagcacaccgggtggtggctgctcatcctcacccacgccatgcgacgcgccgccctcgccatccagtgacacttccccgacaacaccgggtggagggtactacccgcccacgccgtccatcggcacctcgccatccacaccgggcaccggcggaggctactaccctccctccccttccaccggcggctacacgccgactccggacgttccgatcagcaccccgtcgagcccctactccccgctggtgcccacgccgccgtcgagcaccaccccgatgccttcgaccccaacacggcacccttcccgtgctcatactggctgtcgcacccgggcgtgatatggggcctgttcgggttctggtgcccgatggcgcggctgttcgggccgaccgccgcggcgccgttcggacacgacctgaccgtgccggaggcgctggcgaacacgcgcgccgacggcgtgggcgagctctaccgcgagggcacggcgtcgcttctcaactccatggtgaacagcaggttccccttcaccacgcagcaggtgaaggacgcgttcagcgccgcgctcagctcaggaggcgaccacgccgccgcggctcaggcgcagctcttcaagaaggccaacgaaggccacgtcatgcgttaggctaggcggcctctcgatcctctgtacttgaacgtactcgccacgtgaggcggattcgatgcgatgtacacgcgagcatgcgtgcaggttcatgtcggggtggggtttggagtaatccggcgtgtttgcaactttgcattatgtttgatctagagcggatggcctctggaataactataggagagttaagtacgtatgttttgttatccttttagagtccatggccgcacggaatgactacaggagtgttctctgtggccttttaattcagtatgtacttgtggcgttaagcatcagacgtgttctagtatttctagttctatgaactactggct

SEQ ID NO: 24751 - DNA, 1074 bp, Oryza sativa
  ref <308>: DATABASE ACCESSION NUMBER: AK100193
  ref <309>: DATABASE ENTRY DATE: 2002-08-28
gtttcttagtgaccaccccccatatcacatcctctccttcctcttcctctgctcactcagctctcccccgcgcgcgccaccgtcgtcgccatgtcgggcaacatcgccttcggccgcttcgatgactccttcagcgcggcctccctcaaggcctacgtcgccgagttcatctccaccctcgtcttcgtcttcgccggcgtcggctccgccatcgcctacaccaagttgaccggcggcgcgccgcttgacccggccagatcaccatcctcaccggcgtcttctactggatcgcccagctcctcggcgccatcgtcggcgccgtcctcgtccagttctgcaccggcgtggcgacaccgacgcacgggctgtccggcgtgggcgcgttcgagggcgtggtgatggagatcatcgtcaccttcgggctggtgtacaccgtgtacgccaccgccgccgaccccaagaaggggtcgctcggcaccatcgcgcccatcgccatcggcttcatcgtcggcgccaacatcctcgtcgccggccccttctccggcggctccatgaacccggcgcgctccttcggccccgccgtcgccagcggcgactacaccaacatctggatctactgggtcggccccctcgtcggcggcggcctcgccggcctcgtctaccgttacgtctacatgtgcggcgaccacgcccccgttgccagcagcgagttctaattacccatttcgccatcggcaacacgcataaaaatggtggtcactccatcgtcagaatcttgtgaggatgtgttgtgaaggactgatttggttcagatggggaagaaggcttttgttgcgaggatgtgacacttgggtgatgatcgatccatgtttagtttcttcttgattaatttgtaatgtgatcagtgtggagcaagttggatgagatgcatgtttaagatcgaacacttctgttgagtttcattgtgagatttcatttgattcgggccatgtcatttcagtttgtttgtagcctccaaaataagcttgtgtcttctcctcgcaaataggaaatcagaaataaaattgttccggg

SEQ ID NO: 24752 - DNA, 1483 bp, Oryza sativa
  ref <308>: DATABASE ACCESSION NUMBER: AK100194
  ref <309>: DATABASE ENTRY DATE: 2002-08-28
gtggtcttgaatttccatatggaaaaagtatgaaataccccctgaactattgtgttagcccggtatataccccccaccaaacttgaaaactaggtattttacaccctaaactatgtaaaccagacatattacccccccctaactcaatccggagcagttttgtcctatgtggcttaagcgtggcagtccagtcaaccattttttattaaaaaagtccatgggctccacatgtcagcatctccccccttctgtctttctttttccgcgaacaaggcaacgatgggcgctaggcggcgcgaatgcactgcagcctccacctcgtgccatggcagagtagtgtcaccgcctgcacacacacctcggacggcaccgccgacgcctttccctactctgttcccagagagaaagaagggagaggaagtattcactgctccgtcccagagagagaagggagaggaagtagaagaaaagagaggaagggacaccggtgggcggcgggcagtgcttggcgtcatcgatctagtaggccacgtcgctcctaggtcatcaccacggtggccgtcattgtcttccacctccgtgccaggccgacgctagcagtggccttcatcgtattccaccttcggcgcggcggcctgcacacacaccccggacgccaccgcctcctcctcgacgacggctatgtcgtcctcccccatccgtccctgtctctgtcatgggggcggtggtcatggtaacgacgacctaggaggaccttgctactcccactcttatgctcccctggctcacccaccacacgtgccgctttcttcaccgggacgatgtacagatctgaagaaaaaaaaagagaaagaagagagagaaggggaagaaagtggaagaaaaggacactggcgggcagcgtccctggttgtcgatttactcctctgttgcctcgccctcgacggtgctcatgcagcgggggcggccggcggcagaggcgaacagaggcgaagcgagctcaggtgggcggcggtggaggtggacgcggagcaagctatggcggccgccggcggaggtaggccaagctgggctgcgcgtaggtggtgtggcagcgcacaacggtggtgggctgcgtgctcgccacctgcgccgctgtgagggaggtgaggcagggaaaagagagagatagaggggattggggaaagagagagaacagagagaagtagagagggttagaaatttatagggggggtaatctttccggtctcaatagtcaagagtgaaaaatgtctggttttgtggttcatgggtgtaattcgatcgaccgcgatagttcagggggtaattcgtactttttcctttccaaattcatgtgcctaacttttaaatattggttgtgactagaaaaaatgcccgtgcgttgcaacgggtgaaggcttttttaatctttttattgttatatgttttatttaagatgaaattcactgttaaatttgcttgg

SEQ ID NO: 24753 - DNA, 1514 bp, Oryza sativa; identical to SEQ ID NO: 14337
  ref <308>: DATABASE ACCESSION NUMBER: AK100195
  ref <309>: DATABASE ENTRY DATE: 2002-08-28

SEQ ID NO: 24754 - DNA, 867 bp, Oryza sativa
  ref <308>: DATABASE ACCESSION NUMBER: AK100196
  ref <309>: DATABASE ENTRY DATE: 2002-08-28
gatgtgtcccttatgaccttatccgtatgatgcggttcttggttgggcaggaatacggccatggttcttggttccaggagctcctccatggaatacggccatggttcttggttccaggagctcctccatggaatacggccacccagcttcctcctccatgacgctgacgtggcatccgaaggtgaggcactaggcagtcatcgttgatgagctccgactccgagctctccatcttctccctctcgatgaacctctcgtccccccatgacttgttcaccgagaagtcgttgggggtggtgatggtgtaggacggcttgggcttcggctgccggcggcggttgaggcagaaggtgtggcctgcaccaccaccggctcggcggtggtggcggactcgtcgccgtcgtcgagcgagaggtggaaggagatgaagtcggtgttgctgggagaccgggcctctcggcgcgtagcagatgcgccaggcgcggcaggccgccgacgcggaacgggcgggaggagatgggctggcagctcccattaaatgggcgtgggccggtgggacggaggccggtcgccggcggcctcgccctcccctcccccagatccggccggaggggaagcggcgggatgggtggccggccggcggcgggatgggaggccgcttggtgagtcgattttttttgtttttttgatttttttttatttgtggtttagatgttttgctctgtgaatgaatctatggatcgatgttaatgaatctgtgatgttataaatgagtatgtgactcgatgttgtcaatgaacccgcgaatcaatattgtgaacatatttgtgatgttgtgaatgaatatgtgaatggatattgtgaatg

SEQ ID NO: 24755 - DNA, 2606 bp, Oryza sativa
  ref <308>: DATABASE ACCESSION NUMBER: AK100197
  ref <309>: DATABASE ENTRY DATE: 2002-08-28
gacaatgccggccgtggccgcgtcccagcctcagttccgccgccgtcgcgtgcccgcggagcgaggagatggcgcggctggagcgcgggtcgctggtggtcggcgggcgggagctcctggagcgggcccctcccagcgtggccctccgccgccccgcggtcgtcgcctccccggggggcgccgcgttccttggcgccacggcgcccgccccgtccagccgccacgtgttctccctcggcaccctcgccagtgggtggaagtggctgtccctgttcaggttcaagatctggtggatgatcccgacggtgggcgaggacgccgccggcgtgccagcggagacgcagatgctgctcttggagtcgaggagcgaggcgggtgccgcgctgtacgcgctcatgctgccggttcttgacggcggcttccgagccagcctccaggggagtcctgagaatgagctccaattttgcttcgagagcggtgatcctgaggttcagacactggaagcagttgatgctgtattcatcaactcaggggacaaccctttcaagcttatgaaggaatcaatcaagatgttatctaagatcaaaggaactttcagtcatatagaggacaaagagatccctgcaaacctggactggtttgggtggtgcacttgggatgctttttataaatctgtcaacccagtgggaattgaagagggccttaaaagtttgtgtgaaggaggtgcaccaccaaggtttctaattatagacgatggctggcaagaaaccgttaacggattcaaggaagtggatgaggcctttattgaacagactgtgtttgcggagagacttatcgatctgacagagaacgataagtttaggggagaaacctgcaagaatcttggagaccatgtcaagaaaatcaaagagcactatggagtcaagtatgtctacatatggcatgctttacatgggtattggggtggtgtcctcacaacacctgatgcgatgaagaagtacaatccacagctagtttacccagtccagtctcccggtaatgttgcaaatttgagggatatagctatggacagcttggagaaatttggagtgggtatcattgatcctgccatgatatatgacttctacaatgatcagcacagctacctttctagtgtgggtgtggatggtgtgaaggtagatgtgcaaaatgtgatggagactcttgggaagggttttggtggtcgtgttgcattaactcagaagtatcaacaagcacttgaggaatctatcgctcggaacttcaaaggaaacaacctaatttgctgcatgagtcacaatacagacagcatttttagttcattgaagagcgcagttgctagagcatcagaagatttcatgcctcgggagccaacgatgcaaaccctgcacattgctactgtggcattcaatagccttttattgggagaaattttcatacctgactgggatatgtttcatagtaagcatgaatcagcagaatttcatggagctgcgagggctctgagtggtggtggtgtttatgtcagcgacaaaccagggatgcatgatttcagtgttcttaaaaaacttgttctgccagatggcttgattctaagaacaaagcatgctggtcgtccaactcgcgattgcctgttcaatgaccctgtcatggatggcaaaagtctgttgaaaatatggaacttgaacaagttttctggagtcatcggagtgtttaactgtcagggtgctggaaattggacttatccagtgaaagaaaatgctcatgttcccactaccgtctgcatcactggtgatctctccccatcagatgtggagttacttgaggagatagctggggataattggaacggagagactgcagtatttgcttttaattcatgttctctctcaaggcttcagaagcatcagactatggaggtttccttgtctactatgacatgtaagatatataccatagcgctgataaaggtttttggtggctttgttcagtttgctcctcttggactggttaacatgtacaactcaggtggtgcgctcgaaaacgtcacgagcacaggtgattgttcagagatcacaattcagatccaatgccgagggccaggtcggtttggggcgtattcagcaaccaggccggaaatttgcagtgttgatgagcatgaagtagagttcaaacacacagatgatggcttcctggcctttgatctctctcacggttcgtcccaggacaacctcaggaacattgagattctgtacagagcttcctgaacctccattttcagtgtgatttttatgctctttcgagcagattatgctgctctcaggctcttagctgtggataattattgcttcccgcaagcgtgtgttagctctgaattactgcatctcgcgtgtgttgtttgtgccaattaatttgggcttgttctaagtttcgaatctgccggagacagttataatacgaatatgtattttggcagatcaattccaattttgtgccaatattacctaaaacaaaaatattatccctctcgcggtaaacctgtacgtaactttataagagacgggaaggaattgcatggatgaatcatg

SEQ ID NO: 24756 - DNA, 1464 bp, Oryza sativa
  ref <308>: DATABASE ACCESSION NUMBER: AK100198
  ref <309>: DATABASE ENTRY DATE: 2002-08-28
gcagagagagaggctatgacgcgctgcgccgtcgtcgccgccgtcgcggccgtgctcctcgtcgccggcgcggcggcggcggggggtggggaggaggaggaggccccgtcgacctgcgcgcggaggggcccgggtttcgtcgacgcgctcgcgtcgcgctgcccctgcattcggatcgagccatccccgcctgtagaggtgagaggagaggctattgctaaagagttgaaccttcgccacagaggtgttacgtactccgttctcttctatgctgcttggtgtccattttcaagcaagttccggccaatatttgaagctctcagcactatgttccctcagagatatcactttactgttgaagaatcatctgcaatgcctagtttgttttcaagatatggtgtccgtggattcccggccattcttcttgtaaatgagactacaatggtacgatactggggcccaaaagatctcagctctctggtggacttctataaagaaactacaggcttcgatccaattgcatattttgatgtcgatcatcaagacagtactggagatttcagaccagtcacaccaggggaccgatctctgcgtaaaattgcaaaagatgagccatttgtgttgcttgcggtgctttttatcatcctgaaggttgcagcgcatttcgtccccatcgtcgtctcccatctgaaaacgttcttggtcgtgcgtgttcagaacttgaacttagggatccgtaggggatcaagccaactgttggaacgagcgctgaatgtacttgatgtgaagaggctttgtagcaagcttagactgagcaataagacaagggaccttaggaaaggcgcaagcaatgctcgagcttgggcttcctcgtttacttctgtttcactgggtgaatcatcatcctcacggcaagcttaagtgcttaaccttttcggggctgtttgtttagtgtagctgcacatgtgatccaaagttatttaatcttgcttccgcatccagctatatatgatagttgctttgttgcgccattcaggcatgtgggaacctcatggtcatgtaaattctgagggcctcaccttgttgtatactaggaataccttttgcgttgcggatgcaatgcctaatcttgttgtcaagataactactgtaaatttgagatgtgtggtgccagtttgagtagcctttagatgaatttttgttgctcctgctgctgtatgaatcattacagtgttaacctttgaagaactcttaacttggtcgttgtctgcaccagcctgaagctggggccgccgactcatgccttatttactgtgattgttatatgtacatcaccgtttataagaagctaacaaaatgtttctggaagatgctccttttgtatgtgaatctattgtttactggagatttgtgagtgcgtgccctgttcataaatctgcttctataaaattgtgggttctatct

SEQ ID NO: 24757 - DNA, 1911 bp, Oryza sativa
  ref <308>: DATABASE ACCESSION NUMBER: AK100199
  ref <309>: DATABASE ENTRY DATE: 2002-08-28
ggttgggccccgtctgtctctgccccacccacgcatactaggaaggcaggggagacgaggagccagagccaagtcaagccgcttcctctcctctcgtctcggcgcctcactcgatctccttcctccactgtcgctcagatcgacgcgggccatggccaagcctagggcctccgccgccgcggcgaaggcgccagcctccacgccgcccaagacggtgcactcggcgctcgtcacctacgcctccatgctctccctcctctccctctgcccgcccttcgtcatcctcctgtggtacacgatggtgcacgcggacggatccgtggtgcgggcgtacgagcacctccgcgagcacggggtgctggaggggctcaaggccatctggcccatgccaaccatggccgcctggaagatcatcttcggcttcggcctcttcgaggccgcgctgcagcttctcctccccgggaagcgcttcgagggccccgtctccccctcgggcaacgtgcccgtctacaaggcaaatggcttacaagcatatgcagtgaccttgataacatacctgagcctgtggtggtttggaatttttaaccctgcaatagtatacgatcacttgggggaaatatactctgctcttgtatttggaagctttgtgttctgtatttttctgtacataaagggtcatcttgctccatcttcatctgattctggatcctcagggaatgtgataattgatttctactggggaatggaactatatcctcgcattggtaagcactttgatatcaaagtgttcacaaactgccgttttgggatgatgtcctgggctgttcttgctgtaacctactgcataaagcagtatgaaatgaatggccgagttgcagattcaatgcttgtgaatactgcattgatgttgatctatgtcaccaagttcttctggtgggaatctggatactggtgcactatggacattgctcatgatagagctggtttctacatttgctggggatgcttggtatgggttccatcaatatacacctctcctggaatgtaccttgtcaaccaccctgtgaatttgggtccccagctagcactctcaattctccttgctggaatattgtgcatatatataaactatgactgtgatcgtcagcgccaaattccgtcggacaaatgggaaatgctcaatatggggcaaagctccatctaagattgttgcttcctatcagactacaaatggagaaacaaaaagcagtcttctcttgacttctggatggtggggcttgtctcgtcattttcactatgttccagagattctatctgcttttttctggacagttccagctctttttgatcatttcctgccgtacttctatgtgatctttctgaccatattgctgttcgaccgagctaaaagggatgatgaccgatgctcatcaaagtatggcaagtattggaagatgtactgcaacaaagtaccgtgcagggttattcctggcatttactgaggttgttgaccatgttcaacaacttctcgggataaaactcagccatgttgtgaattcctttctctgggacgatctactgctgtttgtgtaatatgtcattagcttgatgtatgcaggattagattcgggctgattggtttcaaccttttgagtttgctgtatccaaccctgacacagatgagtcaacgatgccgccaaatcgtgatttttcttgttagctcgctgataggagagatgattgcaggatcatagtttgtgtagtttgtaccttataatggatgtttcgacttcatttttctgctagaagcgattaggcagcacgaaaatgaaattgtttgaggttctgtactgctcgaataatgttgctgcaactgtattatccatgaactgtaataattcaaagtttggc

SEQ ID NO: 24758 - DNA, 842 bp, Oryza sativa
  ref <308>: DATABASE ACCESSION NUMBER: AK100200
  ref <309>: DATABASE ENTRY DATE: 2002-08-28
gaaatcaaattaaatttcttaattatagcggctgctttatgcttttaccacctccgaaacttatcagcttatgatcacaatacatttcctgcgaaattcgatcgcgtgtgtggatcgtagtacactcatacaaactgtcatgcacaagctatgttaaaacaaacaatcgaccgtacgttgggtatatagacgatacaacgacgctcgcgtggatgacgccgccgatcaccggagcgtggcgaacgcgccgccgcgcatcatctgcttgaactcgaggaagtcgacgcggccgtcgccgtccctgtcgacctggccgatcatgcggccgcagtcctccgccgtccggccctgcttgatccccagcgacgccagcacggcgcccagctcgtccacggtgatgaacccgtcgccgttccggtcgaacacgtcgaacgcctcgcgcatgctcgcctcatccacgtcgcaggcgccgccgccgccgccgccgccgccgtcgacgcgcatgacggtctcgtacagctgggtgaactcgtccatgtcgacgcacccgtcgccgttggcgtcgatgcgggcgatggtggcggcgagctcctccctgtgcacgggcatcccgagcctctccagcgactccgtcagctcctcccgggtgatccggccgtcgccgtcacggtcgaacagctcgaacacccgccggagctccgcctgctggtcgcacgccatcccctcgccgccggccggcgcccgccgccgctagctggtggtgcagccggctgcacgtacggccacaggggagcgtgtgggagggaggcgtcggaggccgcggtggtggtggtagtgggatc

SEQ ID NO: 24759 - DNA, 1972 bp, Oryza sativa
  ref <308>: DATABASE ACCESSION NUMBER: AK100201
  ref <309>: DATABASE ENTRY DATE: 2002-08-28
gcctttcgcctaaaggaaaatctcgcgtctcgtctcccctccttgcgccatctcgcggctgacagggtaggggcgccgatctccatctggcgagcagagcagagcaggcgaggggaggggatcctggtgcataattcttgaatccattttaagtgcagcaattctgagtaccaaaaaatccattcaaaatggtggttcttgctgcttccatcatttcaaagtccgggaaagcacttgtttcaagacagtttgttgacatgtctcgcataaggattgaaggattacttgcagctttccccaaactggttggaactgggaagcagcacacttatgttgagactgaaaatgttcgctatgtttatcagccaatagaaggcctgtacttgctacttatcactaacaagcagagcaatattcttgaagatctggacaccttggggctgctctctaagcttgtgcctgaatattctccctctcttgatgaggagggtgtttgtaaaacagcatttgagcttatatttgccttcgatgaggccatctgtcttggaaataaggaaaacgtaacagtccaacaagtcaaacaatattgtgagatggagagccatgaagagaaggcgcacaagctgatgatgcaaagcaaaatcaatgaaacaagggatgtgatgaagaagaaagccagtgagcttgataagatgaagatggaaagaggaaaacttgacaaaggaggatactcggcaatatcaggtcccagggtagttgaaaaagcatttggtgacatgagcattactggtagtggatttggaagtggttctggattaggtggactgagcatggatatggactcatttgctagcaagcctaaaggccgtccatctgcagctgctactgctcctggtaaaggtcttggaatgaaattagggaaaacacagaagacgaatcagttcctggaatctttgaaagctgaaggagaagtcattctggaggatgtacaacccagttcagttcagtcaagggtgtcgcctcttccaccaagtgatcctgtcacagtgacaattgaagaaaaactcaatgttacagttaaaagagatggaggtgttaataattttgatgtgcaaggaacccttgctcttcaggtccttaatgatactgatgggtttatccagttgcagattgaaaaccaggatgtacctggacttagcttcaaaacacaccccaatatcaacaaagatttgtttaacagtcaacaagttgtgggggcaaaagatccaaacaggccattcccaagtggtcaaaatgaaactcctctggttaagtggagaattcatgggatggatgagtcatcgttacctctatcagtcaactgctggccatcggtatctggaaatgaaacttatgtcaacattgaatatgaggctgctgagatgtttgacctgcacaatgttgtcatatctataccattgcctgcacttcgggaggctccgagtgttagacagattgatggagagtggaggtatgattcgagaaactccgtgttggaatggtccattcttcttatcgatcagtcaaaccgcagtggctccatggaatttgttgtccccccagctgatccatcaacatttttccccatatcaattggattttccgcatctagtacattcagcgatttgaaggttactggaattcgtcctctaaaggatggtaacccaccaaagtattcgcagagggctcgtttggtaacagccaattatcaagtggtttaacgcccaaataagggagattacctcacttcagcacacatgtttgcgggcatttcctttcggcaatgagctgtttagaagtcatggagaagaaggattgttttgcatttataaagaatgtaattttgtctgtttcatatgtagtaacatgtttcaccaaattgctgttaatttgtactgccacctgatgagaaataaaagcatgtcttttcctc

SEQ ID NO: 24760 - DNA, 1628 bp, Oryza sativa
  ref <308>: DATABASE ACCESSION NUMBER: AK100202
  ref <309>: DATABASE ENTRY DATE: 2002-08-28
ggatcatccaccgtctccatctgtgcacggagggattcattgtccctccggccaatttcccggccggccggaacggcggaacctcgcccatgatcacttgaaacacctcccttgctcttcatggccatggagacgacgagccaagattcgcaggtgatcatggggcggtacaagctcggccggctcctcggccgtggcacgttcgccaaggtctacaaggcctataagttggccaccggcgaggccgtcgccatcaaggtgttcgacaaggaggcggtgcagcggtccggcacggtggagcaggtgaagcgcgaggtggacgtcatgcggcgtgtgcaccaccgccacgtcatccgcctccacgaggtgatggctacgcggtccaggatctacttcgtcatggagtacgcgagcggcggcgagctcttcacccgcctctcccggagcccgcggttcccggagcccgtcgcgcgccgctacttccagcagctgatcaccgccgtggagttctgccacagccgcggcgtgtaccaccgcgacctcaagcccgagaacctcctcctcgacgcccgcggcgacctcaaggtcaccgacttcggcctcagcgcgctagacggaggcctccgcggcgacggcctcttgcacaccacgtgcggcacgccggcgtacgtcgctcccgaggtgctcctgaagcgtggctacgacggcgccaaggcggacatctggtcgtgcggcgtgatccttttcgtgctcctcgccggctacctccccttcaacgaaaccaacctcgtgatcctgtaccggaatatcacggagagcaactacaggtgcccgccgtggttctccgtcgaggcgcgcaagctccttgccaggctgctcgacccgaaccccaagacccggatcaccatctccaagatcatggacaggccatggttccagcaggcgacgtgcccgctcggcgacatgtccctcgtcgcgagcgcgccctcggtgctgcttgccagaaaggaagccagccagcagcacgacgacgaggaggacgatgggtttgcacgggagaagaagaagcggtccaatgtgatcatgtcgtcgccggtgatcgacgtgaggccctcgagcatgaacgccttcgacatcatctcgcggtcgagagggctggacctgtccaagatgttcgacgcggaggagcgcaggtcggaggcgcggttctccaccagggagaccacgacggcgatcgtctccaagctggaggagatcgcggaggcggggaggttcagcttcaagctgaaggagaaagggagggtcgagctggaggggagccaggacgggcggaagggcgcgctggccatcgaggcggagatcttcaaggtggcgccggaggtgcacgtggtggaggtgaggaagaccggcggcgactcaccggatttccgggacttctacaagcaggagcttaagccgtcgcttggcgacatggtgtgggcgtggcagggaggtgattcgccgccgctcgtgccggcggcggggaggaggccgatcacgaagcgctcttgatatgccgactcgatatcgaattttcacgttgtaattgatatgctctctgcttattgatctctcgtacgtgtttgtgg

SEQ ID NO: 24761 - DNA, 1901 bp, Oryza sativa
  ref <308>: DATABASE ACCESSION NUMBER: AK100203
  ref <309>: DATABASE ENTRY DATE: 2002-08-28
taggggcaagtcttccccaagtcacaccatccccgtcccggatccggcgaccaccgattcctcgccgccgccgacgacgatgccggcgttcaaggcgccggcgccgggcttctccgtgcgcttcagcccgttccacgagcagcgcctcctcgcggccgcctcccagcacttcggattagtcggcaacggccacctcctcgtcctcgacctctccgccgccgccgccccggggggcgcgccggcgcccccgccggtgttcgccttcccgacctccgacgcgctgttcgactgcgcgtggtcggagtcccacgagtccctctgcgcaccttccgcggccacgagtactgcgtctacgccacccggacgtcttcgcctccgcgtccggcgaccgcaccgcccgcgtctgggacgtgcgcgagccggcgcccacgctggtcatcccggcgcacgaccacgaggtgctctcgctcgactgggacaagtacgatccgtccatcctcgccaccggctccgtcgacaagtcgatccgcgtctgggacgtccgcgcgccgcgggcgccgctggcgcagctcgccgggcacgggtacgccgtcaagcgcgtcaagttctcgccgcaccggcagggcatgctcatgtcctgctcctacgacatgacggtgtgcatgtgggattaccgcaaggaggacgcgctgctcgcgaggtatggccaccacactgaattcgttgccgggatcgacatgagcgtgctcgtggaagggttgctcgcgagcaccgggtgggacgagatgatctatgtgtggccatttggctctgatcctagagcaatgtaaacaaaatgcctttggagaacacatatttcgtacgtcgagggatatggattatttctgttgcgttttgcattggtcatagtaatacatgtggattaactcctttgagttgaagaaattgcaataaagatcctattgctatctaaatcacctagttgttaagttcttcacttagactcaaagtgcataatgtattgctagtatataatgttggttgtagggcaaattagtgggggttctacaaccccgatagtgcataggactatgtagtgtaatctagggcatagggagatatgtgaagcacattaaaatctataatgtatacaattctgtttgcagctggtataaatcctcttagacttcttattgccctgcattaatagccttgtatgccttcttgagatagtggcaaaatctagtcgtatgtcaatcttccatcttgctattacagtttaaatagtgcgtgccattgtcaacatataaatggagttcatttactccttctgtaccacagtgtttgtccattttgttgggatgtacgtttgtaacgtttaacaatgttttgtctgctaataataaaaccaacactctagctatcacaacatatccactctggaacctaatttaatgcagtacaagagattagtaattgtgctgtgtggtttaatagaatgtatggtcaacaaatatataaccctattaaataactgtagtaaaagagattgaataattgtatgggtatacagtataaaagggttgaataattctcaaaagtttgacttgagacatgtccaacacaagatgtttttgttactagagggtgtaacatgagttgaataattgaacattgtgtatgtagaactatgcctggtatttgaacaatcaatgagatggttcagttagagtagatttgtcatgattgggatgtaaccatgtaaaatgttcgggtgctttgtatatactttaagcatgcatgtggtgacatgggtgtgtgagttgttgaacataatagtacaagatttgccagcttatctcaacataaatattgttggaataaaggaaagtacatttagc

SEQ ID NO: 24762 - DNA, 2909 bp, Oryza sativa
  ref <308>: DATABASE ACCESSION NUMBER: AK100204
  ref <309>: DATABASE ENTRY DATE: 2002-08-28
gtgcccttctacgccgcggcggcggcggcggagcctcgggcgggggatgcggccgcgatcccgccggcgtcgaggaagctggtgcaggggcttaaggggatcctgaccgaccgctccgaggccgagatctacgccacgctcctggattgcggcatggaccccgacgtcgccgtcgagcgcctcatctcgcaagatccttttcatgaagtgagaagaaagcgtgacaagaaaaaggagatcaaagcacctcaggaaaccaggcctcggccattttataaacctgcatttcgaggatctaagactggaggagattcaactggcagtggtaaaggccctaccaagaaagaaacggagttacattctcttcctaaatcatcagtctctgattctgtgaaggaaagcaatccaactgagaagatttcagcagccgaccatgctactatcaatgacagtcttattttatcaagtggccaagctgatgcaaagtccactcctctccagcccccttctcaagtgaagcatggttggggtgggatgccagggcgcccttccatggctgatattgtcaagatgggcaaaccccaagctaaacctgtgagatctgttgcatgtaataccgggatgccaaccattggtggttcagtcatttccaatgcaacaaatcatacttcaaaagattcacaagacctagttttgccttcacaagtgaactctgttgcaactgatagaataccaaatggtaccaatgaggtctcccctgcatctaatgactcctctattgatgtattacctcccagagaggggttggaggtgccagaatctgtcgccacagttaaacctggatcgtcaactgcagatgtttacaaagatgaagttgaagaagacatggattctgataaaaataaggatatgagtgcaagcaatgcagacgatcgaacatcttcaggaccatatcctgcatctagcaaagaagtacactcagaacatactcaaattgccacccatcacaatgacttgatagtggaaacagaggactctcagtctgatggcaatgcatttgagaataaccgtgttgcagattcagagggaaatatgtctgctactgacaaacagtttgaacagttgattctacatgaggaaaaaaaatcaaaatcatctgaagataacccggctgtaataattcctgatcatcttcaggtttcaaatgctgattgtgcacacttgacatttggtagttttgtgtctggaacacttgatgcgccagtctccttgaaaactgccaatggtgatgaggaggttgcagcagtttctgataaccattcgattgatcagtcagatgtcagaatccatgagtacgaaaataaggatacagtagcacctgcagctgacgaacatgttgcctcttcaacaaaaagtgacacggagaatgttgatgttgcacctgtacaacagcctgaattgagaacagccgatttaatagatgttccaaacaacaccatgtacaataatttatcaacctccgattatgcaactccaagtgcagtgcaaccagattcttccgcacacatttatctgcaagaacatcgacaattgcaaaacatttcccctctctctagctttatgcaaggaaatatcccgaatggactattgccaccagcacttccacctttgcgtgactttgatcctgctttctcattattacttactaacccaccattggctacgatggttcatggcacaacatcatcgtccatgggcaatgcaactactgtttctacacaaccacaagagattgtgaatccaggtgcttcatccaaccctcaattgaatcaatctcagccaagcaccagcaccagcattgcttctggtcctccactccctcagcatctcacgcttcacccttatgctcaagcaactcttcctcttgggtatgcaagcatgattggctacccatctctagccccaagttatacatatctcccgcctcctgcctttcagcaaccatacatgaacagtggcctattccaccaagcagcagctgcagttcccaattccagtgtaaaatatcctttgccacagtacaaaggcaatgtttcccttgcgagcttaccccagcaagcctcactgctctcaagctatgttgggggctttggagctgcaagcagcatgccaggaaattttgccctgaaccaaagcacaccatcagcaaccgctgctcctgggtttgatggaacagtgcccgcgcaatacaaagaaggggatcaatttgtatctcttcagcagagcgagaacgctgcgatgtggatgcatggtgccagttcgcgaacaatgccacctcttgcagcaaatgccttgtattatcaagggcagcagggtcaccagggcggccttcggcaggggcagctgccttcacagtttggtgctccacttgcaccgacacagcccggcctgggccatgagcaccggaaccctagtgacggcaacttaagctctgctgccgctgccgctcaggctaaccaaatgtggccaaatagttactgacccagcctttgaaacccttttgagtgtgtggtcctgttgtggtgcgtgctacgtcagagatgccatgcaatgcttttggcctgattcaggcgcctgaatagcaactgtgtatatgagttgctatgtcgacattttggagaggcagaggagatgtatgtttgatcatcatgttctactacccttagcattttctaggatggcctaaaactgtagctctatttatttatattctgatagaaaggaccgttctttctcagtttgttttgttcttccgtttacatatcatgtaaacaataaaactgagatatctaacaaagcagcaccatgaatgaatttcaaggaagcaaaggatgagctagctttgtatc

SEQ ID NO: 24763 - DNA, 2216 bp, Oryza sativa
  ref <308>: DATABASE ACCESSION NUMBER: AK100205
  ref <309>: DATABASE ENTRY DATE: 2002-08-28
gggtcccctcccctcagccactcgtcgtccctcggccatggcgaggcgcctctcgtggcaggatttgcaggcgtcgggctcggccatcgcgacccgcctctcgctgcaggacttgcagtgcctggtgcggaggaagccggcgtgctccgccgccgaccgcgccgagtcctcggcggcgggggcgccggccggtgggggcaaagggcggcacctcgccaaggcgctgtccgttcctgacctcatcgccatcggtgttggctcaacgattggtgccggcatctatgtcctggtaggaactgtggctcgtgagcatgcaggaccagccttgaccctttcctttctgatagctggcatagcagctgctctttcagcattgtgctatgcagagctctcttgccgttttccattggcgggaagtgcctatcactactcatacatttgcattggagaaagtgtcgcttggttgattggttgggctctgattctggagtacacaattggtgggtcatcagtggctcgtggcatttctccgaacttggctctattttttggtggccatgagaagcttcccttttttcctaacacaaatacatgttaaatggtttgaaaccccgcttgatccttgtgctgctattcttgtattgatagttactgcactactttgcctgggaattaaggagagttcatttgtggaaggcatcatcaccattgcaaatgttatagttatgctgttcgtcatttgtgctggtggatacttagcattccagaatggctggagtggctataatgatgaacaaggttacttccctaaaggtgtggctggtgttctatctggatcagcaaccctcttctttgcctatattggctttgatgcagttgctagcacagctgaagaggtgaagaatccccaacgtgatcttccatggggaatgtgtctgaccttgtccttgtgctgcttcctctacatgatggtttctattgttattgttggcttggtgccatattatgcattggatcctaacactcctatttcatctgcttttgctaaatatggaatgcaatgggcagtgtacattatttccactggggctgtttttgctcttatagcatccttgataggtgctattctccctcagccaagaattgtgatggctatggcaagagatggattgcttccaccactcttttcagctgttgatccaacgacccaagtcccaaccttgagcacaatattgtcagggatatgtgctgctatcctggctcttttcatggacgtctcagaattggcagggatggtaagcgtgggcacactattggcatttactatggttgccatttctgttttaatagtgcgatatgctcctccaaatgagatagcaacgaaagtggctcttccaggttcatctgaatcactaacttcagactctgggtattcagaaccagatgaggaaaattcggaggatcttttgggcaacgttcaagacatacctactgccaatgaagccaacaagataaggcgacagaaagccatagcatgcattatactaatttttcttggggttgtcaccattgtttcttcagtttctttctccttttttccgttatttttgcgatccattgcaggtgcctttggtagtttgcttttggttagtgctaccattgcactctggttcattgggcaagacaagagctctttaagacaaaccggaggttttatgtgcccatttgttcctatacttccagtatgttgcattctcatcaacgtatacctgcttatgaaccttgggattcatacgtggattcgtgtttcgatgtggctagcggttggtgccatcatatacgtcttctatgggaggaagtacagctcactgacaggggtagcctatcaacggatttcacctgcatagatcactgtgggggttgttcatctgtacatggcgattaacttgtacagcttccgttgattttccctttgacaaatttcacagttccaatcttcaatgaactatcaaaagtcttgaagctctcagagatcatctcacagaaatggtcttcatgtgtagcccagcgtgttttgagcaagaattcgagcaaaagcataacaacagtggcagcagcagaagcacagcacattgtgtaactgcttagaattttttgtgtctttctatagtcagttttgacagttttaccatcacctgtaaataataaatgttctc

SEQ ID NO: 24764 - DNA, 1712 bp, Oryza sativa
  ref <308>: DATABASE ACCESSION NUMBER: AK100206
  ref <309>: DATABASE ENTRY DATE: 2002-08-28
ggtcgtcgtcgtcgggtcggacccgaaccaccgagctcgctcgctttgccgacaaatcacgccatagaccaacccaacccgtgccgcaaaatccccaaatcccaaatcccaaatcccgccgcctcccagatcgccgccggatcgatggccgccgcctcgccgctcgccgccgcggcggcgctcgccctcctcctcctcctcctcctcgccgccccggcggcggcggagatccgggagacggtgatccggagcgacccgcggagcatcatcccgctcgacgagttcgggttctcccactcgggcgtcctcgagctcaacgtctccggcatcgccttcgacccgccggcctcctccgagctcgacctctcccagctgggattcttcctctccacgctcgacgcctgggtgcacgtcctccgccagctgcaggatctcgacgtcacctgcgcgctccaggccgacctcgtcaagctcgcctactccttcgaccgcctcaggccgccatccaaccccgccggcgtcgaggtcgcccgctcatcatccttctccaccgccttccccgtctccgagccagggcagtacacgctcgtcttcgccaactgcctcggcggggggctcaaggtctccatggacgtccgctccgccatgtacaacgtcgacccgcccaccggcgagcgctcctacctctccgcgggggccaccgcgctcccgaccatcttcggcttcttcggcgtcgcctacgccgcgctcgccgccggctggatcgccatactcctgcgcaagcgcgccgccgtgttccggatccactacttcatgctcgccgtgctcgtgctcaaggcggtcaacctgctcgccgaggccgaggacaagtcatacatcgagcgcactggcacggcgcacggctgggacgtgctcttctacatcttcagcttcctcaaggggatctcgctgttcacgctcattgtgctcatcggcaccggctggtcattcctcaagccttaccttgctgaccgagagaagaaggtccttatggtggtcatccctctgcaagtcgtggccaacattgcgcaggtggtgattgatgagtctgggccgtatgctcgggcctgggtcacctggaagcaggtgttgttgctggtcgatgtgatctgctgctgcgctgtgctcttcccgatcgtgtggtccatcaagaacctccgcgaggctgctcgctctgacgggaaggcggccgtgaatctcatgaagctgacccttttccgccagtactacgtggttgtaatttgctacatttacttcacacgtgtcgtggtttatgcgctgatgaccatcacctcgtaccggtaccaatggaccagctatgtggccaaggagctggccacccttgcattctatgtgttcactggatacaagttccggcctgaggtgcataacccgtactttgcgattgacgatgaggaggaggaggctgctgctgaggcactcaagttggatgatgaatttgagctatgaggatttacaattgccggtcccttcttttgccactgatgatacagatattgtatgtgcctccaaaggacaaatggtatagactggtatctagtccatatccttttcttttcatttcaagttagttatatttttcttgctgtaactggttatggtcaaccttgtgtttgtgttaagaaatgcagcagcttggatttgccttggtc

SEQ ID NO: 24765 - DNA, 2209 bp, Oryza sativa
  ref <308>: DATABASE ACCESSION NUMBER: AK100207
  ref <309>: DATABASE ENTRY DATE: 2002-08-28
gtcctttcctcccctccatggatccagccaacctccattcctccactttcccctccattcaactctcttcctcacgacgcaccacgggctagccactcctacgatgatcattaatccttgctgccgacaccggcccagcccctttctctcatgcgcctaccatcccacgattaatctcctcttaccacctcaactagccacctcgaaccctaatccggtggcattatcactatcttcgtcatcggagaagacactggcaacaaatagaacggccacagctcaatctcgcgcatggatcgacgatggatataaaaccgacgtatccgtgcgccaccatcaagcaagctcacatatgaaccaccgaagaacatagatagcatcgcccaacctcgctgcattcgcattaccaaagtgtgccaacgccatggtggtgaccttcacatctcgccggagcgagccggtgctgctccggccggcgaggccgacgccgcgggagacgaagcagctctccgacctcgacgaccagcggacgctgcggtactacgagacggtggtcggcttcttccgccgatgcgacggcggcgcagctggcgccgttggcgcaccggccgacccggccaaggccatcagggcggcgctcgcggaggcgctggtgtactactaccccgtcgccggccggctgagggaggtcgccgacggcggcggcgcggggaaccggctggtggtggactgcacggccgaaggggtggtgttcgtggaggccgacgccgacgtgcggctggaggacttcggccagccgctgctgccgccgtacccgtgcgtcggcgagctgctctgcgacgccggcgacaccagggctgtcgttggcaaaccattgctcctcatgcaggtgacgcaacttaaatgcggcggattcgtcctgggcttccacatctgtcacaacatcgctgacggcttcggcatggcgcagctgatcatggccatagccaacctcgcacgtggtgagccagccccgaccattctgcccgtatggaggagggacctactcacggcagcacgcctaggtagcggcgcggtggcacgcacgccctttgcatcggcggcggcggcgtcggcctcggcgtcgagcccggcactacagaacggtgctcgccgcgccgccgccgcggctgacgcgatgctgtcgaccccgccggaccggatggtggtggagtacttcctgttcgggccacgggaggtgtcctacctgcgtggccagctgccggcgcacctggcggactccaccacggtgttcgagctgctcaccgccgtcatgtggcggtgccgcacggcggcgctcgggtacgggcccgacctccgcgtccggctaatgatcaccatgaacgcgcgcgggaggtggaacgcgcacaccccgctcccgcgcggcttctacggcaacgcgcacgtctcccccgtcgccgaggccgccgccggcgacctcctcgggcggccgctcgccgacacggtggagctcgtgcggaggaccaagcgcgggatgacgcgggagcggatgagcgccatggtggagacggtggcgcagctgcgggagtggccgccgtcgagcatggacagggtgtacgaggtctccgacatcaagtggaccaccgtgaacttgctcaagttcgggtgggctgagttcgccggcggcggcataccgctcgcaggcgatctcacctccaagctcggaagcgaccacacgaggtgcaagaactcggccggcgaggtgtcgacggtggtgtcgatgctgctgcccagggtggccatggcgaggttcaagaaggagatggccgttttgttgaacaaagatgacaagaagagcttgacaattatgagttcgctgtagttgttgccacacatttcaagcaaaggttcttaaacagctaatggtcaccaaagcacatttttatcactgtcacttcatcatttctgatcgatctagttgtgcacatctaatttagtgggacaatcggtttacttagtggagtactacaatatatgtaattgtattcagttgtgtctacctgttcatctgcacaggctattggattttcatcagttctttaattgtaaaatacacccctccctttaatgtatgcgcacatacttttaacttgtaaagttacctcgctcattatagtttgtaatgtgagctttttataaatttgtttct

SEQ ID NO: 24766 - DNA, 2096 bp, Oryza sativa
  ref <308>: DATABASE ACCESSION NUMBER: AK100208
  ref <309>: DATABASE ENTRY DATE: 2002-08-28
gatgaacatgaggaccatcatatccctcatcccagatacatgatctgtactgtctcctcctctctagcttctctcctctccctgctgtgccccttgctttgttgcttggtcaattagagctaagcagcaagctagcttcctggaagcaaggccggcgcctggctgggacaagaaccacaggaaccacagctgactgattgatcaatcaatcaatcttctgctgccctgctgcctcacagcctcagcaagacaatcaattttggccctcttgaggctccggccggtcgccgactcgccgtcgtcgaaggtgctctccggccggcggagttaacattgagcttgatttcaagccgcgctccgatccgaccggcaaagcgccgaagctgccttccgtttgtttcactctggtctctgggggctcgccatcagccatccgtaccgagctgtagtgtgcgcggttttgtcgcgtcgtcgtacgtcgagaatccgtgagccagacagacaagccagtggtttggtgattcttgcggcggcgcggcgatggagaccttcggctgggccggcggcgggcagctgatgcaccacgacgacatctacttgccgcgctcggtggggtgcgggcggccgttcgagctggacgacgcgttcctgggcgcgtgcttcggcgcccagctccagtgcgacggtggcgtcggcggcggcgacggcggcgggtgtctgcagggtacctcgggatttggcgccgtggctggagacccgttggggttgctgtgctcgggggacgtgtttgcgtctgtcgccgagggcgccggcggcgcgcacgacgacggcctcctcgacgcggcgctcgccttctcccggaatcagctcgggggcgccgcctgcgacgggagcgacggcggggccgtgtcgaacggcgccatgctgtccagctacagcggcaccaccggcggcaacatctcctccggcgagtcgaataactacagcggcggcggcggtggctacgacgccgatgtggtgtcgccgacgtccaccatgtccgcagccacacagtcgctccaccccaagcgaaagctatacgacgaccaccaccaccccgccggcatagcagccgcagccgcagcgccaccgctggcgccgtgcccacgccccaccaccggcgccgtcgccgcgaagcggagggcttccacgtcagcaacaagcatcaccttcggccaccagccgcaccaccaccacgcgggcgccaccaccgccgggtacgagcctgacatggaagccatggcgcaggtgaaggagatgatctaccgggcggcggccatgcgccccgtccacctcggcacggaggccgccgccgacaagccccgccgcaagaacgtgcgcatctcgagcgacccgcagacggtggcggcgcgtctccggcgggagcgcgtcagcgaccgcctccgcgtcctgcagaagctggtccccggcggcaacaagatggacacggcgtccatgctcgacgaggcggccagctacctcaagttcctcaagtcccaggtccaaaagctggaaaccctaggcaccaccaccaccacgtccaagttaccgcagcagtattacagcggcaacatcaacagcagcaataatcaccatggattcctcggattcgcagcaaataacaacaccatttcagctggctacgcaaattctaatgctggaaatgcaacgaaactgttgtagcactgtggctagcacaagtacttgatacgcacaacgtacgcgtggtctcgtcgtctatatacatgtagtaacatgctgctgttttctactgtttctaggcttggtggtgatcagtgtacgtacacacggcacataattggagtcttaattagtggtggagtgcatgctgatttagttcgtggtcatgttcttgtgcaagatttagatttataatcttccgctggcggatcagctgcatggagtgagaagttacatcaaattaaaggggccatctgatggttcgttcaaaaaaaaaaaacgggtgccatctgatagaggaaaacatgtggttcaataatggaaaagagtggcctggacgagcaatttgcgagtgg

SEQ ID NO: 24767 - DNA, 1639 bp, Oryza sativa
  ref <308>: DATABASE ACCESSION NUMBER: AK100209
  ref <309>: DATABASE ENTRY DATE: 2002-08-28
ggtggtcatggactcattgggcatggccgcctcgtccgagccaaaggcatgtgaagcgctcggagtcagagagaccagggctgggctggcgtctgctcgcttcccgagagaaccccttgtgaagattcgagccaaccccttcccccttcctcttctctctctttttctctcgcttctcctcttctttaaagcatggaccagcgcctagtagcatctccatccacggcagtaggcagccggtgccatgggaggggggaagtaggagggtttttcttcttcttctttcttctctctcgttttctcgcagaatcatctgtgtgcagattccatgcttttcgttagggttagcctattgtgctaagcttgttttttcttccatggcttcttgttcttattcgtttggttatgttgagctgttcttgtcgttgctggaaagtgttgtggacgttgagctcctttcggtccaaaaaggggtgttgctgtgggtcgattgagctgctgggtcatggatcccgttagcctactccatgttcatcattcagctcgagatctgaaagaaactactccaatttatactaatagtatgtgtgtagataggaaaatgatggagtactcgttgttgggataggcttatggcttgcatgccccaggagctgcatcaaccgtacatggaccctctttggattgaagggagctctgcatcttttgtcaccctcgagcagctttactgttctggatttccatcgttctcctcttgagtcttcttgacttagcgctttttttttctttttttaaaagaaaaaataacttttttttcaggattgtgctccatgcgtatgagcatggtggtgatgatgtatgttgccagatagcagtagtattaatattgttgcaggtgtggtggagggtactaggaatttaggtggtagcagtacatacttggtcaccagtatctagtgcccttttccttgttgggaaaaagttgcttctatcgccatgcttatccttcctctttcggctcttctttgcacagcagctctagatcttttggtttcctgctctactggaatctgataatgctggatgcttcagaacttaggaggcttttagggctgaaacgttcaacctagttctccctatttcatcatctgcaagtatatatctttattagtttgttctatgggtagcctttgcgtatttaaagcgatttatcacttcgccgatgaatctagtttgctgttctctgaaattgctggagttcaatccttgtttgctcttgaagtcttgatagtttgcttagtgatgcactgatgaacctgtgtatatccttttcagatgaccacaaccaactgattcctattgcagctaactcaagtgtggaactagctttacgcttgaagctttcattcagaaaaaaaatagcctgcttaagtcaatttgtgctttcatgcacattctacatacggagtagtttgtgttttgactgttggggcttgaaggtgtttgttttatttcctcaattttgtgtgttatttttccactttatagccatgccacttgtctaatggatccttgtgtaatgtaatctgtactttccgctcggaatagggacttgatgcaatggccaaatttcctcgtt

SEQ ID NO: 24768 - DNA, 2396 bp, Oryza sativa
  ref <308>: DATABASE ACCESSION NUMBER: AK100210
  ref <309>: DATABASE ENTRY DATE: 2002-08-28
gtgatgcagagggagcatggagccaaacagaaagtctgtttcgccattaatggctctcccactcacctctctctctagaaacacatagccaagatcatcatcatcagcaaccatattagtgaattaagaggaaatcaaagcagtagcagcccaggaacagcatcatcaaagcagtaagagagggtagtttgcaagtggtgctagtgtccaaggcgccatcacgaactagagtcctagatagagctagaggtcatgcatggggtagttgctggtgtggaagaggaagagagaaagtgagtgagagagagagaggtggcgccttggctgctagcctcatagagtcaaagagtatttaggaccttgcagctatggctatagatagatagaggcacatacgcatacgtatatagcttgctaccttgccttctctgtgtatgtttcggcgtgtgttcttcttcttctcttcttcctcctctcgattctgaagaggttagctttgatttgatcgatcgatgatgagcgggagcgagagccagcaggagagggagcatcgtcagcagcaggagatgaacatctcctttgggatgatgatgaaccatggccaccatcactacggacagcatcagcagcagcaccatcatcatccgcctccgtcatcgtcttcctcttcctccatgcatgccgctgccgcaagcttcatcaaggaggcatctgcaggagcttatgatcatctgggggagctggaccaggccttgttcatgtacctggatcatggcagccatgcggcgtcgcaccaagaacaaaggcagaccctcaacatcttcccttcccagcccatgcatgtggagccatcacccaagggagagattagtttagtgctgtccccagcagctgtgggaaccaagatggcgaggtcacctgatcatcaccaccaccatcagcagcaagcagcagcagccatggaggagttggcgacagggagcaggagacaggatcaccaccacctgcagcaccaacctttcgctgctgagcctgcagggatcaacagggatgtgaagccggtgacagccaagaaggatcacaggaggggtgtatctactggtgaacgcgacccaaagacgctgaggaggctagcccagaacagggaggcagcaaggaaaagcaggctaaggaagaaggcttacatccagcagctggagtccagcaggatcaggcttgctcagctcgaacaggaactgcacaccgcgagagcccagggggtgttcttccccggcagcggcgggctgatcggcgagggaggcagcgggaagggggtcctgctgggcgggatcgatggcgtcggcggcggcggcggcggggggctgagctcggaggcggcgatgttcgacgtggagtacgggaggtggcaggaggagcaccaccggctgatgtacgagctgcgggcggcgctgcagcagcagctgccggagggggagctgcaggtgtacgtggagagctgcctggcgcaccacgacgaggtcgccgccatcaaggacggcgccatcaggggcgacgtcttccacctcatctccggcgtctggatgagcccagccgagcgctgcttcctctggctcggcggcttccgcccctccgaggtcatcaagatgctggtggcgcacgtggagccgctgacggagcagcagatcgtgggggtgtacgggctgcagcagtcggcgctggagacggaggaggcgctgacgcagggcctcgacgcgctctaccagtcgctctccgacaccgtcgtctccgacgccctcagctgcccttccaacgtcgccaactacgggccagatggccgtcgccatcaacaagctctccaccctcgagggcttcgtccgccaggctgagaacctgaggcagcagacgctgcaccggctgcagcaggtgctgacgacgaggcagatggcgcggtcgctgctcgccgtctccgactacttccaccgcctccgcaccctcagctccctctgggtcacccgccccaggcacccgcctcacgaccaccagccgccgccgcactccgccgccccccacacctgagatcaccgccgccggcaacgcatgcaaacaccgtagctcttagctagcagcttagagatatcgagagatcagaaattaagcgatcgatcgagagaggacgacgactgtgaaaccccccatggaatggatggatggatggatggatgaaccgatgtgtactgtgtttgggcattaaccctttgatgtaaacaaagtaggcgtgtttgactgcttggtcgatcgatcgagatctctgtcgataggatcttgaattagcggatcttacctcagcaactggttcatcaagtgttgatgcagctcaatcaaactttttcctgatg

SEQ ID NO: 24769 - DNA, 2726 bp, Oryza sativa
  ref <308>: DATABASE ACCESSION NUMBER: AK100211
  ref <309>: DATABASE ENTRY DATE: 2002-08-28
gatctgaaatccatggcccccgccgccgccgagcaggagctgctcctccacctgaagctcgccttcctcgcccgggagccccccgcctgcgtcctctccctcgccagaaaagctgggggaggttctgtcacgccacacgttcaaaattttattttggagagttgtactggcaataatgcagggggagatcaaaactgtagttatgttacaactattcttaaaaggattatagcagaagctgagttatcgtcagatattgtgattgatggactttatgaggaatttggccagttcatgtcgtcaaaatcaatgacaataaacgagtaagcttggttgctcgattatcatgttctatcaatatgctcgaaggtgatacagggtgctctctttggccatcaggtttattcctatctgagtttattctttcatacccaaaaattttctctaggaagtgttgctttgaggtaaataccgattattttttgtgttttagtttagatacatggaaaatgttatctttatctagcatatatatatttataggaatatgttcagctcaactactctatcttctgctgtaaaatattattactgtaaccagggacagatccaaagtgagccaacctgatcatcccccagcaaatactggttatatcttgcttaggcatgcgttttgcaacacaaatatatagaagtccattgtacatttctctaatctactactacttaaaaagtataagatgtttccttcgtccgttaataaataaaagcgataaaaaagttcgattgtaacgaaaaaagtccagcgcggaaaaaaaaagggcgtggccaaaaaaaaaacctgaccgattcttatctgtactaaaaaagcggacaaaaaagaagctcggcacggcaaaattttcgtccgtttcttttttttttcccctttttcggttttattttctttttgccattttttcaccatttttcgcggttttttcgtccattttccttttattttctttgcgttgtttttctcttctttttttttctttcaccatttttccggtttcaacgaaatccaacgcgctatttttggcggtttttttttttcggcctgaatcctagcgccgccgccatggcgatttgcctctccatgcgtttcctcatccaattgattgcaaaaaccgattccccactactctctcatcattttccccttaatttcccattagttcgtcattttttattccgagttttgcggattgcttcgattttgataaaaattcgaaaaatgagatcgagtggatcaaaatttctcaacaattttggagatcgagaaagattcggccgcatttgacggagaggatcgactccgtcatcgtacgggcacggtactatgcgagctcgaccaaattaccggatttggtgggaggatcggctccgtcatggtacgggcacgaaactgttcgacatgggcctacagctccacttgtgggctgagccaaagagaggtaggccaggcaaaggactgttcaagctaggtctacagctccacttgtgggctgagccgaagagagataggtcgagcagatagaggcaacggactgctctaggactagagctgaaaaggaaggaaagaatgaacgttcggtccaaaaaacaagaaagcatttggttcaaaatcaagggagtataatgtatagtataaaaaacgtttttacccgttgcaacgcacgggcattttttctagtgattatacaatgtgtaaaattgagcttgaactctgtcgctagctctctgcaaagcccttctactatatgtgtcgctttaccttgatgtttttcttgagcaaatagatatgcagttactgttgctatgactttagtatgatcatctgtctcatcagcatcatactttttccttgcctgttatatcaacagaaaatctcatgaccgaaacttttaaaagttatatgtgagtgtgtcttacccttctaaatgtttccatgataaacagctaggttctggtgttggtttggttggtgtatgtctgaactatgtcagcgcctccaaggttattcttactgatggtgatgcatctacactagaaaacatgaaaggcaacatggaaatgaataacttatgcgttgagcaggaaggttctcaacttccggaagagaacaagaataaggtacaatgcaaatatctttcatgggaagaaacatctgaaagcgatctatgggactgcaggccagacttagtccttggtgcagatataatatatgatccggtctgtgtgccgcaccttattagagtgctttctatgctattgagaagggggaataatcgaggaactaataatgtcgcaaacaaagaagaaaccagcaacgaattcagtagcgctgcgacagaagttcctgtcgcctacatagccacagttattcggaatgccgagacattcaactgttttgacaaagcagctgcggatgccaagttgtctgttgtcaacattaccaacagtgaagctcctttgagtcttcttccttatatgctctcatatgatagatcaagtgtacagctacttaaaattacattattatcctaagacactgattggaactccagcagatcattttttttatagtagttgactgatcataaattcgtttttgaagtaatcagttgactatgatcataaattcgaaatggtatcaatgacaattatcaacgtcggatgtaccc

SEQ ID NO: 24770 - DNA, 1554 bp, Oryza sativa
  ref <308>: DATABASE ACCESSION NUMBER: AK100212
  ref <309>: DATABASE ENTRY DATE: 2002-08-28
ggttgctcgccggtcgccgccccgtctcctcgcttgccggttacaaggacgacctcgtcggggcggcggaaccctccagcctccgggctcgccgccgccgccaagctcgcatcccgcgccggccgccgagctcgccgcccaaccccaaccccaaatcaatcagatcaattcaactatccaagcctaagttgttggatctagaatccatggcgatcgtttacgcggtggtggcgcgtggcaccgtggttctcgccgagttctctgccgtctccgggaacgccggcgccgtcgcccgccgcatcctcgagatgcttccgcccgacgccgagtcgcgcctctgcttcgcgcaggaccgctacatcttccacgtcctccgctcccctccccccgccgccgccgatggcctcaccttcctctgcatggccaacgacaccttcggaagtacaaactctcttatacttactagtattactctactaatctatatgatctatggataggataagatggattcgttcattcatcttcttagtatgttcttcattcattcaagatggtaaactgtattgcttcattagctaatttaggcatttttgcatgtacttattcatttatgttcctttcatacaactattttactgttactactctattagtagcgagccagcgaaatccagacatactagtatgatagagcatcacttgttgtataattaattacaggacgaattccctttctttacctcgaggacatccaaatgaggttcatcaagaactatggcagaatcgcccataatgcgctcgcctatgccatgaacgatgagttctctagggtcctccatcagcaaatggagtacttctccagcaaccccagcgccgacacactcaaccgtctccgtggggaagtcagtgagatacatactgtcatggttgacaacattgagaagattctcgacagaggtgagcgcatctcgctactcgtcgacaagacctccaccatgcaagacagtgctttccacttccgcaagcaatccaggaggctcaggagagctctttggatgaaaaatgccaagcttcttgctgtgttgacagctgtcatagtacttctactttacttgatcatcgctgctttctgtggaggcctttctcttccatcgtgtagatcatgatccgctctacagatttacctcaattaaagcatcacaccatgtaacaacaatgcaagcctatcaatgccatgtgtcgtatctgttcagcacccaaagttacaagtgatgttttgagaaaatgatttggtgctgagttttcgttatcgggagggttgtgctccttcaagttaatatggaacggtttgtacaaaatgggatctatatgtacagtagtgtgtcgtttgttgtttgtgttggctaagacttttctgtaccgttgtgcttgcacatgaattggatgttttgcctgatgatatgagtgctgtggtatgccctttccttaactaaagcgaatggcatgtaatattctcaagagaatatatgaatatggtttatgagtaatgct

SEQ ID NO: 24771 - DNA, 1469 bp, Oryza sativa
  ref <308>: DATABASE ACCESSION NUMBER: AK100213
  ref <309>: DATABASE ENTRY DATE: 2002-08-28
ggccttcctcgtttcctccgcgccgcaccgcaccgcaccgtccctttcttcccccaaatccgatccgcgctaaaccagcgtcccttcccttcccaccatgtcccccgccgcccgccgcggcaatccgtccaggtccgcctccgccatcgtggccgacacggccaccgggtaccacctcctcaaggtcgatggctactccctcaccaaggccacccccaccggctcgtccctcacttccacccagttcaccgtcggcggccaccgctggcgcatcaaatactaccccaacggggactccgccgactccgcagactacatatcgatctacctcttgctagatgaaaaggccagcttagatttgaaggtggaggccaagtacctgattagtttcgctgaccaggtgaagacgcaaccttcgctgaaatacaggacagtaagaacttttcatcgtcagggttcttggacttggggctatgggaagttcatcaaaagggaagattttgagaagtccgaccatctcagggacgactctttcaccatccggtgcgacattctcgtcgtccacaagatccacaccaaggagacggcggagatcttacctgtcgaaacatttgtatctgtgccgccatccgacatgaaccagcagttcggcgacctgctggagaccgagaagggcgcggatgtggtgttagaggtcggcggccagacgttcgccgcgcaccggtgcgtgctcgcggcgcggtcgccggtcttcagagcggagctctacggcttgatgaaggaaggcgacactgctggagtcgtgtgcattgaagaaatggaggcgcaagtgttcaaggtgttgctccgctttctgtacactgactcgttgccggagatgaaggaggaggaagacgtcatgtgccagcatctgctcgtcgcggcggaccggtacaacctggagaggctcaagctgatctgcgaggagaagctgtgcaagtacattagcgtgggcacggtatctaacatcctggcgctggctgatcagcaccactgtgacgggctgaagaaagcgtgcttcaattttcttgggtcaccggcgaacctgagtgctgtcgtcgccggtgatggcttcaagcatctttccaagatttgcccctctcttatggaagagctggttgtcgtactggcacttccaggttccagctagtcatgcttagtgacctctagtgttcatgtgttattgcaatggctaatggtagatttttggtttctgaatctgaacctttgtcatcaggtagttggctactgttcttttatgcaggcatgcagctgaactccctgtgtttaggccttttatcatgtatatatgaaattatgactacatcatctatcctaagcagaaattagaaagtacttccacttcatatctgttttttttttttaatatctctgcagcttcattattcaatctcaaatggatttgcact

SEQ ID NO: 24772 - DNA, 1201 bp, Oryza sativa
  ref <308>: DATABASE ACCESSION NUMBER: AK100214
  ref <309>: DATABASE ENTRY DATE: 2002-08-28
gtgccatcgatcaccattaattcatctccatcgacaaagctagctaagcccagtcatggccgcctctcccgcaatgccgtcactcctcctcctcctcctcctagccgttctcgtctcggcggccgatgcctacgactccgccgccagcgccaacaccaacgccggcgccatccccgaccccaacatcttgaacatggaggccatgtgccccaagacgacggacgtgaaggcgtgccagcaactggtgaagaacatgccgtccaacatcgtcgcggggaagaaggacgccaggagcatcgcccgggggtgcatcgccaccgcctggttcgtggcgagggacggcgccaaggactgcaccgccgccgtggacgagtgcaaggacaaggtcgaccagtgcctcgacagctgccgccacgccttcgccgccgtgaacgacgccctggagccccagggcaccggcgacgacgccgtcaaggtccccgaggacgagaagctcctcgccatccacgccagcctcacgcagctgctccgcggccccaccggcacgcgccgcccgcccctctgcaacacctgctgccaggacggctcgtgcacggaggagaagaagcgcaacgtcgtcgcgctgttcgtgcaattgtggagcttgctggatttcgccgacgcggtgctcgaggacctgtatcctctgacgaagctgccaggggacaaggccgcgggatcagatacctctgcggcggcggccggatcaaccgccgacaaggagacctctgcggcggctggatcaaccgccgacacggcgacctctgcggcggccggatcaacctccgcaaaggagacatctccagtagccggatcaaccgccgataagacctatgcagcggccggatcagctcctcctgtcgtcgacactgcgcctgctcctcccgtgacaacttatgattaattacaaacattcggtatttcatattttggaggatgctataggaactttaaataactcttccaaaatttttaggacaccaacgaaaatccttacaaaattttgactaatcaacgtttctaaggagtttaacaaatttctatacgtgtagctttttcttacatatctgagtaggtgcattgctgagggcagggtgcgccttccgtggttgtcattcgaaattgtctttgtaacctcgtcaatttaatgaagtttagaacc

SEQ ID NO: 24773 - DNA, 2174 bp, Oryza sativa
  ref <308>: DATABASE ACCESSION NUMBER: AK100215
  ref <309>: DATABASE ENTRY DATE: 2002-08-28
gactaccgctagttccatccccttctccacttctccgaggcgattccccttctccaatccattcattccaccctcttccgatccccaaccgccgctggtccgtatccattccactctcctccgacccctaccgctgccggagtgctagggcatcacacgatgagtgttgcaactgaagcatgcccttcaccaaagctacacacaagactaaggctgtgggagtttgcagaccgttacgtatttgaaccagttgacggtcttgctgatttgttcctgtcagttgatcggcaaatggatcaatgagtctagtggaagagttgccacctcgtggtccctctacaaatcctaaagttagaatagtttttggtgtgattggagtgctcaaacttgcagttcggtcgtactttcttgtgatcactggccgtgattgtgttggatcctacttggggcatgcaattttcaaattgacgggactaaaagttctgccatgcaataactcgttaaatacttcttctgctgagcagaagaaaatggaatcagaattttcggaacttctggatgcagcagagaggactataggcctgtacttctcctatgatgtcaacttaacactaacttcacagaggctgcatgatctaggagatcagtttaagtcacttccactttggagacaggcagaaccaagatttctttggaacggttacttgttggagcctctaattgagaacaaactgcaccaatacttactaccagtcattcaaggaagttttcagagtatccatgcagaagttgggtcagagaaggtaaatgtgaccctgattgcacgtcggtgtacacgtaggataggtacccggatgtggaggcgaggagctgatccagagggttatgctgcaaattttgttgaatcagagcagataatgcaatcgaaagaatttacagcatcatatgtgcaagttcgaggttctatgccttttttgtgggaacaaattgttgatttgacatataaacctagttttgatgttgtcagagtagaggaggcgcctcgtgtacttgaacggcattttcatgatttacaaaagaaatatggagctgtcgtggctgttgatcttgtcaatacacatggtggcgaaggtcgcctgtatgaaagatatgcaaaatcaattgagcctatcttgagtgaagatataagatttgtgcattttgacttccatcaaatctgtggtcatattcactttgaacgcctttctcaactgtatgatcaaattgaggattatcttaagaagcataggtacttccttttaaatagtaaaggtgagaaaatggaagagcagaccggaaccgttagaacaaattgtgtcgattgtctggatcgtactaatgtaactcagagcatgatcgggagaaaaatattggaaagccaactgcaaaaaatcagtgttcttggtgacaacaatacaatcagcgattatccggcatttgatgcagattacaaagttttgtgggccaaccatggcgatgcaataagcactcagtactctggaactcctgccttgaagggagactttgtgcggtacggaaagcgaactacacagggaattttaaatgatctgtggaatgcaatggctagatattacctgaacaactttgcagatggtactaaacaggatgccatggatcttcttcaaggacatcacatatcctcagttagtcgggatatgccaactccaaccaaaggacttatagagaatcacgcgtccttccgccttgcttttgctctgcttttggctgccgtgatattcttgataatgtcactgagaagagcacgtaatgatgttttccatttggtgctgtcactactatggtctggtttttgctttggcatcacgcgttatgtcaaagctaacggacggaagttcacgaaccgtcctcgctttcacctatcgcgccattgatgcgaacaaaagggattatatacacactcatggtcgactcacctttctgggcatgcatgtgtgctctcagttttgtatcaagtttaactttccctctttgtaagattttgcacatgttctgaccatcacggctttatattttcttgttgaatgggaacatcaggaattgatttgttctattgcatttatttatttatttatttatttatataaacgttttgc

SEQ ID NO: 24774 - DNA, 1905 bp, Oryza sativa
  ref <308>: DATABASE ACCESSION NUMBER: AK100216
  ref <309>: DATABASE ENTRY DATE: 2002-08-28
ggctggattcgatgggcgctcggtgagatccgaatcccccacggtggtcgccggagatgaagccgccgcggaggtggatgtacgggcggggcggcgggaaggggaagccggcggggctgctgctgctgggggtgttcctctgcttgtcggtggtgctgctgctgctgctgcacggctcgtccccgtcgctggagggcgaggggaggaagcctgaggcggtggaggcggcggggggagggggagaggaggaggaggtggcggtggcgcgggcggaggtggaggaggcgccgctgccgccggggaacgcgcggctcgccttcctcttcatcgcccgcaaccgcctcccgctcgacctcgtctgggacgccttcttccgcggtgacaaggaagggagattctccatcttcgtgcactcgcggccggggttcgtgctcacccgcgccaccacccgatccggcttcttctacaatcggcaggtcaacaacagcgtccaggtggattggggggaggcgagcatgatcgaggctgagcgtgttctactcgcccacgcgctcaaggaccccttaaacgagcgcttcgtgttcgtctccgacagctgtgtgccattgtacaacttcaactacacttacgactacataatgtcttcgtcaaccagttttgttgacagttttgctgatacaaaagcgggtcggtataatcccagaatggacccaattatcccagtggaaaattggagaaaaggctcgcagtgggctgtgttaacaagaaaacatgctgaagttgtggttgaagatgaagaggttttgccagaattccagaagcattgcaggagaaggcccttaccagagttctggcgggactgggatcgtcctattcctgcggaggcatggaaggcacataactgcataccagatgagcactatgttcaaacattgcttgcacaacatggtcttgaagaagagcttacacggaggtcagttacacacagtgcgtgggatctatcatcttctaaagatcgtgaaaggcgtggatggcatcctgtaacatacaaaatctcagatgctactcctgcacttgtaaaatccataaaggatattgataatatatattatgagactgaaaatagaaaggagtggtgtacaagtaatggaaaaccagcaccttgcttcctttttgcaaggaagtttacacgagcagctggtctgaagcttcttgatttatctttgatagcagcaaatggcgcatctaccatgtaaagtttctccgtcaaaagcagaatactgccagcttgcacatacgtaaaggaaagtggtggaggggacagaagataacagcgaattttttttgggcatcttcattacaatttgttgcactctgaaaagggacataggtgttctaaagcaataaagtttgtttcttttagcacctaggttagtacatatgttaacccactacttagcattataactgtaactgtaagcaaccacctgcagttggattggcaagaatcacctcagttcttttcacgacaattcctttttcaaatttatagagaattggcatgtcttatacttgcatgcatactgtagtcattccatcgaaggcaatgcgtgatctggttacccaaacattaatcaagcatgttgaactcaggaactgcgtatttcacatggatttatactctcatagcagatctgccgatcaacatgcatgtttggcattctgttccatcagaaacatgggaccctagtgccgtggcaatggttatcccctacccttaggacctttggacttttgatggcctcaatttaaaactgtgctggctggagatgcagcgatggtgtagccaattcaatgattctcatcattgttgttcctccaattgatgtgttacttcttgtactc

SEQ ID NO: 24775 - DNA, 1506 bp, Oryza sativa
  ref <308>: DATABASE ACCESSION NUMBER: AK100217
  ref <309>: DATABASE ENTRY DATE: 2002-08-28
gacaagctcacagttcagttacgtacaacagcagaagtgagagagggagaagaagataagcgaagaggaggagcttagcttgccagccatggctaggcgctctccttgcctcactgccgccgtgctcctgcttggggcattggcggtggcgagcgctttagttgatgaagcggcggcagctggccagggactcggccatggcgcccgcttcatgagcaagcagggccgtgcgatgtacgagaagccgccagagctggagccgaagccgaagccaaagccaaagcctcatcctaagcatgaatcaaaaccggagccaaagccagaacctaagccggagccaaagccatacccagagccgaagccagagacgaaaccggagctaaagccagaaccaaaacctaatccagaacctaaacctgagcctaagcctgaaccaaaaccagaaccaaagccatacccagagccgaagccaaagcccaaaccggagccaaagccagaaccaaaacctgagcataaacctgaaccaaaaccagaaccagaaccaaagccatacccaaagccaaagccagagccaaaaccggggcccaaacccgagccgaagccagagcctaagccacacccagaaccgaaaccggagcccaaaccaaagccagtgccacaccctgaaccaaaaccggaaccaaagccggagcccaaaccacacccagaaccaaagcctgagccgaaacccgagcctaagctacacccgaagcctgagccaaagccacacccagagcctgagcctaagcttaaacctgaaccaaaaccagagccaaagccagagcctgaaccgaagcccgagccaaagcctgaaccaaaaccagagcctaaaccatatccaaagccaaaaccggaacctaaaccggtgccgaagccgaagcccattccacacccaggaccaaaaccaaagcctaaacctgacccaaagctagagcccaagccacacccggagccaaaaccacatccgatgcctgaacctgaaccaaagcctaagcccgaaccaaagccagagcctaaaccatacccagaaccaaagcctaaactgaaacctgaacctaagcctggaccgaaacctatagcaccgccgaacaagcacaagccgccgcacatgccaccagcgacaaaccagtgacggcgatcgctggagaccgagcatttgctggctgcacggttgaggcaccgacgacattatttcacccgaggaaggagcgctagcgagtcactacactgtaccgtttctggaataaagtgatgagctagctttctgcttgccttttcttttcctctcttattttccttttatttcatgttggtttttcggatgtgccactgctagctagtgtaattaaattatttattatgtgcctaccgtcatttttattaccgtgtctgtgacattctattgtctattggcattattctcattgtaaaatcttttggtaatattatttgtcatcatttttaccc

SEQ ID NO: 24776 - DNA, 2470 bp, Oryza sativa
  ref <308>: DATABASE ACCESSION NUMBER: AK100218
  ref <309>: DATABASE ENTRY DATE: 2002-08-28
gggcggcggagagagagagagagagagagagagagagagaatcgccatggcgtcgcgactcgtggcccggtcgaggagaggcctagcgctcgccctctcccgcgccggcgccggcgccccgtcgcggccctcccctcctggcctcggcaagactctggggtatgagccaacatcacatctccatggtgctcagtttttaccttgttggttttcaactattgcatctaatggatctcacatgcaaaaggcacaggagacatgtaagccagttgctggaatggaacactctgatgcactgaaagtaatggaaggaacctctcctaaagttgtggcattcagcccactagaagcagctatcactaaacctagaagcagtcccttgacaattgaaagttctaaagtaaagcgatcagagattgcaacgctagtcacattttacatgatcccttctctgcttgtttcctcaaaaaatgggcttgctacctctattttggttggcgcagtattccatcaaatatacatgtttcacaaggagatatttctggactatgtgcaccatgatatcaccaggaagtgggctttgatatacttcaagctgcttttgttgatcatggcgaaggaaaccattgtgtatttcaactttatctgagttttatctcttgcagagggacaatctatgtactcatccatacaccagaaaaaatgacggtggtggataaaattctggcgccttgttctcttcatggacattttcaacatttttccttctcaacttcatttgtatatgcacttgaaagaggatgattagtgatcaatgaagcaattagttcgacttcattcttgtttataataatagcaactgatatgaactgtttggtatttgctagcacgatgcagccatatggattttgttttccatgtatgaattatcatcttatgtgcatatatttctccttttggaggcttgagctgccattatttttttgcgaatccttcagactccagtcctacatgaatccagcgctatgctcctttttggaggttttgttactgcagagatgattgtgtgtttaactttattgattggtttgattgtttctgcagatgttacaaagattggccggttgcagtttgtttgaaatgctaggattcagaagtccctccagatgcttgcttcaaatatacttactactcagtaaatgataggagtactgctctgtaaatgcatgaaaaaacagtgatggagaaatctgatgcttgtgtacccaatgatgcaggatcagtcctccttggtgaacacgctggaatttcccaataatttgcagtatcccacaacattcagaaaaccaaattccttggaaattcacgacacaaggtaaagaacaaaaacccatgacgttttgctttgcaatttgcaggtagggctctgctgtccttgctgctgctgctggatttgaaagaaaaaaacctgtgtacgatgtacgtacgccggctgcatccttgtacagccatgttcatgtgagagcggaaaaaactgccttccagctcagctctgcagggctgaattgccgcctggatcctgcggccgccatgtttacccgggacggccggccggacggcggcgaccccatcggctgccacgcgcacatgcccggcgaccgacggccgccggtgctgactgtgaattgacatgaatgctgccactgcctgtgcctgcaatgtcccagcttgctttgcaggaggcagcagcagcagcagctagctgtggtagaatggctgcttctgtgaccgtctctgcattgcagagagatgcagtgagtgtgtgttgagtgactcctccagctgggagctccaggaattcacctccccacacacagtcacagtcacaaacacactcccagtgcattacctgtctgtctgcactgtgcatgcagtgaaacctctgaacattttcaccgtggcattctgaattctgatccggcaatcaatcaaccagcccttgcagttattagtgaagtgcagatgtatcatgtatctgtccagccatcaaatgctgcagtggagaacagggaactgaagggggttcttggatttggcttctttactttttcgctgattttatttttttttctctggcacctgcttttatttcttcagatctcatattatcatcaccatatgggtggttttgcaagagtggacctgaggttcttgcagcaatgcagccgcaggacccatagaaaggaccattgaaaactgtggcacaaaacatgcatagtgaaaatggcgcaggcattacagagaaaagtagtagatatgctagctataatttcaggattgtgcaattttgttgtcttccctggctatggagtacggagtatcatgttacaactcaccatgtctttacatatggttaacttcacttgtgactctctcttttaaataaaaatagaatgaccctttttctctt

SEQ ID NO: 24777 - DNA, 1653 bp, Oryza sativa
  ref <308>: DATABASE ACCESSION NUMBER: AK100219
  ref <309>: DATABASE ENTRY DATE: 2002-08-28
gtctccccactccagcagcacacgcgcgttcccccccaaattccaaaatctcgctagggtttccccctcctccgctctcacactgcctcgcctccccggatggacgagaccctagcctccctgcgccgcccgaagcgcgggcggccgccgcggccgcgggaggaccacttggccgccgaggacttcgaggaggagggggaggatgaggaggccgaggcggaggcgctcgcgcggccccagacgaagcgcaagcgcgcggccagcgccgcggccgcggccgcgctggaggaccaaaccctcatcgatattattaaacataatggcaggcttatcagccatgctgtcaaaaaattggtcgaggattatgaatcagatccaaaatctgtgatgtttcagatattagcgatgctatttgaggcttgtggagctaggcataacttttatgcagactacctgtatgaggcagatgtggatggtgttgtgttttcccttgtcgagctagcaaaaaagggaatggttgaagataattacaacaccaaacagaaggatctcaagaacttcaaagaaaatcttgtttccttttgggataccttggtccatgagtgtcagaatggccctttatttgatggtagcttattccaaaaaatcaaagactatgtggttgctttgtcatgtactcctccaagggtttatcgccaagtagcttcattggttgggctccagcttgtgacgtccttaatatctgttgctaagactctcagtggacagcgtgagaccactcaaagacagttgaatgcagagaagaagaagcagactgatggaccgattgttgaatctctaaacaaaaagctagctcatactcacaaaagcattacttacttggaggaactaatgcggaaaatattcagtgggttattcatgcaccgctatcgtgatgttgaccctgagatccggatgtcgtgcataaaatcacttggtatttgggttgtctcgtacccatcacttttcttacaagatatatacctgaagtatctaggatggacacttaatgacaagaatgctggggttagaagaacttctattcttgccttgcaaagcctgtatgaagtggatgaaaacataccttctcttggtctctttactgagagattttacagcaggatgatccagcttgcagatgatgttgatatttcagtagctgtgtcagctatcggactcatcaagcagttactgaggcatcaacttttgagcgatgatgatttaggtccactatatgatttgcttattgatgagcctccgctgatcaggcgtgcaattggggaattggtttatgatcatctgatagcacaaaacatcaaaacctcccagtctggagcaagagatggaaacaatgattcatcagaggttcatattggtcgaatgctgcaaatcctgagggaattttcagatgacccagtcctgagctcttatgtcattgatgatatttgggatgacatgaaggctatgaaagattggaagtgtataatctccatgcttctggatgaaaatccattaaccgagcttactgacatggatggaaccaatctagttcggatgctgcgagcctctgcaaagaaggctgttggggaaaggatagttcctgcaacagacaat

SEQ ID NO: 24778 - DNA, 1409 bp, Oryza sativa
  ref <308>: DATABASE ACCESSION NUMBER: AK100220
  ref <309>: DATABASE ENTRY DATE: 2002-08-28
gtctctcgcacaggcggcggcgcgcgcggccggagggtggtgcggccggcgacggcaactccccggtggcggcgcgcgggctcagggcgccgcgagctcgccggcctcctcgtccccctcgtgcggtcggtgatggcggacgagcgacgagaagcaggcggtgcgacgcccccgccgcgtacagtggcgcggtgaccgtggccgccatcgcctatcagaggagacctccgctcgcgcccggagccgccgacgacgatgaggccgagcggcgtggagtcgtcggcgccgccgctccccatccgcagccgcgctcacctgccgccgccgagcttgttgtcccgtgtctccgccgtcgcgtcaccgcccagcatgaacctcacactcgcgctcgcgttcgccgggtggggagccggccggtcgatctcctctccgccgctccttccccgtcggccgcgccgcccggagatcctcggcgtcgaggcggccgcggcggagacggcctcccgctcccgctgccgccgcggctccttgctggctgcaagacgacgacggatgatgcgacggcgcggcgccgtcgaatcctctgagcagctagtcgattccttcacgcaccgcagcgtggtgtggaacgcggcggcgtcagggacaagccgcaggatcttgtcggccacgcggacgccgttgaggctgcgcaccgtggcgaggtcaaggccgcgcccgtcgccgccgccttgctcccctgctcccgcgttgtcgccgccgacaccttgctcccctggtcgcatggccaccgcacctacaacctcctggacgacggccatgacaccgtccaggccaacgtcgagctcggcctcgctgtcgactcccgcgagtacggcatcggcgcccaggtagcaaagttcgtcgggctcaagggctacaggctcgccgtcgtcggcagggttccgggctccccgcgcctccgccgtgcttccccactacggccgccgccgccgctgtcgccgtcgtggtgccgccctcctcctctcctgctcgccccggctagctttgcagataagtgagagagagagatgaggaagggagaggaagggaaagagaagagagagaggaggctgacgtggtctccatgacatgtggggcccacgtgggtcccacgctgagtcagccaccacgtgggacaaaaccggggtgaaaaccgccgagggaccttttatgaccggttttgtaagttgggggatgccggatgtccggttttgcggtttagtgacgattttgtatctcgatgacaagttgagggaccttgcgtgtacttttcccttgtgctataggtgtctcattgaaaaaggttgccttcacattgatttagatcgtcaagacctcagcgccaacctatttggcgctgagctatg

SEQ ID NO: 24779 - DNA, 999 bp, Oryza sativa
  ref <308>: DATABASE ACCESSION NUMBER: AK100221
  ref <309>: DATABASE ENTRY DATE: 2002-08-28
gggcggccaatgcgaatttctccatctcctcagcctcaggctcaggctgcactgaaggcagagacgcgatggccaagctccaccagtggccagtactcctcctcgccgccgtcatcgtcctcgccgcctcgttcgcggtgccggcctctgcggcgcggcggcgggcggtgcggctgcacttgtacatgcacgacatcgccggggagacggccgtgcaggtggtgaagggcacggggcctctgcatccgtcaatgccgccgggaaacaggcacttcggcgacacgacggtgatggacgacctcctcaccgagggccccagcctcgactccaaccccgtcggccgcgcccagggctcctacgtcctcgccggcctcgtcgaccccgtcgtcgtggtcaccgccaccttcaagctcacccacgggccctacaacgggagcaccctcgtcatcgccggccgcgacgaggtccttgcggaggtgagggagctggcggtggtcggcgggacggggaagctccggcgagcgtccgggcacgtgctgtggaggacgctagaggtgttggagggggcgcactatgtgctggagctggacgtgtacgcctcactgcccgctactgctgctgctgctgcatctgctcttgctcttgctaccaattaaacgtcaccctcacccctcctcctcatgctgcagcctgcagttgggaatggagaggaagattaatagtatgatgacttgagagaaggaccatatatacctctgaatctctgatgatgggaaattaagagttacaggatcacgtctcgtcgactacctatggcgtgactcatcgtcacatgctcatagtggctaactggctatggatactactactacaataatccatttggccacacaatttgtcacaatgcccttaatcattgtgcttttcaataattaacatatttcatgttatgaataataccatccatatataaactgcactacgtctcagcgtcgatcc

SEQ ID NO: 24780 - DNA, 1809 bp, Oryza sativa
  ref <308>: DATABASE ACCESSION NUMBER: AK100222
  ref <309>: DATABASE ENTRY DATE: 2002-08-28
gttacatatctctcccttgcttgctttgctcctggatatatagctagcttctttctttcttcctctctccctgtgtggcacgcgcctccaatcgatctcttcggtgagtagacgcatcgagatcggggggaaatgtcggtccagtttacatcggagcatgtttgctatgtcaactgcaactattgcaacactatccttgtggtgaatgtgccaaacaattgttcctacaacattgtgactgttagatgtgggcattgcacaatggtgctctccatggatcttgctccttttcaccaagcacgcactgttcaagatcaccaggtttaaaaactgaaataatggtttgaaatttcagttcaaaactgtagccgaagaatctcttgcatatatatcagctatatcttattttttatgaaacaaaacaaatgaaatattaatttctgtacgtatgtaaaaaaaagaattaatattaattatttactacgtacagtggaatggtcacatctaaatttgtttatttaggtacagaacagaggatttcaaggtaataactttggaagctatgacatagcttccagaaatcagaggacatcgacagccatgtacccaatgccaaccagtcagcagcaagtgtcacctatacgtcgtatgcacaattaattttctcatgattttatttcattgatctactaaattatggggtttattttttatttctctatataagcatgcatgcaaaatgggtatatataatatagttaaaggttatatttactgttctaggcttctaatgtataatcaaaatatattatagtaatcaagttcatgcatgagctatatatgaacctgatcacactgaattccagtaaacattagttttttccccgtatacgcatggagctgtgttagatttcccaaatgatcaatctataggtattaacacacacacacacacacacacacacatacatacacacacacacaatacatatattatcagcttgcataatttattaaattgccttgttcttctgtattcacattatagctagttttatgtattatatatatgcttgtataatagatttaaaatattggtccttttttcttctttacagcccctgagaaaagacagcgtgtcccatctgcatacaacagattcatcaaggaggagatacagaggattaaaaccagcaatcctgagattagccacagggaggcattcagtgctgctgcaaagaactgggctcatcttccccggctccatttggcctcagcgtcgccgacggcggcggcggcggcggcagcaactaatcgcggcggcgcggcctgccggccggccaccgatcgccggcgtgcacgccggcgcgcggcggcggccggtcgagaatgcgcgcgcaggagggacgacgacgatatattattatcgcgtgtgcccctctctcttcgccgcgtaattaattaatcagttaattaattacgtacgacctactgtgttatgctatcgatccgtgttaattaattacctacgtatcttgattaattagtctcgtattatacgtactattatacgtacgtgctgtgctatgtacgtagacaacaaaaaaaaatgtgcgtgatgagttctactacgtacgtacgtactgtgttctagtgttttaatttgtatccgaaccaaggagttgtttaattaactgcatgcacatgcactggacttgaatctggagtattatgtaagtgtgcatgcatgctggattatgcaaaataaacgaattaatgaatagaactgtttttgttaattaattaatt

SEQ ID NO: 24781 - DNA, 1245 bp, Oryza sativa
  ref <308>: DATABASE ACCESSION NUMBER: AK100223
  ref <309>: DATABASE ENTRY DATE: 2002-08-28
gaggcgtaaaagaaagaaaacctcccgtctctcgtctcctccgccgccaagacgagtcgcggctgaacaggggaggggcgccgcaatctccatctggcgagcagagcaggggaggggaggggaggggatcctgagctgctatcccctcccctgcccatgctggttgttactaaacctggtcaactcccagttgagtttcttgaaccctctgctgcccagaaactggtgattggatttgattgtgaaggcgtagacctttgccgccatggtgctctctgtatcatgcagattgcatttcctgacgctgtttacttagttgatgctattgagggtgggaaagaacttattgaagcttgcaaaccagcacttgaatcagaatatgtcaccaaagttattcatgactgcaaaagggacagtgaggctctgtatttccagtttggcataaaattgcataatgtgatggatacacagatcgcttattctctgttagaggagcaggaagggaaaaagagaggatacgatgagtacatatcttttgtcagcctccttgctgatccccgatattgtggaatggcatatcctgaaaaggaagaagtccgtacccttctaaggcaggaccctaacttttggacgcataggcctttatctgaaatgatgattcgagcagccacagatgatgtccgcttccttctcagtatacatgagaaaatgatggagaagttaagcaaagtatctttatggcgtctgtcagttcgcagtgagctatactgcaggtgcttttgcataaatgacaacaagtatgcggattggccacctcttccaactgtccctgatgaaattgaacctgatgtttatgttcctgaggtggatatcctgtcagtcttggatgtgcctcctggcaaaatggggcgtgttattggcagaaaaggatcatcaataatggaagtgaaagcatcttgcaatgttgaaatccatattggtggtgcaaagggacctccagacagggtattcatcattggaccagtgcaggaagtcagaaaagctgaggctatcctccgaggccgcatgctggagttctagagcaacaaccttttgtgataccccggcttcaaactgctctcctcaatatgtcagtcttgtgtgcacaaaagggatatacagaaatgcatgtggtactgggtgcctccaggatctctgatcctagacatgataaaacagaataaaaagaattgaaaggttacctcc

SEQ ID NO: 24782 - DNA, 2490 bp, Oryza sativa
  ref <308>: DATABASE ACCESSION NUMBER: AK100224
  ref <309>: DATABASE ENTRY DATE: 2002-08-28
gatttcccctccctctctctctgaatttctttctccccaaaccaaaaccaaaccgaagcttccccatctcgcgtgaacttcggagcaaggaagaacaaggcgccgcgccggatttagccccgcccccctctccggggtatcccccctcctctcctctgggtttgattggagtgaggtgaatcggtgaggttgtggctcggttggcgtccggatcggagggggttcgggcccttcctgattaatccctcttctgattccgtgtgggggattcaatcactggtgggcaaaggcgagatatttcgtcacttctccccctcatctaaccatgtctggtttgatgtgcctggagatcaagatgggattgtaaccacgctggttatctcgcgatcgcagagggtttcctccatcctctaaggaaggaaaggaacccttgccctttcttctccatggcttctaattcgtagtgtgaaggatctgatttttaggttagtgtaaatagtagcagtagttgaggaagcttcggcatcctaaggacctcctgtgaagatgtcgtctgctgccattgccattagcccgatggtggaagagtttgctctcctgcccatctgcttcgacggcagccggtcgccccactgtttgtccgggtcacagctgcaggattcgattatcatctttcttgctgtgcctggtgccccaccgatgccgatgagtgtgctcggctcggagtccatcgcctcggtcaagctgcgcattcagcggttcaaggggttcgtggttaacaagcagaggcttgtgcttgatgggcacgagctggcaaggaacaactgccatgtgaaggattatgggcttgccgatggaaatgttctgcaccttgttatccgcttggctgatcttcgcttgattaacatcgagactaccagtggaaagaagtttcagttccaggtggaccagagccgcaatgtcaagtatctcaagagtaagctggcagtggagggagatgaggaccttggtgaggatcacaagcttgaatgtgatggcaaggagcttgaggaccaccagctgattgctgatattagcaagaaggatgatgctgtgatccatttgttcatccgcaagccagcaaagttacggacacagcaagttgataaagacacggtggttacagttgtcactccgcaggagaaagagaaccttcaaaatgaagctcatgctgtgaaccctgctaaaccagctggtgctaggcctgctcttgttgaaccaattatcgttaaccacaaggtgaagctatcacttgaagtgatgagaatgattagctcagccatagctggtcttgagaatggatacttgccagtgatgacagctgaaggttcagggggtgtttacttcatgcaagatgcatcaggagagaagaatattgcagtgtttaagcccagagatgaggaacctatggctaaaaacaacccaagagggcttccagtgtcgactgatggagaaggcatgaagagggggacgcttgtaggggaaggtgcatttagggaagttgctgcttatattcttgaccatccaattggtgatcatgaatctgaagaacgtatcgggttctctggtgtgcctcccacagcattggtccggagcttacacagggggaagagcttcaagattggatcactgcagatgttcattcagaacaatggaagttgtgaggatatgggtccccgagcatttccagtgaaggaggtccacaaaatagcagtgttagatcttaggttagcaaacgctgatcgtcatgcagggaacattttagtgtgcaaggatgaagaaggtggcaattacaagttggttccaattgatcatggttactgcttgccagggaagtttgaagattgtacctttgagtggctgtactggccccaggctcgtgaaccattcagtgatgaaaccattgcatacatcaaatcactagacgctgaagaggacatcaagcttctcaagttccatgggtgggagctgtctgcaagatgtgctcgtgtcctgtgcatcagcaccatgcttttaaagaaaggtgcagcacgaggcctcacaccgtatgacatcgggcgtatactgtgcagggaaactgtgaatagagactctgagattgaggacatcgtccaggaagccgagggccatgttctcccagggtcaagtgaagtaatcttcttagaaaccgtatctgaaatcatagaccgtcacctcgacaagaagttcgcttagaaacccagaataactgatctagttgttcagctgtatccagtcagtttggtgtaagtatgttgacaagccactcttcaatggactaaatgatttcatttgtttgtagcatctcaaaccttcaagtgcattacctacatacattttgtgaatatgtaagcatgtgttgtgtgttggtcgtgcgcatcatcagcatggtactgtctgagagacgaaataaaatgttgatttagtgctgtt

SEQ ID NO: 24783 - DNA, 1436 bp, Oryza sativa
  ref <308>: DATABASE ACCESSION NUMBER: AK100225
  ref <309>: DATABASE ENTRY DATE: 2002-08-28
gagccggggggagctgctgaggactgaggtaggggaaagaagagaagagaagcaagcaacaccaacagcaacacgcaaggagtggaggactcttcaaggtctggagagtggagaggaagaggaatcctcctcagtcctcaccttcagatttcagaacacaggcaatcggccctagctgcaatccaacaagatgggcatgcctctgctgctgctgctgctgatcctcgtcgctgctggcccccaggcaggcagagctgcaaagccaatcccaaatctccagctcatgaccaaggagggcggcagttcaagaatcatccaggacgacatcataaaggcaatcaacaagcatcccaatgctggctggacggctgcacggaatccatactttgcaaactatactactgcgcaattcaaacatatccttggagtgaagccaacaccgcatagtgtgctaaatgatgtccctgtcaaaacttatccaagatcgctgatgcttccaaaggagtttgatgccaggtctgcatggtcacagtgtaacacaattgggaccatacttgatcagggtcactgtggctcgtgttgggcatttggtgctgtggagtgtctccaggatcgtttctgcattcatttcaacatgaacatttcgctatctgtcaatgacctagtggcatgctgcggtttcatgtgcggcgatggttgtgatggaggctatcctatcatggcatggcgctactttgttcggaatggtgttgttaccgatgagtgcgatccatactttgatcaggtcggttgtaagcatccaggatgcgaacctgcttatcctacgccagtgtgcgagaagaaatgcaaggtgcagaaccaagtttggctggaaaagaagcatttcagtgtcaatgcatacagagtaaattctgatccacatgacataatggcagaggtctaccaaaatggccctgtagaagttgctttcaccgtttatgaggattttgcacactacaaatcaggagtatacaagcacatcacaggtggcatgatgggtggtcatgctgtcaagttgattggatggggaaccacggatgctggcgaggattactggctgcttgcaaaccagtggaacagaggatggggcgatgatgggtacttcaagatcataaggggcacaaacgaatgtggcatcgaagaagatgttgttgctggtatgccctcgacgaagaacatggtgaggaactatgatagcgccttcggagtcggaacggccatagtttgactttaatcaatgttaatggcctcaaatacggttgggatcatgtaaatttgtcctgggtgatttctggattttgcacacacgggcaggcttctcgagactgatcggagtttaggctacttgtccagaaacacattggaataatatctgaataatagatgtattctctctc

SEQ ID NO: 24784 - DNA, 1120 bp, Oryza sativa
  ref <308>: DATABASE ACCESSION NUMBER: AK100226
  ref <309>: DATABASE ENTRY DATE: 2002-08-28
tctcccccctcttcgcctgagtcgagtcgcctcccccaccgccggccaaccatgctgccgccggccgcccgcctcgcggcccgccgcctcctagggctcgcgacctcctccgcctcggaatcggccgcggcgcgacgcttgtcccgttctccgatctcctacgccgccgcgggctgctcctccaggctgttctccacggcgcttaactaccacctcgattcgccggaaaacaaccccgacatgccgtgggagttcacggaggccaacatgaagaaggttaatgagatattgtctcactatccaagcaactacaagcagtctggtattattccaatgcttgatcttgcccagcagcagcatggtggatgggtgccagttgcagcaatgaatgctattgctaagatcgttgaagttgcaccaatcagagtatatgaagttgctacattttacacaatgtttaaccggactaaggtgggtaaatatcaccttttggtgtgtggaaccacaccttgcatgattcgtggttcacgtgaaattgaagaagccttgttagaacatcttggagttaaacggaatgaggtgaccagtgatggtttattttctgttggagaaatggagtgcatgggctgctgtgtgaatgctcccatgattgctgtggccgattattctaaaggttcagagggttacacatacaactattatgaggacctcactcctaaacgagttgttgagatcgtcgagatgctgaaaagaggagaaacccctcctcgcggcacacaacacccagagcggaaaaactgtggccctgctggaaggaataccaccttgcacggtgagccgaaacctcctccgtgcagggatctagatgcttgctaggtttgctttgaattacaggcacacaaataagttgggccacactatgattatatggtgtggaaactggaacaaagcaaggcgatgtgttgtttgtattttgatcttgttttgtttacctctgcccgcatcttttttctctccttttgcaccatcagagaaatggtacattgataatgacgatatgttattttgtcagctgacatgaggcggcagtggtaaaaagatttgtattcgtctttcggcg

SEQ ID NO: 24785 - DNA, 1284 bp, Oryza sativa
  ref <308>: DATABASE ACCESSION NUMBER: AK100227
  ref <309>: DATABASE ENTRY DATE: 2002-08-28
gaattaagccacagcttgagcagatcagctgcaggccggccggtgtgcgtgtgtgacagtaggagagagagctagcgagagagagcaaggaatcggaattgatttcatgcactgatcgatccatccatcatgcagatgctgcatggatgagaagagctagcagctaagctttgctgaagaaaattcttcagaggtttgtgttgatttgctggtctgctagagatcgatctagagagagagagaggaagggaagactgaagagagatctcgagcgggagatcgagatggggcgaggcaaggtggtgcttcagcggatcgagaacaagatcagccggcaggtgacgttcgccaagcggcggaacggcctgctcaagaaggcctacgagctctccatcctctgcgacgccgaggtcgccctcgtcctcttctcccacgccggccgcctctaccagttctcctcctcatccaacatgcttaagacgcttgagagataccagaggtacatttatgcttcgcaagatgctgccgcaccaactagcgatgagatgcagaacaactatcaggaataggtgaacttgaaggcacatgttgagattctgcaacaatcacaaaggaaccttctaggtgaggatttagctccactggctacaaatgaacttgagcagcttgagagtcaagtagtcagaaccttgaagcaaatcagatcaagaaagactcaggtactacttgatgaactctgcgacctaaagagaaaggaacaaatgctacaagatgcaaacagggtcctgaaaaggaagcttgacgagatcgacgtagaggcagctcccccacagcctccatggaacggaaactgcagcaatggccatggcggcggcggcggcgtgttttccagtgagcctccccaaccagagcacttcttccaggccctcgggcttcatgccgtggacgtgaaccagccgccggcgccgccaccgggcggttatcctcctgagtggatggcctagctagctagctagctaccgtttcagcttcagttaatcagggtcaagtatcagctgagtttggccatatgtatggattctatatgttgcttcagaagttcctctctccttcctcttcaatttgttgctaattaagtgcttgccaaacttttctcagtgtaatgtactactactatgtatagttttgtcttgtatgaacagtttgtgagtactgtcactgcgagtaaggtgcgtgatatggtaccgtgaaaacaaaagcgggacaaccatcctttttgcgttt

SEQ ID NO: 24786 - DNA, 2280 bp, Oryza sativa
  ref <308>: DATABASE ACCESSION NUMBER: AK100228
  ref <309>: DATABASE ENTRY DATE: 2002-08-28
gagcataattggccccccctccgcggcctccgctcacctctcctcctcctcgcgatttccacccgcaccgccgcctgcgccgatctctccattcccgcgaccaccgccgcccgccgcccgccgcatctggccaccacctatgccccccgtcaggtccgcccccgggaggcgggcgccggaattccggcgctcgtcggcggcggctgccggagtggatctggtggctcgtcgggatcttcctcgtcctcggcctcatgctcttcgtcctgcaccacaaccagagggagcatttccgcccgcccgtagtcgataagggttcagaatttgaggaaacccatcatgagaaagtaaatttcacagaagagcttttaagcagtacatcatttgcacgccaattgacagatcaaatgactctagcaaaggcttatgttgtccttgcaaaagagcatggcaaccttcagcttgcatgggagcttagttcacagataaggaattgtcaaagattgctatctgaagaagctgttagtgggaaggccatcactaaagaagaagcccatccaataataactcggcttgcacggttaatatacaaagcacaggactctcattatgatatcagcacaacaattgtaacactgaagagccttgtcaatgcacttgaggagcgtgcaaaggcagcagttgttcagactgctgagtttggtcagttagctgcagagtccgtccccaagaatttgcactgtttaactgttaaactgacggtagagtggcttcagaacccaaaacataggggtcgctcagaagaacatcggaactccacacgattggtagacaataatctgtaccattttgccatattctctgataatgttcttgccacatcagttgttgtcaattctacagtctcaaatgcaaaccaccctcaacagcttgtatttcatgtggtcacagacagggtccactttggggctatgtcaacttggttcctcataaatgacttcaaagggtgcactgttgaagtccgctgcatagatgagttcacatggttgaatgctgctgcttctcctctggttaggcagctatctgagatggaaactcagggtttctactatggtgattctaaaaatcttgaaagagaaataaagttccataatcccaagtttgtttctctgttgaaccatttgcggttctacattcctcaaatactacctaatttggagaaggtggtttttctcgatgatgatgttgtggtacagaaggacttgacacagctattttcgatagagttgcacggtaatgttattggagcagtggagacttgtttagagtcatttcatcggtatcacaagtatcttaatttctcccacccaattatcagctccaaaattgatccgcatacttgtgggtgggcttttgggatgaacatctttgacttaatagcctggaggaaggcaaatgccacagcactttatcattattggcaagagcaaaatgctgatctattgctctggaggacagggacacttcctgcaggccttttgacgttctatggcctgatggaacccctagatcgcagatggcatgtcttggggctaggatatgatgttgacatagatgatcgtttgattgagagtgccgctgtcgtgcactacaatgggaatatgaaaccatggctgaagttagccattcgtcggtacaagtatatatgggagcggtatgtcaatttcacacacccatatgttagagagtgtttgttgcattagaaagtctgcaatcactgttcaccatgaatgtgtcatgccattgaagctaggcgcttcggtttcttacatggagttgctttttggcaccttgtttaagaaatccttcggagaggtagattatatactcaagagacagcatcaaagaagccaactgttaaaatttctttttgggtgggggacttgggggagattcattttgagatgaaaataattcctttgcagatttttacatacaatttggactggaaattttagcagtctaaccagatcatctggatagatattgtaaaagagatataggtgttggatcgatggggtcaatttttgagatgtaggaaatgccaattgccgattcagctgttcagagttgctggtgttacattctttccagaacattgtgttttatactggtgaagaagcttctccttttctctttgtataaacagctctgtattcttcatacagtatgaactcagctcatttgataaaaggaaatcaaaatcattttgatgtgctg

SEQ ID NO: 24787 - DNA, 898 bp, Oryza sativa
  ref <308>: DATABASE ACCESSION NUMBER: AK100229
  ref <309>: DATABASE ENTRY DATE: 2002-08-28
aacgagtattatcgcggcggcggtcgtaaaataatgaaaagtaaataaaaaacgaagaaaacgaatacgttaaaatcgttgcgtatgaaaatgatgagtataaaaaacgcgatataaaagaattaaagcgaagtaataaaagaaaaagctttaaaatactaccgaaatcacgctaacccgtcggccgtcggcgctcgttaagttttagttctgtcggcgtacgctgccgcgcgtggggccgcgtcgccggagtcgtgtcggtagcgtcgcgcgcgcatgtcgcgtccgagcgtgcggagtcttaggcgacgaccgtaatcgcgacctggctcgcgttactagcttcgatgataggacgctaactctccgatatcctgaactcgccggcgctaatttggctctttggaggagtaagaaataacttggtagtgctctctctaattcgttgaggtagaatatagggtaatgctagtgagtttaagtgacttgttatggttgagaaacttctttcttgagttaaagttgttaatgaatatctttatgaagttgtggtgtgataataagctggttattactactgttactaacctagttcagcatgaacgaacaaaactatgtggagatagatcgtttttttatcaaggaaaaactagatgaagggattttgaagataggtttagttatgacgggggaacaagtagctgactgtttaacaaaagctttaagtgttggggagtgtacttcatcgtgtaacaagatgggcatgatagatatctatcgcccatcttgagggggagtgttgagttatgtatgtgttggcacatgaggcccatatactactcatatgtaaatgtatataacagagttagagaaatgaaaaaagtagtgaagcttctag

SEQ ID NO: 24788 - DNA, 2534 bp, Oryza sativa
  ref <308>: DATABASE ACCESSION NUMBER: AK100230
  ref <309>: DATABASE ENTRY DATE: 2002-08-28
ggggagaggagtggaggtagaggggatcaactccggtcggcggcgggatgtcgatgtcggggtcggacttcggcgccccgtgcgacgaccccaagatcttccgcaacatctgccgggatcgtatactcaaggacttgctgcagccggacaaagataaggagaccaaaagctcatggaaggttcttatcatggacaaatttacggtgaggatcatggcttatgcctgcaagatggcagaaattaccgatgcaggaatctcgttggttgaagatcttttcaagcgaagggagcccatgccttccatggatgcaatctacttcctccagccactgaaagaaaatgtcataatgcttctatctgacatgtctgggagatgtccactgtacaggaaggcatacatattctttagttcaccgattcctaaggagctggtctcttacataaagaacgacagcagtgtgataccacgtattggtgcactaagagagatgaatttggagttctttgcaattgacatgcagggattcacaactgaccatgacatggcattcactgatttatatagtgctcagcacaactcgaaaaagttcaatgacactataagcactatggctactcgcattgctaccacatttgcttcgttgaaggaatttccttgtgtgcggtatcgtgccccaaagggcacagatccaatgacaacaccaaaatttgacatggttccaaaatggttagcgactgctgtttgggatattgtgtcaaaatataaatcaacaatacctgaatttccccagaaggagacatgtgaactgctcattgtcgacaggcctatagatcagatagcacctgttattcatgaatggacctatgatgcaatgtgccatgatctacttgaaatggatggccaaaaatacatatatgaggtgtcgaaagcgggatcagaacctgagagaaaggaggctttattggaggatcatgatcctctctgggttgagcttcgccacattcacatagctgatgctagtgagaggttgtatgataagatgaataactttgtttcaaagaataaagcagctcaacttcattcaagagatggtggtgaaatttctacaaaggatctgcagaagatcgttcaagctttgccacaatacggtgaacaagttgagaaattgaccctccatatagagattgctggaaaaatcaacaagtttatcagagagtatggtctccgtgacattgggcaggtggagcaggatctagtttttggagatgcagcagccaaggaggtgatcagtatcctcaggtcaaagcaggatatgagcccagaaaacaaattgaggttgcttattatatatgcaattgtatatccagagaagtttgaaggtgacaaaggggaaaagttgatgcagctagcaaaactgccacatgatgagatggatgccataaatagtttaagatacttggttggttcagatacaaaaaaggcatcacggcctggcggcttctctctcaaatttgatgcacaaaagaaaaaaaatgctgcgaggacagaacggcaggatggcgatgaaacctgggcattatcacgttttttcccacttatagaggagttgattgagaaactgagcaaaggtgcattacctttgaatgaatacccatccatgagtgaacccagttccactgaacaaggatctacacaaagtgcagccgcgactaaaccagcacaagcacaacccatgtccaggagatcgcggcggacaccaacctgggctaagtctcgaaactctgatgatagtcaatcaagtgactcctcggtcttgagacatggatctaatgacttcaagaggctaggcaaccgaatttttgtcttcatgattggtggagccactagatcggaactgcggacggtgcacaagcttactatgaaactgaagcgcgaaattgtcctgggatcttctagcatagatgaccctccacaatttatttcgaagctgaagatgctaactgcaggtggtgccaatgacgtctaaacttcgcacttagtttgcaaatcaaccgatgaaacaaacttgtcaccttttggtaagaaacccattgctacgaacagttagaaacgttggatgtcatcaatgactggactactcacaataattacacgattttttcatagtctagtatatataccaagtgagaagaagtgtcaaatgtacttaaaacatgtatgtagacaacatattttgcccacattatttattcttctttcagatgtaaaacgtagaacagttgcgacagttgttttgcccaaatttgtatatttatgaacactacaacaatgacatggtgacgattacactcatggatcaatcgattccgataattcgtcgtgaaatcgagttatttatggcgatgtggaaaatggttatagaggtgcgaatgtgcgactttataggctagttatagatgtaagttcaatgtgtatcgtatctgtcgagtttgtatagttttttttttaaccgagctatgaaatttaataattc

SEQ ID NO: 24789 - DNA, 1608 bp, Oryza sativa
  ref <308>: DATABASE ACCESSION NUMBER: AK100231
  ref <309>: DATABASE ENTRY DATE: 2002-08-28
gtatcggcctctgacttccctacgttctcctctctctctcggcttccactcccgtctcctcgtctcctcgcgtgttcgcccgccgccctgcgccgaccagcgcagccgcagcggcgccggcgtcctgctgcttccgcccgcatcctcgccggtaagaggcagaatcacttcgttaggcaaggatgagcaaaggcccagctccgttcctcaacattgggaagagagcaaaagatcttttgtacaaggactacaattttgaccaaaagttttctttaacgacaactagcaattctggtttgggtctaacagccaccggtgtgaagatagacgaactcttcatcggtgacatacagacacaacataaaagtggcaaaaccactgttgatgtcaagattgatagtgaatctagagtgtcaaccacagtcactgttgatgaagcccttactggtctgaagacttcttttagcttcagggttcctgatcaaaagtccgggaagcttgatttgcaataccttcatgaccattttgcactgaattctaccattggtttgacatcaacgcctttaattgagctggcagcaactatcggcacgaatgaacttagtgctggtgctgaggttggattcgacagcacttcagcttctgttactaagtacaactcagggatctgctataacaaacatgatttttctgctgccgtactattggctgataaaggggagactttaaaagcttcttatatccacacgttcaatgaaaccaatggagctacagtggcggctgaagtaacgcacaagttaaaaacaaaagagaactatttcaccatcgggagctctcatgctattgattcttcgacgttgctgaagacaagatttagcaatggtggcaaagttggagttctctgtcagcatgagtggaggcccaagtctactgtaagtatttctgccgagtatgatcccaaagtggtgagttcgccttcaagattcggcgtggcatagccttgaagccttgattatcacctcctgtacaagtgttagatacttcttgcccgtgtgcatcctagccatacttacgaaagctccaccattttatgcccgttttgtaagtgtcttggccgaagaaacgttgttgtcttggagttggtcttagttttgtggaaccctaccaccagccgacttcatcccgagaattgaaaatacagagagttttgtactggaaacaatagatttactgttttgctgcttcagaaactattcggtgtcgattgtacaccttgaagagccccccttgaagaagaatatcagggtaagtgactaagtgccacgttggtttgttgctgagccaaatgggagttggaaatgattcgatatctgcattattctgtgatgcagttttggttggcttgttgctgagccaaatgggagttagaaatgatttgatatctgtttttttatgcagttttggcatgctgatgtgcccttttttttcaattgtttgcagtgtaccatatggtcatttcaattgtttcaagagagtacactatttagacattgtactaacaatgttttgttctgatgctcatcaccgctaaatatagttaatctctcc

SEQ ID NO: 24790 - DNA, 1566 bp, Oryza sativa
  ref <308>: DATABASE ACCESSION NUMBER: AK100232
  ref <309>: DATABASE ENTRY DATE: 2002-08-28
ggtgagagaagaaaaaacgctagaaaaaaaaaatcatccatcgccgcttgcgactccgagcggcgccaccgccgccaccaccgccgtctgccaccgccaccgccgccgtctgccaccgcgccgccgccgccgccctctgctgccgccgctctactccccggatctacacacaccatcctgcttcgctcccgttccatgcccaaaacttgcatatcacttgcgcctcaaacaagctagggtagtcgtcggggggaggggggcgcttgctgctccctccgccggcaccatctccagtcccggtgtcgtctctcgctgttggatccggagtcgcgcctccactttcttcatcctagtcgagccgagccactttgggatctaccgttgctgcctttatactgtaatattaattgaatttaccatggataaggattggatgaaaacatctagatctagtgctgaatataatatcggggttgataaatttatagaattcgccttatccaattcagcccacaacaatagaatcatctgcccttgtaagaactgtggaaatagatattggttaggtgaacataaggttcgtgagcatttgatttgtgatgggtttttggccgggtatacctcatggattcatcatggagaaagcatgtcgacttccaagccaagtgttgcctcaagttcacatcatgaacaaaatgatgacatggaccaaatgctgctcgaaggccttgggatgtacgacagtcgtactttagggacagatgatggggcagaagatgatttggatgttgatgctgaagcatattataagttggtaaatgatggaagtcaagagttatatccaggttgcaaaaacgctatttctgttgatggccaggcactaaatgattgtgttgacatccttgttaacactgtattcaatcagcacaccataatacctcgtgcatatggaatgatcagcaagttaggaagtgctcaagctcgatgcatcccatggccacgtgacaatctaatgcatccaagtggtcaagctctacattctaaggtgtcgactattgcgagacataactcagctaaccaaggaaattcggtggcactaactgaggtgttcaagcacaatagcattgataatgcactgcaaagtgttgttggacacaagagaaaggtgcatgatctaacaccaaaggagaatataggacgtgaagatacacattctagggcaaagaagattgggaaggccagacccgattctccatatgctaacttcaccaatagccaactgttaacaacttcccggttctagctcaagtccaaatgcatggacaggttttggtgtaatccattctcaggttgtgtttttcctcattgcaaatacatgcgagcctcacaggatgacaggggcaagccactcagtagatcaatgatgtttattgtcttgtaaatcataaatataccattgattgtgatagcatatcttacaaacttaattaccattgagatgatttgtgaaccacttaatgtgcgattgaattggaattgggaattattcttctatattgtttttgg

SEQ ID NO: 24791 - DNA, 1027 bp, Oryza sativa
  ref <308>: DATABASE ACCESSION NUMBER: AK100233
  ref <309>: DATABASE ENTRY DATE: 2002-08-28
gaccctcttgtttcttcgagagcgaggtgaagatttgtttcttggtttgtgttcttggagtggaggaggaggaggagttggatatggggcgcggcaagatcgagatcaagaggatcgagaactcgacgaaccggcaggtgacgttctcgaagcgccgcgccgggatactcaagaaggcccgcgagatcggcgtgctctgcgacgccgaggtcggcgtcgtcatcttctccagcgccggcaagctctccgactactgcacgcccaagaccacgtccgtgtttcccccgctgtcaaggatcttggagaagtaccagaccaactccgggaagatactctgggatgagaagcacaagagcctcagcgcagagatcgatcgtgtcaagaaggagaacgacaacatgcagatcgagctcaggcatatgaaaggggaggatctgaactccctgcagcccaaggagctgatcgcgatcgaggaggcgctcaacaacggccaggccaatctgcgggacaagatgatggaccactggaggatgcataaaaggaatgagaagatgctggaggacgagcacaagatgttggcttttagggtgcaccagcaggaggtcgagctgagcggcggcataagggagctggagctcggctaccaccacgacgacagggacttcgcggcctcgatgccgttcaccttcagggtgcagcccagccaccccaacctccagcaggagaagtaggctgctgagcactgccaatttggctgaacctcctgcttgctagctttgcatttcctcatgcgctgctagatgtatctgtggtttctctcatgcctgtctgaatgaactcacactgatgagagggtgtcagttgttttgtgctcctcccagcattagcactcagaattcagaaatgactcaatgtcagttgcttttgtgcttctcccagcattagcactcagaattcagaaatgactcaatgtcagttgcttttgtgcttctccctgcttgtttaattagccactgttcttgtttcc

SEQ ID NO: 24792 - DNA, 1612 bp, Oryza sativa
  ref <308>: DATABASE ACCESSION NUMBER: AK100234
  ref <309>: DATABASE ENTRY DATE: 2002-08-28
ggcatccgctgcacccaccactcaaaaacctgcagcttgctccctagcttagctagcagacgacgacacaggtgtacctagcaaactagctagcaactgtacacgcgtagctgtcgtcgtccctgcagggggcgtgataacatatatcacagggaaattaaattaactagctcgaagaaattcagggaggagatcgactgatcgagatgccgactgacgagacagccgcggcggcgccggccaccaccgcgctctccggccatgggtgcaccgtgtgcgtcaccggcgccggcgggttcatcgcgtcgtggctcgtcaagcgcctcctcgagaagggctacaccgtgcgtggcaccgtccggaaccctatggacccgaagaacgaccacctgagagccctggacggcgccggcgagcgcctcgtcctcctccgcgccgacctcctcgaccccgacagcctcgtcgccgccttcaccggctgcgagggcgtcttccacgctgcctcccccgtcaccgatgatcctgagaagatgatagagccggcgatcagggggacgagatacgtgataacggcggcggccgacaccggcatcaagcgagtggtgttcacgtcctccatcggcactgtctacatgaacccctacagggaccccaacaagcccgtcgacgacacctgctggagtgacctcgaatactgcaagaggacagagaactggtactgctacgcgaagacggtggcggagcagggtgcgtgggaggtggcgcggcggcgtggggtggacctggtcgtagtgaacccggtgctggtgctgggaccgctgctgcaggcgacggtgaacgcgagcacggagcacgtgatgaagtacctgacggggtcggccaagacgtacgtgaacgcagcgcaggcgtacgtccacgtccgcgacgtcgccgaggcgcacgtccgcgtgtacgactgcggcggcgcgcggggccggtacatctgcgccgagagcaccctgcaccgcggcgacctctgccgcgccctcgccaagcttttcccggagtaccccgtcccgagcaggtgcaaggacgaggcggcgccgccggtgaaggggtacctcttctccaaccagcgcctccgtgacctcggcatggacttcgtccccgtccgccagtgcctctacgaaaccgtgcgaagcctccaggacaagggcttgctgccggtgctgccgcccaccgccgacgaccaccaccacccttcctcgtgatcccccatccagctcccccggcgcccggccatcgtcactgcatattaatttctgctggctgctgatatatactcttattgagttctaattttttcctttttccgatcggtttttacatatatattatatctacatgcacaccgatcgacacacgtatgtatatttttatgtgtattgtacgtgtattatgtatgtgatttaatggccgggtgcatgcatgcgcgactcgtgagcaaagtgatatagcgtcagtgctgtgtgtgacgtgcacagtgcatttaattagtacgtaatctatgtttggtgtcactgtaatataagcatatgatattgctccttggtaggagtgcatataattaacc

SEQ ID NO: 24793 - DNA, 2441 bp, Oryza sativa
  ref <308>: DATABASE ACCESSION NUMBER: AK100235
  ref <309>: DATABASE ENTRY DATE: 2002-08-28
gctctttcctccccctcaccgactcgccgtcgccgttcgtcgtcgtcgccacggtcgccggcggagagaggcctcgtctcgccgccaatggcctcctccgtccccaacggacacggcgccgccaccgccaccggcgaaggagggacgccaccgccgccgccgccgtcctcctcatcctcgctggtgttcctcgggacgggctgctccagcgccgtgcccaacgcgcggtgcctgatccagccccccgacccgccctgcgccgtctgctcccagtccctctccgtggcccccgagctaaaccctaactacaggtgcaatacttctcttctgattgactattgccaagatgaaaatgcacacaaatatattctaattgatgttgggaagacattccgagaacaagttctacggtggtttgtccatcataaaatcccttgtgttgattctattattctgactcatgagcatgctgatgcaatcttgggtcttgatgatgttcggattgtacagtcatttagtcctacgaatgatattgaaccaactccaatttatctatcccaatttgctatggacagcattgcccaaaagtttccttacttggtcagaaagaaactaaaggaaggggaggaggttcggcgagttgctcagcttgactggagagtaatcgagagtgatcttcagataccatttgtgacctcagggctagagtttgttccccttccagtgatccatggcgaggactacatttgtctgggtttcctttttggaagaaaatcaaaagttgcttatatatcagacgtttcatggtttcctccaagcacagaacatggtcatatactatattcgttttgcattggctgcaatgcacgcatgctggtactgattggtaattctccgcttgatggcttggtgctcaccacaatgcatcggtgccccctctagcatatactataatgcaattttggtctatggacatgtgtacttaaccatggagattgcaatttcaaagtctggagggggtcagctggatttgctcatcttggattgccttagtaggactggttctcataatgtccatctttgttgggatcagacactggatgctgttaagaggatttgccccaaaagggcattgctcattgggatgactgatgaaatggaccatcacaaggacaatgaaacgttggaagagtggtccagaagggaggggatagatgtgcagttagcccgtgatggatcgcgtgtctacattgatctgtaaatttgacaaaggtgcaatacttctcttctgattgattattgccaagatgaagtcacacacaaatatattctaattgatgttgggaagacattccgagaacaagttctacggtggtttatccatcataaaatcccttgtgttgattctattattctgactcatgagcatgccgatgcaatcttgggtcttgatgatgttcggattgtacagccatttagtcctacgaatgatattgagccaactccaatttatctatcccaatttgctatgaacagcattgcccaaaagtttccttacttggtcagaaagaaactaaaggaaggggaagaggttcggcgagttgctcagcttgattggagagtaatcgagagtgatcttcagaaaccatttgtgacctcagggctagagtttgttcccctgccggtgatccatggcgaggactatgtttgtctgggtttcctttttggaagaaaatcaaaagttgcttatatatcagacgtttcacggtttcctccaagcacagaacacgcaatttcaaagtctggagagggtcagctggatttgctcatcttggactgcctttataggactggttctcataatgtccatctttgttgggatcagacactggatgctgttaagaggatttgccccaaaagggcattgctcattgggatgactcatgagatggaccatcacaaggacaatgaaacgttggaagagtggtccagaagggaggggatagatgtgcagttagcccgtgatggattgcgcgtctacattgatctgtaaatttgacaaagggcatttgcttcttcagtaacctgcattaagcttccagttgccgttactattcagctcctcttgataagaaactgaaaggagaaacggcaaatgctgctgctttgacagcgtactggtcatagttcaaactcactaggtacagtagaataattcatcaaacctggttccaaatattagtatttagtagtagtaataaaaggcaaagcagctgcttcattgcagcaccccacagaatcccagttcctgtatgtttgtcttgtgcaaaccacttgaagatttcttgtcaatgccagtgtcgtagcccttgtcaattggagaaagcctgattcgaatgataatgaactccaacagaagcttttttgaagtttcatttcgt

SEQ ID NO: 24794 - DNA, 3730 bp, Oryza sativa
  ref <308>: DATABASE ACCESSION NUMBER: AK100236
  ref <309>: DATABASE ENTRY DATE: 2002-08-28
gatcgccatcgacgacgacgacgacgagctcgcctccccttcccttccctccacggcgcgccgcctccgcgacaggtcaccctcttcccttccatccaaacgagctcggatttaggatggactcggacgacgaggcggcggctgcggccatggcggcgcgggcgcgggagacgctgaggaagagcgcgtcgtcgtcgtcgtcgtcgccgtacgcgcgtagcaccgacgacggccccgtcgcctccgcctcgtgcgacgcgcgcctcgagcgctgctgccgcgaggttggcgccgcggtggcggtggtggaggagccggagcgggttgtttcggggggcggggcgttgccggagtttgttggtgagggagggggcgaggggatctaccgggtgccgctgcgcgccgcgatgcacccgggccgcccgccgccgctcgaggtgcggccccacccgctgcgggagacgcaggtggggtccttcctgcgggcgctggcgtgcgagccgcggcgccggcagctctgggcgggctccgagtccggggtccgcgtgtgggggctcgacgacgtgttcgccgccgccgggtgcggggcgcgccgcggcgacgaggagagcgcgcccttcagggagtccgtgcccgtgccgcccgtgctctgcgtcgaggcggacgcctcgaacgcgctggtgtggacgggccacaaggatgggaggatcatgtcgtggcgaatggacctcgccgccggcagcgacgacgatgacgcgccgttgttcagggaggccctgacgtggcaggcacacagccgcacgccagtgctctccatggtcatcacgtcttatggtgaaatatggtcaggatccgaagggggtgttataaaggcatggccctgggacgtcattgctaagtccctctcactaatgccagaagaaaaacatgtggctgctttacggattgaaaggtcatatattgaccttaggaacaatgcagcagctggcaacatatcttcgttccccgctgctgatgtgaaacacatgcttgctgaccattcccgggcaaaagtttggtgtttaactagcatggcatttgctgtttgggatgctcggaccagggaactgctaaaagtgtttggcatggacggccaaattgagtcagctcggttagaggcacctgtgatgccagagcaatttatagaggaagaaatcaaagcaaaacccgtgaagaaggataaaccacaaagctctttcaattttttccagaaatcaaggaatgccctgatgggagcagctggtgcagtacgcagagttgctacaaaagggacatttgttgaagataatcgccgaacagaagcagtggttcaggcaatgaatggaacggtttggtcaggttgcacagatggtttgatcattatgtgggatggaaatgggaaccgactgcaagaattccagcatcattgttcttctgttcagtgcatgaaggcacttggagaaagggtgtgggtgggctatgccagtggcattattcaagtcatggatgtggaaggtaaccttctggcagaatggactgggcatagctgtccggtcatacagatggcgattggtggttcttatgtctttactcttgctcatcatggtggaattagaggatggcctctagcttcccctggccctctggatgatattctgcgaactgaattgtcaaacagggagttgtcgtatagaaggctagtgaacattaaaatgcttgttgggacttggaatgttggccaggagaaagcatcttatgaatcactcatgtcatggttgggtcgtgcattttttgatgttgacttggtggtggttggtctacaagaggtcgagatgggtgctggtgttcttgccatggctgcagccaaagaaagtgtagggcttgagggtagtgccaatggtcagtggtggatagacaatattggcaggacccttgatgaggggatatccttccaccgagttggttcaaggcagctggctggattacttattgctgcatgggcaaggaaggaccttaagccacatgttggtgatgttgatgctgctgcagtaccatgtggctttgggcgtgctattggcaacaagggtggtgtagggttaagaattagagtctatgatcgcaggatatgttttgtgaacaatcattttgctgcacatctagaaaatgttagccgtcgtaatgctgattttgatcatatctatcgaacgatgacttttaacaaacctcatggatctgcagcttctgctacatctgttcaattgcataaaaccgtgaatgccaatggaaatcaggtcgatgaagatatacctgagatggcagaagctgatatggttgtctttcttggtgatttcaactaccgactttacggtatcacctatgatgaagcaagggacatggtctctcaaaggagctttgactggcttaaagaaagggatcaacttcaagcagaaatgagggcaggaaaggttttccaaggaatgcgtgaaggtttgatcagatttcctccgacttacaaattccaaagacacctaccaggtcttgcaggatatgactcgggtgagaagaagagaatacctgcttggtgcgacagaatactgtatcgagatagccgtgatgtattaacagcagagtgctcattagaatgccctgttgttgctaaaattacatcgtatgaagcttgcatgggtgtcacagatagtgatcataaaccagtgaggtgtgcatttagtgttgatattgcaagagtggatgagtttacaagaagacaggaatatggaaaaatactccaatctgacaaaagattacacagtttgcttcgagagtcccattttgttccagacactataatcagcacaaacaatataattttggaaaaccaagaacatgttgtcctccggataacaaatgattgtcaaagaaacaaggctgcttttgaaatcctgtgtgaaagccagtcaatcagcaagcaggatggaactaaatccgagtttcctccaagggcatcctttgggttgccgctttggcttgaggttgaaccatcagttggtctcattgaacctgggcaaacaatggaagttaccgtgcaccatgaagactattacacccaagaagtatttgtcaatggagtactgcagaactgttggtgcgaagtcaccagagataaggaggccgttcttttggtcaatgtaacaggtagcacctcaactgaaaccattacacacaggatcaatgtcaggcattgctgctcaacgatttctgcatccccgcccatcaatccaccgtctatcacaaccccatccgttgatgttctatcgggtgaagcatctacaagaagttcaaagaagaatccgttgaattatttgcaacgttctgactttaagccattcggcagctcagaggtgcatgatttgtgccccttgtgaaacatgtaaaaatgagtgtgtctgtgtgtttttgtctgtttggtgtagcagttctgtataggagttgagtcttacgttacttaccaaagggagaattaaggtgtcccactgttaattctgtagatattcaccactgacttctcaccattcgttgagtaacatcagaaaggaaatgtgtgcatagttacaagatatctcatgtagtttttttttttcctcttctttttatagaggacacatggtgatacaaaatattctttacaggttgaatacaaagaaagttacttcgt

SEQ ID NO: 24795 - DNA, 1551 bp, Oryza sativa
  ref <308>: DATABASE ACCESSION NUMBER: AK100237
  ref <309>: DATABASE ENTRY DATE: 2002-08-28
tggagtcatcttcttcctcctgcggtggcggtgctgcagctgagcctgctgcactcctcaccggctgctgattgtgactgtgagtcatgttggcctccacttgcttctccgccccgccgccctcctcctcctccccgtcaatcccgacccacctcgccactctctgctgctgcttcaggcctcccgctcgcccaccttggcctcgctctcttcttcttcttggtgccttcccaccgccgacccgccccctcccccgcgcctccgtctcgtcatcgaccgccccagcgaaagactacgagtttactgatggtggcggagaggtggagctgaggctggacataggaaagctcggcattgagaattcaagagatgtatttgttgacgtcgatgatacgtctctgttggtcagagccaagtcggatgggacactgcggactttgatcaatgttaaacaactctttgataggattaagtcttctgagactatatggttcattgatgaggatcaattggtagtgaatctaaagaaagttgagcaagagctgaaatggcccgacattgatgaatcttgggaatcccttacttctggaatcactcagcttttgacagggattagtgttcatattgttggtgattccacagatataaacgaggcagttgctaaagaaatagctgagggaattggttaccttccagtctgcacaagtgagctgctagaaagtgccaccgaaaagtctattgacaaatggttggcttcggaaggagtggattcggtagcagaagctgaatgtgttgtgctggaaagccttagcagccatgttcgtacagtcgtagcaactctggggggaaagcaaggagcagctagcagatttgataaatggcagtatcttcatgctggatttacggtttggttgtcggtctccgatgccagcgatgaagcttctgccaaagaagaggcccgtagaagtgtgagctcgggaaatgttgcgtacgcgaaagctgatgtagtagtgaagcttggtggatgggatccggagtacacacgagctgttgcccagggttgccttgtggccttgaagcagctaacattggcagacaagaagctagcaggtaagaagagcctatacatgaggctgggatgccgaggggattggcccaacatcgagcctcccggctgggatcctgactccgacgcaccacccaccaacatatgattttcatactcagtactcactagtagtagtatatatacagtacatgattctcattctagcctcttcgtcgtcgcttttcttctctctggaggcgcttcagttccatggaatccacattcacggggcatttcccagattcagctttagctgtgtcatggcatcttttctttgcagccagctactacacgagattcttactgctagtaaaatactcttgtgttactacagtttgaaactttcgtgccactattttttaagctgtgccaaaactgccagatctcatggcaaatataaaccataacaaaaccttgcttcagctatgcatggttcatggagc

SEQ ID NO: 24796 - DNA, 2683 bp, Oryza sativa
  ref <308>: DATABASE ACCESSION NUMBER: AK100238
  ref <309>: DATABASE ENTRY DATE: 2002-08-28
ggttcgcgttcatcttctgcttgttataatcctccattctttttgctcttcctcgcactcgcagcgccaccaacgaaaacccaaggcaacgcaccacgctgcacgcgtccgtggtcgccgcgaaacttgcgccgcgatggggaggccgattcacccccaaatcctgccatcctgatccagtttgatttctccgtcgagcagcaacagcagcagcgaggattgggtgtgcgaaaaggagtcgcctttgagggatcgtgagcaatggcgccggcgtgggatcgcgccaagcacgcgctcgccaccaggctctgcattcgcttcccggcgcggcagagggccgtggaggatgcaccggcggaagacgaggcgcctccgccgcctgcggcggcggcggcgcgtgctgtgccggaggagaagttgaagtcgccatcggtgtccgtgcggcggctttcgagctctgggagctggggcaagaagaaggtatgtgccatttgccttggtggcatacggacaggaggacaggccttgttcacagctgaatgctcccacgaattccattttcattgcatctcctcaaatgtcaaccatggcaattacgtctgcccggtatgtcgtgctgagtggaaagaacttcccttccaaggaactcaacctggagacactgcttatggacgagctagagtaagcactgtaaattggccccaggatgaggggcagatgtctgttgtccgcaggctttcccacggatatagtggaaaccttcaacagcaacttgctgtcttccgtactccagaggcaagcattttcaatgatgatgagaacattgatcctcagtctgaaacagttgatgatcataatgcagttactaattcagttgagatcaagacatattcagaatttccagccatacaaaaatcagaaagacggaaggtctttgctatcttaatacatctgaaggctccaaagtccttggactcggtgagctcccgtgcacctcttgaccttgtgactgtgcttgatgtcagtggcagcatgtcggggataaaactttcacttcttaagcgtgccatgagttttgtcatccaaacacttggacccaatgaccgcctgtctgttgtagccttttcatctacagcacagaggctctttccacttcgccgaatgaccttaactggtcggcagcaagccttgcaagccattagttcccttgtcgcaagtggtggcacaaacattgctgatgcgctaaagaaaggtgctaaagtggtcaaggatcgtcggcggaagaatcctgttagcagcataattcttctttctgatggtcaagacacccattcatttctatctggtgaggctgatataaactacagtatacttgttcccccttcaatccttcctgggacaagtcatcatgtgcaaatccacacctttggttttggtacagaccatgattcggctgccatgcatgctattgctgagacatctaatggcacattttcatttattgatgctgaaggctcaatccaagatgcatttgctcaatgtatgggtggcctccttagcgttgtagttaaggatatgcggctgtgcatcgagtgtatagatgaaggcgtgtctcttacctccatcaagtcaggcagctatgcaagtcaagtagctggaaatgaacgcagtggattggttgatattggtgacctctatgcagatgaagagaggggatttctggtcactctacatgtcccagccgcacatggacagactgtgctgatcaaaccaaaatgcacatacctagatgcaataactatggaaaatgtccagctagacggtgaagaagtgattattcagcgtcctgcatattgtgttgactgtacaatgtcacctgaggttgagcgtgaatggcaccgtgttcaagccacagaggacatgtctgctgctcgatctgcggctgaggatggctctttctctcaggccgtgtcaatccttgaaagccgtaggagaatactggagttacatgcagcacactcttcagacagtcagttcttggcattaatcaaagagctaagggagatgcaggatagggtggagagccggcagaggtacgaggaatcaggcagggcttacatgctgtcaggcctgagctcacactcatggcaaagagcaactgcacgtggcgactcgacagagctcacaacccttattaatacttaccagacaccatccatggttgatatgctacagcgctcgcagactatcctgccctctgttgtcgaaatgctgaaccgttcttcaactgttgctacttcaaagtccttctctagctacctcccaacctcccgccatattgcttgatcataatgtagttctagcaataaccagccaagtgttagggaaatgaagatatccaattctttagtttgttttctgcagatctttttccattatttatagtgggcatgggattagattcattataaatgtttgggtatatactctagtttggtgtacatgggtaaactttgaaagggaatgataaacagcatagctgaaacaggtgaaaggaatgctgacatttcatttgtttctcatcatcattttatattaattctcattttgtacataaaattctccctagggttgttccaggatgcttgtaagctcttggctgcattcacactttcgattggtt

SEQ ID NO: 24797 - DNA, 2373 bp, Oryza sativa
  ref <308>: DATABASE ACCESSION NUMBER: AK100239
  ref <309>: DATABASE ENTRY DATE: 2002-08-28
ggcggttgttccccagctataccgcctctgactctgaggaaggggcgcagcaccaccgcccgatggggaagcccaagcccgcctccgccacagccgctcctcgagggcacaagaggcgcccgaagaggacaaggccctcggggaagggaggaggacccgagccgcgcgaggagaagcgcaagaggcgagagctcgatggtgtcggcctggcggaggagtcgccgccgccgggttccagcctaggcaaaatcttaagtaccgaatctggagcaataggcctagagcagagtgatgaagatgacatggaagatgaacacactgttcctggtgacgatgagacaaatgatatgataaacaataaagatgatgcttttgatgaaatggaggcttcatgttcatttcatcgccatgttagtcgcatcataacgaatgaagaagtcaatgcattactaaagcagaagtgtaaatttaaatgggaggtgcctgcagaggacattccaaaatccaaatgggttggaacaggtgaaaaaatggagggagcttatgttgatcttattggtggtgtcaaaggaaagttgagggatcattggcagaataccctctctgatcagttgaattctagattgaatttcttctcactttgtagtagctatcgtgacataatgcattgtaataagaagccattttatctaaaaggaggtagcactgtggattccagtacaatggactcctatcttatgcatgctttgaatcatattaacagaacgagagagattgttgtaaaaaatgatgggaagcttaggagtgaccctagcaaagatattttggatgataactcattcctcgatcagggctttacacgtccaaaggttcttttcctgttacctctaaaaagcattgcgaggcgtgttgtgaagaggttgatccaactgtccccactgtcacaaaaggatatcattgcaaaattcgaagggaagtttggcgaatcagatgatgaagtagaggagcctgttcaaagtaataaacctgcagactttgacctactgtttgctggagatactgatgatgagttcctttttgggataaaatatacaaaaaaatctatgaatctgttcagcaacttctactcatctgatatcattgttgcatctcctttggcacttataaagaaaatcaatggagttgatgacaacggaaaggaacctgccaaggaaagggattttgatttcctatcatcaattgaaatagtggtggttgatcacgcagatgtgattcttatgcagagttggtcacatctgtatgctgtgtttgaacaattaaatcagttgccatcaaaggaacatggaaccaatgtgatgcgtattaggccatggtacttggatcagcatgcacgttactatcggcaaacaatactcttgagctcttatcttactccagagatgaatgctttattcaatggattatgcttgaattatgaggggaaggttaagctggtgactgaatttaaaggtgttctttctaaaatacagtttgaagcaccgcaggtgtatgaaaggtttgatgcatcttctattactgaagttgatgatgctcgctttgatcatttctgcaagaaggtgtacccaaagattcaggagtcagatgagggtcgggtgttgctattcgtcagttcatactttgaatatattaggataagaaacttcttaaaatctcaggaagcatcgttttgtagaattggggagacaacatcgcaacaagatatatcacgtgcaagactctggttttttgagggcaagaaaaaaatcttactttatagtgagagatctcatttctaccacagatacaagatcaggggagcacaccatttgattatctactctttgccagggagaaaggaattttacccagagcttgtaaacatgctcagtgaatcagaaaacaggaaatgcaccgtctttttttcacgtctggatcttctgaagttagaacgaattgttgggacgtttgctgcacaaaggttggtttcttcagataagagcattttcgtgttccgctgattcgggcgtcatgttcggcagcctctcaaattttggaatgcgagatgattatgtactgtaccacaactccttatttatttgtaatctagattgtggatgccattttttggtaaagctcgtgctgaatgtttcgcatcagtatctatttcaatattatggatgccattctttgttagtttttggaaaacatgcatagaaacagtgccgtccctgtgggagtgccacaagcatgaccgcacagggccaccaatctcaaggggcctcaaataacttagtatgtgtcacaggatattagcccaatagattaaattagatg

SEQ ID NO: 24798 - DNA, 1376 bp, Oryza sativa
  ref <308>: DATABASE ACCESSION NUMBER: AK100240
  ref <309>: DATABASE ENTRY DATE: 2002-08-28
gcctttgctttggccattttctcaagcacctaatttgcttggatccttcttgcacttgcaacttgcaaaacaaccaaaggaaatactagtagcatcatcaagcgaagaaggtcagctcaaaagggcgttgtgtgcttcgcctcgcgaaatgagagtcgcattgctccggagatgatggtcgccggagtaatcaggagcaaccagaatggcggcggcggcggcgggacggtgtccggtgcggcgaggattagcccggcggtggtgttcgtcctggtgatattggctgtggtgctgttcgtgtccgggttgctgcatcttcttgtcagattcttgctaaggcgcggccgtgggcgagatggcggcggcggcggcgacgcggaggcggcggagggtgtggaggagtcggcgttgcaacggcagctgcagcagctgttccacctgcacgacgccgggctggaccaggacgtcatcgacgcgctcccggtgttcatgtaccgggaggtggtggtcggcgtcggcggcggcggcggcgcgggcggcggagccaaggagccgttcgactgcgcggtctgcctgtgcgagttcgccggcgacgaccggctccggctgctgccggtgtgcggccacgcgttccacatcgactgcatcgacacgtggctcgtctccaactcgacgtgcgcgctgtgccgcgccgcgctcggcgcgggcgccgccgctctgttcgacgccgcgcgtcgacgagatggccgacgaggagggccggagtcagcaggaggacgccgtgttccccgtccgcctcggcaagttcaagaacctctccagggcggtcgccgccgtccacgaccgcgacgacgccgccgccgccgccgccggcgtcggcgtcggcggtggcattatcacgcgagaggaaggcgagtcgagcagcagcagcttggacgccaggcggtgcttctccatgggctcctaccagtacgtcctcgccgaggcgagcttgcaggtgtccgtacaccggaggcacggcgacggcaatggcagggcgaggctgagagggctcgccggcgccaacccggccggcaacgacgccgccgccgccgccgacgggaagaagatcggcgccggcagcaagggcgacagcttctcggtgtccaagatttggcagtggccgcggcaaggcaaggggaagctgccggtgctcgcctccgacgactcgccggcggtggacggccggctgccgtggccgaggagaagccccggggcttcctgatgctgatttccatggtgtgtttgcaatttgcaaaactttttcagagctaattctgctcatctttttaacaccgtattaatcaatctgttcatagccaattcgttccattccg

SEQ ID NO: 24799 - DNA, 2901 bp, Oryza sativa
  misc_feature (447)..(447): "n"=any one base of a, t, c, or g
  ref <308>: DATABASE ACCESSION NUMBER: AK100241
  ref <309>: DATABASE ENTRY DATE: 2002-08-28
ggccatatctgtctccctctccccttctcatctcccgagaagtagtagtagtagtcgtctagtagtagtagcctaccaccacctccctcggcgagcgggtcccaccggccaccgtccgtactccggtgagccggcattgcgtgttccgggatggcgtcgccgtacgaccaccagtcgccgcatgcgcagcacccgtcggggttgccgaggccgccgggggcgggggcgggtgcggcggcgggcgggttcgcgcgggggctgatgaagcagccgtcgcggctggcgtccggggtgaggcagttcgcgtcgagggtgtcgatgaaggtgccggagggggtggggcgggtgcggcccggtggcgggaggatgacgcggatgcagtccagcgcgcaggtggggctccgggggctccgcttcctcgacaagacgtccggcgggaaggagggngtggaagtccgtcgagcgccgcttcgacgagatgaaccgcaacggccgcctccccaaggagagcttcggcaagtgcatcggcatgggggactccaaggagttcgccggcgagctgttcgtggcgctggcgcggcggaggaacctggagccggaggacggcatcaccaaggagcagctcaaggagttctgggaggagatgaccgaccagaacttcgactcgcggcttcgcattttctttgacatgtgcgacaagaatggcgatgggatgctcacggaagatgaggtcaaggaggttattatactgagtgcgtcggcgaacaagctggcgaagctgaagggacacgcggcgacgtacgcgtcgctgatcatggaggagctggacccggacgaccgcgggtacatcgagatctggcagctggagacgctgctgcgcggcatggtgagcgcgcaggcggcgccggagaagatgaagcggacgacgtcgagcctcgcgaggacgatgatcccgtcgcggtaccggagcccgctgaagcggcacgtgtccaggacggtggacttcgtgcacgagaactggaagcggatctggctcgtcgcgctgtggctcgccgtcaacgtcggcctcttcgcctacaagttcgagcagtacgagcggcgcgccgcgttccaggtgatgggccactgcgtgtgcgtggccaagggcgccgccgaggtgctcaagctcaacatggcgctcatcctcctccccgtgtgccggaacacgctcaccacgctcaggtccacggcgctcagccacgtcatccccttcgacgacaacatcaacttccacaaggtgatcgcggcgaccatcgccgccgccaccgccgtccacacgctggcgcacgtcacctgcgacttcccgaggctgatcaactgccccagcgacaagttcatggcgacgctggggccgaacttcgggtacaggcagccgacgtacgccgacctgctggagagcgcccccggcgtcaccggcatcctcatgatcatcatcatgtccttctccttcacgctggccacgcactccttccgccggagcgtcgtcaagctgccgtcgccgctgcaccacctcgccggcttcaacgccttctggtacgcgcaccacctcctggtgctcgcctacgtcctcctcgtcgtgcactcctacttcatattcctcaccagggagtggtacaagaaaacgacatggatgtacctgatagtcccagtgctcttctatgcatgcgagagaacgatcagaaaagttcgagagaacaactaccgcgtgagcatcgtcaaggcagcgatttacccaggaaatgtgctctctcttcacatgaagaagccgccgggtttcaagtacaagagcgggatgtacctgtttgtgaagtgccctgatgtctctcctttcgaatggcatcccttctccatcacttctgcacctggagatgactacctgagtgtgcatatccgtacactaggtgactggacgactgaactcagaaacctgtttgggaaggcttgcgaggcacaggttacttctaagaaggctaccctttcaagacttgaaactacagttgtggcggacgctcagacagaggatactaggtttcctaaggtccttattgatgggccctatggtgcaccggcgcaaaactacaagaagtatgacattcttttgcttattggtcttggaattggtgctactcctttcatcagcattctgaaggatctgttgaacaacattaaatccaacgaagaggtggaaagcatacatggttctgagataggcagcttcaagaacaatgggccaggaagagcttacttctactgggtgaccagagagcaagggtccttcgagtggtttaaaggagtcatgaacgatgtcgctgaaagtgatcacaataatattatagagatgtacaattacctgaccagcgtgtatgaagaaggcgacgcaaggtcagctttgattgccatggttcagtcacttcaacatgccaaaaatggtgtggatatcgtctccggcagcaggattcgcacacattttgcgaggcctaactggagaaaggtgttctctgacttggcgaatgcccacaaaaactcacgcataggtgttttctattgtggatcccctacactcacgaaacaactcaaggatctttcaaaagaattcagccagacaaccacaactagattccacttccacaaggaaaacttttaagaccgtaccaaaggacgtctaaacagactgcatatacttgtataggaaagaaatacgatagcattgggatagcaaatatagtcttacaagttttgctctacgatggattgtacaaaatatatgttgaaagctagtgtcaccatcgtgcatagattctggaatgtttacagatatatgtattggaacagtgggaatgcatgttagaaaaattgagttcc

SEQ ID NO: 24800 - DNA, 2349 bp, Oryza sativa
  ref <308>: DATABASE ACCESSION NUMBER: AK100242
  ref <309>: DATABASE ENTRY DATE: 2002-08-28
gctaggccattccccctctcgtggccggtcgccggagatccatcacccgccgtcgcccgctctccccggcgatcctccccgagccgcgcgctcgcttcccccgttgtcaccaacctccacgcaggatccgcaccgccgcttcttctctgcccccaaccgcccaatcccctatccctcgcgagactttgcacgcttaagccttaagcttctactaccatttggatccggagaccgggagaagttggagggcacggactccggaggcgtcacccgcgggaggtcccctctgcaccggccggctgcgggcgcggctctgatggcgcacgagcgtggcggcgccgcgtcgtccgccgcggctcccgccaccgaggaggatgcgctgtgagtctgtgttgcccaaatccctaggtccgtgtattcctagtagacgtttcagtcacgcttctggtgtcacttgatctgaaggccgtggcgattgcagcgaaattcagggtccttctcttgttagtgtcgtgatgcgttcagtgtagtcgaaaatttggtggttcacttgggctctggcattgcgatgtagtactaaattttgggcgtatgcagggaattgagactttgagagaagggaagagaagagcacaggtgatgtttgcttgtggtatccctccagttggtattaattcataaaattggccgtgtacatccaaaccggatgtagaggccaggttttaatccatcttctagtagaaaatttaattcataaaatgaggagtataagcaagggtgacatggtgtccattaaggcattaatacagggtcacttagttgagctgacttagcattcacatgattcttctatgacattgttctaatgttgatttgtcttgatgccttcaggatgtataattcttctttcatgtaggtttattgacttgctacatgaagctcctctctctggtcatcgagagcctagaagcattgttggtggcaccttgtactgtatcttgttggcaggttatgctgctgtggcagtgtcagccccatggatattttaccttgtaccagacatgatccccccattgctatgcagctccaatgttatcattctgattctaacaggtatttttcaacaatattgggttcaccaggtcagaaaagtgagattgcaggggtattacgattttagtgagaaattgaagcgccttgctcaacttccatttgccaccgttgctagtggcgttgcttcaatgctcttaatcatagtctggcaacctctagtacacatactatcggtttctttattgctaaggattgctattgtggttgaagctatatgtgctggatgtttcatgagcttatacttatggcatatccacaagtacaactctctgaatgggcaccctgatattttgcggtccttatattctgcactccaactccaaccatctagttctttggaagaacgaaggtattatgatggtcgtttttctgaccagcaaatggctctgcttcagtaccaaagggagaatattcattacctgagtgaggaggtgctccgcttgcaagaatgcttaagcaaataccagagaactgatgttgggagcactcctcaggccgatcttgctcatctattagcatcgcgtgatcaagaacttagagcactctccgctgagatgaatcaagtgcattcagagcttcaacttgcacgtagtctgattgatgaaaaggactcagagatccagcgcattcgtgtgagcaataatcagtatattgaagaaaatgatagactcagagccattcttggagaatggagcgctcgagcagcaaagcttgaaagagcactggaggcagagcaaatatcgagcattgaattacggaagaacattgcaaaactccgagggcagacttacaaggatcaaaacacctgatctcccttgttttcaggatatattcacctatggcgatgtttgagcaggtttatcaactcttcagctgctaaaggtgccacctgtgatatccttgaattccaaacctctagtgataagaagagtgccaacacagtccagtttcgctaacaacaaagcaaggtacaagatcatcactcaatctgatatgcatcaaggaaaggaaaaatgcctttgctacacctctctcgtgaatgtacagattgatgtttgtaaatgttgttcgagagtatggtgcagcactggttttttgtgcttctacctgatgcttctacaatgacatcttatcatggcaagagttgtgcattgttttctgagcacttgcgaaatgaaaagtgagcatttgtgcctaagctcccccaaaaaggtatatcagacttctaatttcttc

SEQ ID NO: 24801 - DNA, 2781 bp, Oryza sativa
  ref <308>: DATABASE ACCESSION NUMBER: AK100243
  ref <309>: DATABASE ENTRY DATE: 2002-08-28
gagcgatgacgagcagcagccacggcctcagttgaacagcgacggtggcaaggagcagcccctagcgccgcagtcggatggcagaaacaaggagcagctgccgcctccccaatccggaggcggcaatggcatcaagcagcagcagccactgcctccgcagtcagatggaggcgacaaggagcagccgcctccttcgctgtcggatggtggcgacaaggaccagccgcttcctcccgactgcggcgtcaagcggcagctgccgccccagtcggacggtgatgacaagcagcagccgccgccccagtcagacggcagcgatcagccgccgccgccgcagccggatggaggcgacacggagcagcagccgcctcagtcagacggcggcgacaagaagcagaagcatattagagtcgtcacaatcagtgtgcaagacggcacggatgaagctgttgctgcagaggccgtgatcgagcgtttcaagagccgctgggcacggcggggactctggtcgcagcagctctgcctccacgtttctgtccatcggcctccgattctctcggagattacaaaggtcatggttgaaaagctgaaagagaaggaggatgatgagaagaatgaggcggaagacagggagtggcttggccataaattgaaagatgaagatgtgctgcttgttctttccggttttaattacccagcgttatggaaccaggttctggatttgctgacctcgatgagctgctctgactgtgcagtagtactctgcacaaacgatagtaagatggcaaaatattgctgcagcaatgactctgccaacgatgggcctcagataatctactctctcgttgatatttacctcaacagagcgctcgccctgctttcccacagctacggatacgaggaaggacacttgaaagaaattctgcgcaacatcctcgccaagtgttgccttgatgtcttctgcatgaagatgctcctccatgccctctactacaatcctgacatgacgaaacaccaactgcagttcctgaatataagccttggtaaagaatttacagatcatgggagacaggaccgaataatggccttctgctaccaagcactgccaaatagttacaagaactgcttatggtattcaaccattttcgcccgtggaagcggcgtccgaagggcaagtttaataagacgatggattgcccaaggcttgatagcccaagtgaaccagtcaagtgcagaggacgaagccgggcactgtttcgaagccatgcacagccagaagcttattgtttcttctggtcttagtggtacacgcaaggtaaagagctgcaccgtgcatccagtagtttctggcttgatcagcagggagtcttcgacagttgaggacctattgctcaacaaccagctgccacttgacttggatctcctctactcaatccggcacggcatgcaactccatccggcaaactctaatatcaaaaagttcttgaactcactttccagcagttcaaggttgctgctgacagtacttgatttggaaggtcgcaagggcctcaaggcaggcgacctccataccgtatgcaagattcataaactcaagtatctaagtctccggaacacagatattgcccaactgcccaaggaaataggtcagctcaagctcttagagacacttgacatccgaggaacaagggtacaagtgttccacacggcgctaccaatgctaaagcacctgcttgctggttgcattattgactacccaaaggaagacatcatcaagtccaaggaatcattctccacggtttccatgcctcgtgctgttgcaactatggaaaagatggagatattgtcccgtgtcaaggtttcgaacagtgctaaagaactgaacaacattggtgacaagctcgagcacctaaagaagttgggtgtggttctatctggcaagaaagctagcttgatagatttgttccttcaggttgacaaactccacagatgtcttcggtccttatcaatccgaatggatccaccaggtaactgggattctattgatgttattttattgagacctccaaagcttctggagagcctacacatctgcagcatcagaagcgggttgcctcccaggatcaaggagctccatcagcttgccaagataactctacgtgacacctttttgaatcagggtgccctcgatatacttagcatgctcaaaggcctacgctatctcaggctttgctaccattcattcgcagaaggcgctctgagcttcgtgaagtttgtggaacttgtggatcttgtcattgaagatgatattgttaacagtgtcgccttgggtaataatacttatggtggagaccctgataaacttgaaaagatagtttggtccttcactcacatggaggagctttcaggggtcagtacgctgcagagtctgacacacatcgaactcaatgggagaacatggcacctacagaatctggaaaaactgaaaagagaagtagatgaatgtgggattactttcacgctcaatccacctgagaatggccaaggatcaaggctgtaggtgctatcgtaccccataatcatcaatgctgagaaagatggaactccgtaatcctggggagtatttctaaattctactacggctgcttctactatggaataaagatgtttttcctcttccatctgtcatgttggactggtattgcacctttatgtttcgagtgttaatggcaatctcatattgtaatattgtttccattgctttcagtttggtttagttgc

SEQ ID NO: 24802 - DNA, 1030 bp, Oryza sativa
  ref <308>: DATABASE ACCESSION NUMBER: AK100244
  ref <309>: DATABASE ENTRY DATE: 2002-08-28
ggagatcagcgagcaacacaaccgccacacccagctaagcgccggtcgaccgatcgatcgatcgatatgggctcgctgagaggaggcggcggcggcggcggaggaggaagaggagattgcagtaagcaggaggagacggagagggtgatgaggagcgtggacgcggaggaggcgtgcgcgctgctgagctcggggaggcaccaatacctggacgtgaggatgtgggaggactttgacaagggccacgtcgccggcgcccgcaacgtgccctactacctctccgtgacgccgcgcgccaaggagaagaacccgcacttcgtccagcaggtggccgccctctaccacgcccacgaccacatcatcgtcggttgccgctccggcgtccggtccaagctcgccacggcagaccttgtcgccgcgggattcaagaacgtgaggatccttgaaggcggctacctctccttgctccgcgctgctaatcaacaataaccgcacccgagcctgattttttacctacagatcatgcccactaattatataatactacggaggagtactactttttcttcgggggtgattatatactaatactatacttgtcgctcgctacagattattgagatgtggcagcttgattattgctcaagacaagacgacgatcgaagcagaacatagttcaagatgtttccgatcgatccatccatcggttgaatgtatatgcgactatatatgttcggtcggtcaaaatatgtaaataagtcgaccttaattgcttgagagaattgatggagcactataccgactgttaaaattttcaatgaaaagctaggtaaaataactagcttgagatagaggtgttttggggatacaaaggtgaaatggaagcggagatcgggaatctccttcccaaattccatttctccaatcccaattccctaacttcttcttcccgatctctgcttcaatttcacccaatttgtatccataaaacacttttattctcaggttttttattacctcattgtccgct

SEQ ID NO: 24803 - DNA, 2766 bp, Oryza sativa
  ref <308>: DATABASE ACCESSION NUMBER: AK100245
  ref <309>: DATABASE ENTRY DATE: 2002-08-28
ggggatcaaaaccctaatacggcccgcccccgcctcgatctccgtccaatgcgctcgccgccgccgccgccatgagcctctcctccctctcccgcgccctcgcccggtccgcgcgctcctcccggcagcgccagggttctctgctcggggggcatggcgggctccgtgcttcgtcgccgccgctgccctgcggcgagttgggttttctgcgcagctatgtgacgtcagttatcgggaatcgggcagcggtggcctccggggcagggaagggtggggactggaggttcctgcttgctagccggcagttccggcggctattctccgacaagtcgaagaaaaaccacgggaagcattcggaggaggagaataaaggtaaaggggatgagagtgacaagtccgactcaaagaagcaatccagttcaggtgatcaatggaatttcgaggagagcattaaacaattcaaggacatgattgctcctttattcctttttggcctattattgttatctgcatcagcatcttcatcagagcaggagataagcttccaagaattcaagaataagttgttggaacctggtttagttgaccacattgttgtttcaaacaagtcaattgctaaggtttacgtcaggagttcaccttcaattgatcgaattcaggatagtgatatccatataactacaagtcatcttcctgggatagagtctcctagcagctacaagtattacttcaatattggaagtgttgactcctttgaagagaagttacaagaggcccagaaagcattggagatagatccacactattatgtcccaatcacttacactactgaagcaaaatggtttgaggaagtaatgaagtatgtcccaaccgttctaattattggattaatatatttgcttgggaaaaggatacaaaatggatttactgttgggggtggtcctgggaaaggaggccgtagcattttcagtattggaaaagttcaagtgacaaaattggataaaaactccaaaaataaggtgttctttaaggatgtagctggctgtgatgaagccaaacaagaaattatggaatttgttcatttcctgaaaaatcccaagaaatatgaagaactgggagcaaaaataccaaagggtgctcttcttgttggtcccccaggcacaggaaagactctccttgctaaagctactgcaggagagtctggtgtgcccttcttgtctatttctggttcagacttcatggaaatgtttgttggtgttggaccatccagggtgcggaacttatttcaagaagctcggcagtgttcacctagtattgtattcattgatgaaattgatgcaatcggccgtgctagaggccgtggaggtttttctggtggacatgatgagcgtgaaagcacattgaaccagttacttgtagagatggatgggtttggaactacatctggtgttgttgttcttgctggtaccaataggcctgacatcctggataaggctttgctaagaccaggaagatttgatcgtcagataagtattgataaaccagacataaagggtcgtgatcaaatatttcgcatctaccttaaaaagctgaaactggacaaggaaccatcattttattcacaaagattagctgctttgacacctggatttgctggagctgacattgccaatgtttgtaatgaggcagctttaattgctgcaagaagtgagggcacactcattacaatgcaacattttgaatctgcaattgatagggttatcggaggcttggaaaagaaaaacaaggtgattagcaagttggagcggcgaactgttgcttaccatgaatctggtcatgctgttgctggatggtttttggagcatgccgagccactactgaaggtcacaattgttcctcgtggaacagctgctttaggttttgctcagtatgtgccaaatgacaatcttttgatgactaaagagcagctttttgacatgacctgcatgacactaggtggccgagctgctgaggaggtcttgattggaaagatctcgactggtgcacagaatgatctggagaaagttactaagatgacttatgcccaggttgcagtatatggcttcagcgaaaaggttggccttctttctttccctcaaagggaggatggttttgagatgagcaaaccatatagcagccagacggcatccatcattgacactgaggtgagggaatgggtcgctaaggcctatgaaaaaactgttgagcttataaaacaacataaagatcaagttgcacaaatcgccgagctgctgcttgagaaagaggttctccaccaggatgatcttgtccaggttctaggggaacgcccattcaagacactcgagccaactaattatgatcgattcaaacaaggttttcaagatgaagacagcaataggaatgctgaattgtcaaatgcagatggagcatcatcccttggagaggctgtggcatcataacttggacagaattgtaggtgtatatcgcatgtttgctgaacagattattaatatttctgaggcatgagaagctgtataaaggtgttcatatgccaagttatggctattttgctagattgcgatttccacttcgcgcaggcgttcaatctgttgaatctgccgataactagtggttcagttcatgaattttcagaaatttacttgacgatttgatctctgttcctgtaaggctgtaacctagcactagggcatgagaagttgtataaaggtgttcgtggtttttctg

SEQ ID NO: 24804 - DNA, 2647 bp, Oryza sativa
  ref <308>: DATABASE ACCESSION NUMBER: AK100246
  ref <309>: DATABASE ENTRY DATE: 2002-08-28
gggagagcaaggcagccattctgttcctcctttctctctcctctcttcgtccctgcgtagagagggagagagagagaaggaaccccttttgcctcctctttcctgccaagaaccacattttcccccaatctttcttcagattttccacacaaatctgtacgccttttcggtctaaagaaaaattcagcatcgatattggtgtctttctgcaagaaaggtgggcattggcagcaccaacgctccatccatttaccttctgagcaaacagcttcctgtgaagatcaccttttcttggtgctgcaatctgcattggcaccaaatcaagattcaacatttgctcccatatcatcaaaccaagattcagcagtgtgattttggttgccttgaagctgcattgaggaacctttcatgtgatttttttgatgcacattgatcatccatggctgcgaaaaaccatgcgagatcccaggacttctggaggagattctggtccatgctgtcttatgcttgcagcgagctttgcttgatcatcctgctccatgtggccgcaggagcatcctacctggcgacgaggttggcgcgcatccacaagctcaagatgccatgcatcctgtgcacaaggatggatcatgcccttcatgggaagccatggttctcttcggatttggtctgcgccgcgcataggtcggagatatcatctctggcatactgcagtagccacaacaatcttgcacaatgtgatgatctctgcaaaagatgcactgtagcaacgaatgatgtggttgacacaaggagatcgaaatccaggcagctgtgttcttgctgttcggagccattcaccaaggcgcgcaatgcgcataggatttctgagactgccagtgtttctggggagatcaaccgggaacaaatccctgcagatcattcaaaagataaggcctttgtggtgggtattgaggaggtgaatgaatctgatagttcaccacgaacatatgaacaatccacaaagaacaatggcgcttctggaaatgctgggactgcaaagctagcacccagtggatctactgtgcctatgcgcgttttcgtcgatcgcaacagcagcgtaaagaacggtttcataagtagggccaatctttcatcacctcggccatcacaaataatctctgccaaggacagcaattcaaccactcagcaagaagtgaaggcattcctttcacagatgtctactgtaaggggcattgacagttcttggagtgatggagctcctagccccggaatcaatgcgcaaaccgatgaaagcaatgccaatggcaggaggccatccctcgagaggaactattctgtgatagaaccatcggatgcgaacctcgctgatgaagttgagggagagagctctcctgagaacctgaagcggcttcttgagctcaacaagaagtcgatgagtgctctctacaaagagcttgaggaagaacgtagcgcttcggcgatcgcggctagccaagcaatggccatgatcaataagttgcatgaggaaaaggctgcaatgcagatggaggcactgcaatacctgaggatgatggaagagcaggccgatcatgaccacgaagcgattcagaatcttcacgacttgcttacggagagggagaaagaattacttgacatggatgctgagcttgagaacttcaggaggctagtccagaatgaacaattcaatggcgggaaacatgatatcgctggcataatgaatgaaacagacatgccgtttgaggtcttgaatgacttgggctacacgaagaacaccatgtcgggtttcgaagacgaaatggcgtatattttggaatcgataagcagattggaggataagctctgcgtctccacaaacagacttgcttctgacgatgccaaaattaatcaagagggattgataggaggggctgattttgggagctcaccaacgcatggtgaatcaacttctgatcagcaagatgatggaaacaaatctgttcagaaccataaggataactgttcttgttctcatccagaggatgggaaaacgagtgatgcaaatcttaaggatgaagtctcactgttgcatacgagattgcaggcacttgaagctgatcaggagtttcttaagcatgtgttaaactccctaaggtgtagccctgatggactgcagtgtgtacaggcgatagccagccatttactagagttgagaagaattgcaactcagagataattttcccccctgatttcacaccttctggtcatgagctcttctcatgtagtgctacagaccttcatggtgcttcttgttagagcagcattgaagaggtctagaaatcgatgtcggtgaaagatcatctgaaatgaggaaaaggagcatgcactgacaaaaaaaacttccattccttgtactaatcttcaagttttcattgaccaggctggccccctgttgctgtaattctgtcactgcttcagtaaattactgaaacagacaaaggcatctcctctatatcgatgtgattgctgttaggagcaagtttgtaactgtagatgtaactgatgcttgcggttcttgcaaaagaggagtttaactagtagaatatatacagtgttcatatcaaattaatcaatgtctccttgcttc

SEQ ID NO: 24805 - DNA, 2265 bp, Oryza sativa
  ref <308>: DATABASE ACCESSION NUMBER: AK100247
  ref <309>: DATABASE ENTRY DATE: 2002-08-28
ggcggattccattctcctcttggcatcacgaggcggcgccgcttggtctagctagtagccacagggagaggtggtagccgcagccgccgccgacgagacctcgccgccggggggagggcaccatgtgtggcatcctcgccgtgctcggcgtcgcagacgtctccctcgccaagcgctcccgcatcatcgagctatcccgccggttacgtcatagaggccctgattggagtggtatacactgctatcaggattgctatcttgcacaccagcggttggctattgttgatcccacatccggagaccagccgttgtacaatgaggacaaatctgttgttgtgacggtgaatggagagatctataaccatgaagaattgaaagctaacctgaaatctcataaattccaaactgctagcgattgtgaagttattgctcatctgtatgaggaatatggggaggaatttgtggatatgttggatgggatgttcgcttttgttcttcttgacacacgtgataaaagcttcattgcagcccgtgatgctattggcatttgtcctttatacatgggctggggtcttgatggttcggtttggttttcgtcagagatgaaggcattaagtgatgattgcgagcgattcatatccttcccccctgggcacttgtactccagcaaaacaggtggcctaaggagatggtacaacccaccatggttttctgaaagcattccctccaccccgtacaatcctcttcttctccgacagagctttgagaaggctattattaagaggctaatgacagatgtgccatttggtgttctcttgtctggtggactggactcttctttggttgcatctgttgtttcgcggcacttggcagaggcaaaagttgccgcacagtggggaaacaaactgcatacattttgcattggtttgaaaggttctcctgatcttagagctgctaaggaagttgcagactaccttggtactgttcatcacgaactccacttcacagtgcaggaaggcattgatgcactggaggaagtcatttaccatgttgagacatatgatgtaacgacaattagagcaagcaccccaatgttcttgatgtcacgtaaaattaaatctttgggggtgaagatggttctttcgggagaaggttctgatgaaatatttggcggttacctttattttcacaaggcaccaaacaagaaggaattccatgaggaaacatgtcggaagataaaagcccttcatttatatgattgcttgagagcgaacaaatcaacttctgcatggggtgttgaggcccgtgttccgttccttgacaaaaacttcatcaatgtagctatggacattgatcctgaatggaaaatgataaaacgtgatcttggccgtattgagaaatgggttctccggaatgcatttgatgatgaggagaagccctatttacctaagcacattctatacaggcaaaaggagcaattcagtgatggtgttgggtacagttggattgatggattgaaggatcatgcaaatgaacatgtatcagattccatgatgatgaacgctagctttgtttacccagaaaacactccagttacaaaagaagcgtactattataggacaatattcgagaaattctttcccaagaatgctgctaggttgacagtacctggaggtcctagcgtcgcgtgcagcactgctaaagctgttgaatgggacgcagcctggtccaaaaaccttgatccatctggtcgtgctgctcttggtgttcatgatgctgcatatgaagatactctacaaaaatctcctgcctctgccaatcctgtcttggataacggctttggtccagcccttggggaaagcatggtcaaaaccgttgcttcagccactgccgtttaactttctatcgtcgcataaaactccgtagtttgttgttcttggttcaatcccagcttctttcagatgtcgttagtttcttcaaacatgtaatggagatgcgtgcttttcctggcttgttagttactgtatgcttgtcatcgtgtatgttttcttttcttttccaatatgcaaactgtttggtcgtggactgatcagaacattgtaaatatgaataaccgcgactgatatcctcaagttgcttttggtttgcaatagttctaatcttgatgttctgctgggaatcggaagatgttatgcagtatgcgtattgttggggtgtaaccgtgtaagtgcatctgaaatgaagttacgggcgatggtaactggg

SEQ ID NO: 24806 - DNA, 2179 bp, Oryza sativa
  ref <308>: DATABASE ACCESSION NUMBER: AK100248
  ref <309>: DATABASE ENTRY DATE: 2002-08-28
gtattgccgtgtggtcgccggccgtgagcagtctcatactctcagttagtactctatcagtgcagcagctaagcctcagcctcagcctcagctagctcgcccgacgcccggcccctcctctgacctctctctgcggccggcgccgctcatggagtacggcatcacgccggccggggggtttcggtggagaagctaccgcgacttgatcagggacgtgttcatcgccggcgacatgtactgcgggccggcgaagctgttgttcccgcagatcactggtagtgccggcgaggatcaagcgaggtgcggctggtcgagcgcgagctccgtggcttctagccccgtggtgtcgtcttcttacatgtcatcctctggatcccctgcttggtcctcggcgtcgtcttctcccgtccacaagctccgcgtcatcgctcaacagatggtcggcgacggctacatacaggaactcatccgggcgttcggccgccgccgccccgacgagctcatcttccagaggtggttctcgcagctggacgtggactttgtcctggtcctccacaccgacggcatggtgcgagctgacagcttctccgtggaagacctgatggccttgataaagcggtggatccgagctctcctgaccatggtgcaggtcctcaatatcacgctgctcgagctcccactcccggtcgccggaagtacggaacggatggcggcggcggcggaccacgcgcagttcactgggttcgcggaggagagcatcctcaggatgctggccttcgtcgacgccgtcactctttctgctctcaacgtcaacgacgaccaccgccaccggacgccggagctactcccggggatgctgcagctgtacgcctgcgtctccgaggcatgcgatctcctcgtctcagctggcatgggcaaggacgagatcacgaagatgcaggccttggacgccatgaacaatggcatcctgatgcaaagcaggaggaagctgagcgatgctatctgggtcatgatggagaaggtccgggctctcttcttgatggacgcctgctggcaggtctcgcaggaggcagccgcatccgggacccatgagaccacggagctgacgatgaactacatcacgcttctctggcgcaaccataccatgctcgactacttcagcgtgttcgtctccgacgccgacagcttcagctcggtggcgagactcatcgccgagatgatcacctgcctcgagtgcaagctcgaggaaacctccctctccatcccggacctgggtttgcgcttcatattcttgctcaacaattggcaccgtgtcttgcagcgtgttgaatccttgcgagacttgccagcggccgtccggcaagaacgaatccttctcctccatgcctcggacagcaagattaagaggtacatagacgattatcttaatgcctcctggtcgcctctgttacgttgcctgctcatcgacaagccttttgttgctctcgggaggtctcatgaatctaaaattgagacacaactccaaacaacctacgcaacacaaaagttttggaaggttccgaaccctcagcttcggcagagactgcgtagagccatcatgagcaaagttattccagattatagtaaatacatagagcaaatggataggcagaataaaatcaatcgacacctcgtggtcactagtcccgagcagctcgagcagcaaatagaggaattatttgaaggatgatgattattaattcaactaggaaggtaacccccgcattcacgtgggtaagtatgttttttttcacgtgtttgaccatttatcttatttaacgtttttatgcaaacatgtggaaatgtaagtcatgcttaagttataaaccaagtcacaacaaaataaataataatatttatttttaatatgctacgtgagccgtggatctcgcatccgacggcggagatctgtagttagctgcagtacgaactccaagatgtaatgtgtgtatgacaggtgagactagatattaatagtatagtaagcaactattgtaagaattgactattacattggctatagatgatttagagttagtagtaggctatactattaaacttgctcttatgcattcaacggcatggtttttgacggaaggtacacgtgtttgaccatttgttttatttaacgtttttatgc

SEQ ID NO: 24807 - DNA, 1375 bp, Oryza sativa
  ref <308>: DATABASE ACCESSION NUMBER: AK100249
  ref <309>: DATABASE ENTRY DATE: 2002-08-28
gacgcgccgcgcgacacaatcagttcaccaccgcagccacccctagctaaatccctcggcggcgggggaggtggcggcgtgcgtgggcatctcggcgggggtcgtacgctcatgtcggcgctggtttggctctgcgtattggttttaagtggatttcctgtgcacaatgtcatcgattcttcgatccattcagctgaggaacagtatatggagtagcttccctgtcagatttcttaagcaacaagccggattatcaactgtagaattgcttgatcctagaagctgtgggaaacgacatttcacaacacaagtacaggaacatgggaaggaagttgcggcggcagcaactattctagtttttgatcttgagactactggctatttccataaggatcatagaatagttgagtttgcactctgtgatctttctggaggaaagaatagcacttttgaaactcttgttaatcctgaaaggactgttcctgactacgttgaacatctcattaaaattggcactgatctcgtgtgcaggcctggtatcccaaggtttagtgatgtaatcccactactattggcattcgttcgaagtcgccaagctcctggcaagccagttctgtgggttgctcataacgcaaaacaatttgatgctcgtttccttgctcaggagtttgatcgttgttcagcaccacttcctgcagattggctgttttttgacacccttctcttggcaaaaaagatggtgaaagcagagggaaaaaaacgtcgtacaagcttggaggcactgagagaacactatggcatcgtctcgcatgacgatgcgcatagagcaatgcgagatgttatgatattgtctcaggttttccagaaaatgacttttgatctaaaactgacaaatgaagaactaataaacgaggccatgaaggcaagtgaattcagcaagatttcttaatttttaaaactccagctttttttagtgcttaaacttatttaaccttctgtgcacatgctggatatttttctagctggtgtcatctcggcattaaagaactatgccttttttactattgaaatagtacctgtatttttcaataaaaacctgcaatttggaccgaacaagttgatatcttcattgctaccaggatgataaaaccatggctgaaccatttgcattggatgaccatcacatctatttgatatgcttcggtgctggattcagtgtggaatgatatttctttgatttgtcttgctttatctatgagctgtcagctattgaaaagtattattagtgctttttattcttgggtagcatatgccatttaaattatttgaacttgtgagatcaatacatcctggtggaagttagttgggacctgtt

SEQ ID NO: 24808 - DNA, 2349 bp, Oryza sativa
  ref <308>: DATABASE ACCESSION NUMBER: AK100250
  ref <309>: DATABASE ENTRY DATE: 2002-08-28
gaacatctctctgcccaatcctcctcccggccaatccgccatccccatccccggccaatccatgcggcctcctcctcccggccgggggcaaggacggcgccggcgtttacaaagacgacggagcaaggggacgacaacattgccgccctccaccatgcctcctgtgctgccctcctctaccatgatggcctcctcgaccttgtggttgcgtccacggggggagggaggaggcggcacccgcccgagctgccgccggtgctcccctcctccttctccatccacttgtggtgacggcggcggcgggtggagggacgcccgctgaatccgccaccggttctccttccctccttgttctccctccacttaggccggcggcggcggtggtggcggggggagggcagatccggcgcccgacgccggcggatccgccgtcgtgccccctcccttcccttgtggcggcagtggcgagggtacctacgttggcggcagagccggctgcgcgtctgccgccgatgcccttccctcatggcggcgtcggaccggccgcctgcgcaggactgccgtacgtcttcccccgtcgccgcgttgcctctccgtcctctcctccgcagcttcccaaccgttcccctctcaactctcgacctctcctctctacgtggaacaccatgaccgtcgccgccgaggtcgacgcatcccctgacggagaggagaggaggaagcaagcttgcaatcgcacaaccatctatcgatttctcccttccttctctttcttctttctttctttcgtttccccctctcacatgtcaggttattttttctcctcatcctctccggatgatttcacttttgctcgaaatctctcaggttgttgttgtgttgaaggtggcgaagggggaaactttggtggtggtggtggccggagtggaggatggcggcagcggtggcgatgcccgatgcggagcggcagcggcagtgacggcagcgggtacgacaaggccgggatggactccggcaagtacgtgcactacacgccgggtcaggtggaggcgctggagcgggtgtacgccgagtgccccaagcccagattctctcgccgccagcagttactctgcgagttatccatcctcgccaacatcgagcccaagcagaagatcaaggtctggttcccaaaacagaaggtgagcaaaagcatgcagggatatactatcaaactggtttgccttttgtgtgtctggctgtgaaatgttctggacaaattggttgacaatggagcaatagcaatagtagtgttcaattgtttgccttggttgtgcatactctgcttcaactatatttaggaattgcaagtctatgtatttatttgttttgcttcctttcttgcataatggaacaacctttatataatcaaggaagaatactgtacttaccagagtatgtgccagattaagccatccattaattagatgctgaagtaaactatatgactatattgcgatgtattctaattccactacttacaaaactgtagggtataagatttgcttatttttagaagataggctaaacgagggtcatttaggtcacatggccaaactaagacacatatacataacgtattatcatgcatctgatagtaatgcaaaacaatgcagtactatttactttcactgcaggtatttaggctctatcttttatttttctcaagaggcacttaacatgatatacaaaatttgaagagttacattttttaaaaaacttctatgagttctgcctaaatgattgttatccatggtgtgcctaaataattgttcgatctagaggtgatccaaagattcgtctatattagacgtaacaataatgcagtgttttttttgtttattttttagcctacaaatgtttgacaagaagaggatgaaagagtgacataggcgagctctgtagcatatatagaatgtttgctatccactggtacatctttaacccgagcctacctactgtatagatgtgtttagtacgtgcttactatgcttaattttggggataatatagtacgacgtgtaagaaaattcagaactatgttgtatgctctagctgaatttgtttacttcctacaaaaaaatggatgaactactgatccagttcatgttgtgatcctcctccaaggagtttttttttgtttctttgctatctgaaagattccttttttttttttgctttgttgaagtggaaggagctcattggtgtacctttgttgaaatggctcctttgcatcctcattgtttcacatgtctgtttcatttccgtttttaagggactggccttattaaaggttgtttaaaagcttgaacg

SEQ ID NO: 24809 - DNA, 4147 bp, Oryza sativa
  ref <308>: DATABASE ACCESSION NUMBER: AK100251
  ref <309>: DATABASE ENTRY DATE: 2002-08-28
gagagttggaactccaaatccccttctcttccgacgccggcgccggctagtcgccgccggccactccggccggctcaccgtcaccggcctctcctccccgcccaaaaccccacaccccatctcacgcccagagatcgccgccgcgcagcctcggcggcggagacggacgcgattaggtatacacagaggttgctgacttaagaaatactcagaagcagcataattttcagtatgaatatggagttcgagctagcaacttcttctgcatagtagattatgctaataagcaagatgttttgccacaaacaacagaacttcagaccagatcattatttcaaagtttcccatgtttatccaacgaatatgatttttatgagaaaaactttgtgtgatcttgactgaaaagagcaactggtgctgatatgaagaatgaaggagagatacactattagttaatcaagttctattgtgatctctacaaagaagtatggtcttccagacaaataagttcctgtgtcatccatgatgtttccagagagcaattctctgttcttttcaaaatagccatgcatctctgcagatgcatgtggagaaacactgatccagcatgtacaccaatttgccagatgtgtatgcgtatcaatcaagagaatgcaccaagccataatactgtaccttcaaccttcaaagatttgtcaaagaaatgtcccgatgttcattgaagtgtcgaataactggaatatgctcaactctccgatgcttaacaccaccagtcatcaagctctccacgaagttcttgggcatggcaaataagtaaagctctttgaggttctctaacccttctataccatgagggatggtaagcaatttgtcgcatgacctgatggatatcttctgaaggccaggcattgatttctcaaggttgatatgctctaggttagttaaatggtccaactccagtatctccagcctggcaaatccttgggtaaattctagctttgtcccatcataagcttgaatcagtgcaagttcaacaagagggagactttggagctctttaagtgagtcctcgttcaggcgtgaccacctaagccgtatcctcacaagattcttgagggagtgcagccaagaaggtattcccggcaatggccccctcagatagaggcgcctgaggcactgaggagcaggattcagggatccgagatcaagaatttcatcatcaagcgatgacgctgaaagggaaagaagttccgtcatcttggcaaccgatgagcagaggtgcatgcaatccctttcacgcagcttgacaatgcccaatcttctgagctgtgtcaggctacctagctcctcgatggtcccatttccttggtttgcttcaacataagtcagcttctgcagctcctttaaattccctattcctcggggaagtgtgactccgagcgtatagtaatatggcggatgccgaccggagtaatatcggtaagcaagtaggtgtcgaaggctttcaagcttggtgattcctgaaggcagctgagagacatgtacctttcaggtccaatgtctgcaagttcatcatcttcttcaaagactttgggagcttgtcaatccttgtattcctcagactcaaataacgcaggtagaaaaggtcaggcagttcatctggtaagctctcgacaggtgcaccctccaaatctaggatcctcagcaaccgaaatccgaccagaaatgcgtgcagcgacgtggtgcttattgagctagcaccgaagacaaacaaagtgcggaggttggtgcagctgttgtcttctaggaaatcatcatttgtattgatgatggacagacgtcgcacatttcctctgaccttgttaactcctcgggtcacaggaatgccaaagttgtcctcggttgacttcaagatgatgatctctcgcagcatatcatggacgctgcagctcttcaccctcccataatcataaaaatctgccacttggaccatgcccctgtctatgagctctgtcagataacggcctgcagtgtcctcaagtgtgctttcctggtcattcttgatgaacccttcagccatccatagccgaatgagcgtcatgcgcttaatagagtacttccttgggaacatgatgaagtacaaaaggcaacatttgaggtggtgaggtaggtcactgtaagcaaaccacaggatgctagggagggtaaactcagggaggtacttcttgtgcaagttgtcaagcacattcttccaaacctggactgtttgttccttcatcgacattagtccaccgatggtgacaacgagcaggggcacgccatggcactccctgacaatctttcttcccgtctcctccagttcagctggacatcttgcctgaattgctgggaaagccttgttgcagaagagcaaccaagcatcatcttcattgagtggtctcttctcaaagatctgaatatcagaagctaagcgacagtctctgccaatctcttgagctcgtgtagacacgatgatccgactcccttggccattgttgggaagagcaagtttcaagtaatcccacgtatcagaattccatatgtcatccaggacaaccaagaaacttttgtcagcaagataccgtccaataacctcagcaatctgaatctcatccatgaagtcaagtcttgctggtatttcctccaacttctccacaaatatttgcaccatgatactcttcagtcgatccaccatcgggatcggggcaccaattgtgatccatgcatggcaccggaacctcccttgcacttttttgtcgttgtaaacgctccttgcaagagttgtcttgccaacaccggcacttccaattatggagatcaccctcagctgcttttcttcgtccagcaacagttgagttacctttgcctttggataaccaatgcctatcactttagcctcatctagtgagagcatgtcaagctgccggtcatccagctggtaccgtgttggatttgctggtgcctccttgtcatcaaagttggtcagcagtgacagcctcaatttgatggtatctatgcgggcactgagagattgcacctgcttgtatatcctctgccgcgcaacaaaattgatcggctgagtgatgcatgacaggatgttggatccttttgagctgcaggtcttcgagggggacttctcgaggatgtcttcgatgtcgcggttgatctctcgtacctgatgcaaccaaatcttggctgtctttggcatgctctcgatctcagggcctcgcagggtggcgctggtggaatcagtaagctctttcaccttgtcaatgttttcccacaggattctccagaggatgtcctgctccctctggagcacttctatgagcttcttctgaggtgagggaacagcaggggcagccatgtctccgcactgtctatggttctttctctcaagacaaaaggaattgggaagacctttgctcttgctgcctgcagtgttttggtgtataaggagttatctgagaagttggagttggtaattcatacacttagtatgctttgatgtgagaatcaaagggtgcaagccaaggttgccattgcaaatcgtggtgtgaaaggaagagctgaagaaaccagctgttagcttggaggaaaacgtggggcagctatggtcttggaagctagctgatggtgaaacattacttgtgagatcaatcgaaatatttaacaggaaagctggcgtttcttttttatgaaatgattatcatccacaaagcatggtggtagttgccatttggaactgctgtcagaattaccaagtcaataacccatgcttgattattacaagaagtgataccagtgaaagatcaagtacacaaatgcagcaggtaaatcagtggtcataggatcatatcgagccaggaataagaacatttcaagaaaggcatgcattcatatttcttaatttttttttgtttcctggctatcataacttttgacatagcttgctccattgaatggtaatctcgtgttagaaagtactccctccttccataagtggaaggagggtgtatagaagcactgtaactatagtttgtcattgctgatgagacaagtatattgcactagaaaagaagtactgacctatacatgttccagaacc

SEQ ID NO: 24810 - DNA, 1451 bp, Oryza sativa
  ref <308>: DATABASE ACCESSION NUMBER: AK100252
  ref <309>: DATABASE ENTRY DATE: 2002-08-28
gaaattgatcgagcaggcaaaaaccaagtgaatcgatcggtcgcacacacaaaaactagctagtacaatggctgaaaggaggagcaatatgatgatgatatatggttttaatttgttgatcgttgctgcggctgtacggtcgtcgtcgtcgagcattctcggcgacgcgacggtcgtcagcaccgacgaccgctgggtacggaggaggctcctgctcatcgatgggatggtggacggcaagcggatgaggaagaccgtggtcgtagcgaaggacggcacggccaatttcacgacgatcacccaagccttgggcgcagcgccgccgagaggcaggttcggcatctttgtgaaagcaggggtttacgaggaaacggtaaatattaccagaccaaatgttgtgctttggggagagggcatcggcaaaaccgtgattactggaagccgctcttgccccatagaaaataataagaccaagaccgacatgatgccttggacggccacagtcactgtgcaagggcatggatttatagctcaggacgtgacaatagagaacaaggcgggtccgaccggtactccagccgtcgctctgcgctgcgactccaacatgtcccttattcaccgctgccgcatcgacgggtaccaagacacactttgggcccaaaacaacctgcaggtgtatctgcggtgcgacatcgccggcacaattgattttgtgtacggtaatgcgaaggccattttccagtattgccgcttactggtgcgcaacccgggcaacggcaagcacaacgcaatcacggcgcaggggcgcaacgacccaaccagcgaggagtcggggtttatattccaaggttgcaacatcaccgccatggaaggagaaagcctcgcgggggtggatacctatctggggaggccctggaagaaccattccagggtggttttcatgggctgtttcatgagcgacatcatcaaccctgacggctgggttcactggaacaaggcaacacctgtggaggagacgaccaggacagtggagtacctggagtatggcaacaaaggcgctggggcagagacggccgaccgtgtgaagtggaagggcgtccgggtgatcaccgaggcggaggccaaccgtttcaccgttgatcacttcatcaacggtaaccagtggttgcccaacttggtcaacggcgagcagatcaactacacccacggtctcatctagttacactcttacaccatcattgcatacatatatcacatgctgtgtactggagtattgtatatttgtattgtattgtaccgtatcaacaatgtcccttgtgtatgtctgtaactatatactctactgtttgcatatgtacgtaccttatattgtatttgttagtacgtacacccattgtatgtatatataaataaataaagatgcatgagccatgtgctcgtgcacttgtatt

SEQ ID NO: 24811 - DNA, 2552 bp, Oryza sativa
  ref <308>: DATABASE ACCESSION NUMBER: AK100253
  ref <309>: DATABASE ENTRY DATE: 2002-08-28
tctggcttccttccggcgagggcgaggcggagaggtgggcgcccgcctctgcctccgcctccgtctcgccgcgctccggcgggtggccgggccggggtgcctccacggcctcgtggaagccgcgctccggcgccgccggcagcaacgtgtgggcgaggctgttgctgcgagcgcccgcagagaccactccgcttttgaaggatgttatcatgtttgaagaagcttgaaataaatggttcaagtagttccttgttgatggttgaaggtgggagcgctgttagataccagtttccagtaaagaaacttgtgatcagaaagtgtggtgctagcgggaaggaattgacgctgctgctgtcccatttccccaaactctctgacttgacaatgtatagattggagaagatagcaatgcttggtgtggctgagcagcagataacggcaacatcggcatcttcaccatcactttctggtaataagttggagaatgcacgtttcggacaagagcaacaacagccaagaggagaggacgagaaagcagcggcatcttcaggactgctgctcttgcctacccagctacaggagttgttcatctcctgttgctcaaagctgatcctccaccacgattcacttggagaaaacatggaaggacgcctaagaggcatagaaggagggttacaaggcctgcgctccctcgtatcattgactattatcgattgccctgatttcttctcctcctactcatcatcttcctcatctttcccatttccttcctccctgaaatatctgtctattgaccgtgtaagtggcatggagactctgtcgctcctctctaacctcagctctctcaccaacttaggcatagaatgtggtgatttaagaggcgaggatttgtgttctctgctcgcccaaggccaactcacaaggctgcgagtcaacaagaaccccaaattcttcgtcgggatcaacccctcatcactgcagcaccttgtaacggatgacatcgcaggagtgcttgttgtgcccatctgcggactcctctccccctcactcaccaagctaaccattttttgcaataacgaggtgaaacgcttcaccaaggagcaaaacatggcccttgagcacctctcctcccttcaggagctcagttttagtttttgccggctgcagttcctcccctctgtgttacacaggcttgttagcctcaagagattagagatctcgtgcagtgagttcatcagttcgttgcccaagagtggtcttccaagttcactagaaatactagatgtctctggaggcagcgaggagctcaaaaggcagtgccgcaagctaagaggaaccattccaatcatcaaagacagcgactgggatttgattgattctttcttggattagtatgtgccttattctagtcttggagaatcttctctgcatccatctccattgagttgataatcaacttgtgctgcttccatcacgtgtacaaaaactgctgttctgaataggtattggcagtgagagaattgtgggatttaatcccctgcacacagaaagaacttcaccttgtcgccgcctccaccgtctgtcagctaggtaacgagcaaacaatccttttccgggaggacaattggttgcaaggaggaaccatccgagctattgcaccctccatctacgatcatgtctctactcgtatccggaagcgccggatggtggctgaagcgctgtctaaccgtagatggatcaaggacataagtggcgcgcttgggactcaggcaatactcgaatacctcaaactttggtcgctgattcagtcagttgattgttcttccgcagagcccgactcactctcctggaagtgggaaagctcaagcaaatacacttcaaaatctacctaccgagctttgttccttggacgaattgcctttgaatccacaccgatctagaactcgttggcaccacctcgctgtcatttcttcctctggctggtcgcgttgaatagatgctggacagccgaccgattgcggagtcggggattgccgcatcccgaccgctgcattctctgtgatcagcaggatgagagcattgatcatatcctagtcggctgcccagaatcaaggcagctttggtggtggactttgagagcaatcggccaccccaactgcctgctggtgaatgaagcttcttttcaccaatggatgtgcgatagcagaatggtgctaagtgagtcacatcgttgaggcttcgacacggtggtgacattggtagcatggacaatatggaaggaacggaacggtcggatcttcaatcagcagtgtagatcttgggcggatgtggccagagggatggtggacgaagcctctctttggcgtaaagcaaacccggcgatccttgcgctgtaattcaggagggagtttggtcgccaaaattagcgtgagagatagacttaggattgtctgttattgtcctgtatcagtcccgtgctgtttttttttctttcaaatgtaaataacttttatttctcttaatggaaaaaatgcgctccttgcgtattcccg

SEQ ID NO: 24812 - DNA, 1566 bp, Oryza sativa
  ref <308>: DATABASE ACCESSION NUMBER: AK100254
  ref <309>: DATABASE ENTRY DATE: 2002-08-28
ggcacaaagtctgaggcggaactaacccaccaatccgccaccaacccagagcgccgagaagcccaaccgcggcgagcagtgtgccacgggccggcgcgccggcgaactcctcctcctatgctcgccgccggcgatgcccagcccgctgaaggagcgacccgccggccgactcggccgcctcctcgccgcgctccgcccggcgcgcgctggcccgctccccgtccagacaggcttccccacctccctcgctgacctcgtcgtcaagaaccatggccgcctcaagaagccctccgcctcggcgtccaggcgcaagaagcgcggcgggccggaggctcccccctcgccctcgccctcgccctcgccttcccctccgccgcagccttcctcgccaccaccaccaccaccatccccgccgcctgcggccgctgtctcggtctcgccgccaacccagccgagaccgagaccggaacttccgccggtggaggccgtcctccgccgccagcccaagggccgcgtgttcggccttgggctggggttcgtctcgctcgtcggcgtggtgtcgctcgccctcctcgtgatctggagcaagaaggtggtcgcggccgtcaccgtcgcctccttctcgctcttcctgctcgagtccgtcaggtcctccgcgctttcccggcggccgcggcggccggcggcgaacaacaagctggatttggacgggcgcggctacgtctcgccgatccgggaggtggagccggcgagggcaagcttctccgattcctccaggcgaagcgagttatccatcctcaccattgaggagagaagcgaggtaggcgacgattcgatagtcgccattgaggagagaatcgcggcaggcggcgacgactcaagcaacgccaaggtcaagaccaagaaacggtcatggaggaagctgattccccgcaagttacagaagggcatgaagggcaaggaggcggaggattcgtcgggttctttccgcagcagcgaaggcaaccgaggtgacgccacggcgacggattcctcggactctcgccgtggaatgcgcaccaaggccgcggacgccttcgtcgccagatcgatggattcttcgccgtctttccgcgggaacggaggcgacacggacgccgacgcttacagcaatgccacgcgggtagaaatcgacgcgccggccgatgtcctcgccggagacggcgacgccgtgggagggacccggtcctccgtcgcgctcctggtcgttgccgtcgttctcgtaggcctcgtcgccggcaagctcccggccgtcgtgttcaccgtgctttgcggcgtgttcattagctcggttcagagattgccggcgggcggtgacggcaacggcgatcggagctttacatggtggtttaggatcaaacccaaagatgtaaattagtggcagaagaaaggggagagttgagtgacaaaagaaagaagcagcaaatacataaatatttgttcttgttgctcgtgtcgttcgtgctttgcattcattccttactgaatcggaactcgaagtgcaatgttaacttaacaacgttatgt

SEQ ID NO: 24813 - DNA, 1986 bp, Oryza sativa
  ref <308>: DATABASE ACCESSION NUMBER: AK100255
  ref <309>: DATABASE ENTRY DATE: 2002-08-28
ggtttgcttcctcctatcagatgagtctatggaagcatccggccgcggccggagacggcgaggtggtggagacggtggtcgagctgctcgcgcgcgtccgggggatggtgcctccggcgctgggcgcggccggcgcggcggagggcttcccggggcggtggaaggcgatcgccgcgaagctggaggggctcccggcgtgcctgtccgacctatccagccacccttgcttcgccaagaacgcgctgtgccgcgagctgctgcagtcggtggccgccacgctcgcggaggcggcggagctcgcggcgcggtgccgggagccgccggctgccgggaagctgcagatgcagagcgccatcgacgcgctcgccggtaagctggacctcaacctccgggactgcgcgctgcttgtcaagaccggcgtgctgtccgatgccttcacgccgccgcctccgaccgacgaggcgacgtcgacggcgacggcggcgcaggcggacgtgcgtgagctgcttgcgaggctgcagatcgggcacaccgaggcgaagagcctggcggtggatggtcttctcgaggcgctcaacaaggacgagaagagcgtcctctcggtgcttggtcgcgccaatgtcgccgctctggtgcagctgctcacggcgccggcgaccaaggtgcgggagaaggccgccacggtgatatgccagcttgcggagtccggcggctgcgaggggctactcgtgtcggagggcgcgctgccgccgctcatccggttggccgagtccggcagcctcctcggccgtgagaaggccgtcatcacgctgcagcgcctatccatgtcatctgacaccgcccgcgccattgccgggcacggtggcgcacgcccgctcattgagatgtgccagaccggggactccatctcgcagtccgcggcggccggcgcgctcaagaacctctcggcggtgccagaagtgcggcaagcattggccgacgaaggaatcgtccgcgtcatggtcggcctactggattgcggcaccgtgctcggctccaaggagcacgccgccgactgcttgcagaacctcacgtcgagcagcgacagcttccggcgcgccgtcgtgtcggacggcgggctccgcagcctgctcgtgtacctcgacggcccgctgccgcaggagtccgcggtgagcgcgctccggaacctggtgagcgcggtgtcccccgacagcctcgtgtcgctcggcgtgctcccgcggctggcgcatgtgctcagggtcgggtcaaccggcgcgcagcaggcggcggccgcgtcgatctgcaggatctccaccaccacggacatgaagcgcgtcgtcggcgagcacggctgcgtgccgctgctggtgcggatgctggacgccaagtcgaacggcgcgcgcgaggtcgcggcgcaggccatggcgagcctcgtgggctaccctcccaacgccagggaggtgaggagggacggcaagagcgtgccatgcctggtgcagctgctcgacccgagccccgcgaacacggccaagaagtacgccatcgcgtgcctcctgtcgctcgccgcggccaagaggtgcaagaagctgatgatctcgcacggcgccattggctacctcaagaagctctccgacatggacgtcgccggcgccaagaagcttctggagaggctggagcgcggcaagctgcgcagcctcttcagtagggactaaagcagctgtaactacaaagcttcaccacttacacgttacgttgccaagttttttttttttttgttgtataacctgtataaaagatcacatcttgttttcacagtctatggaacacggggcttgtgcagtgcaaatgctcatcttgactgaatatactgaggtgtaattttccctatattccttgtgatggatactactcctatgtaggaaagcaaattatactatctggttaaaccgaaattaatggataaccggtgtactcaagttattgttc

SEQ ID NO: 24814 - DNA, 3024 bp, Oryza sativa
  ref <308>: DATABASE ACCESSION NUMBER: AK100256
  ref <309>: DATABASE ENTRY DATE: 2002-08-28
gtctttccctcggccgcgcggccgcgccgcgggggttctagaaggttccggaaggtgtggagtctcggtgccctcgtcgctcgcctccttcctccaggcgtccgccgccgccggcatacttgaggtgttcgcctaaataattaggagaaatagaatggattcttccgccggtgatcctggcgatggcgttccgtccaaaagggcgaggacggagagggatccctacagagtcgagacgatggaatttttggtacttgtcaagtcagagcttcctgacgacgtatacagccatttcgtccgatctatgatcaagataaggaggcagaggaacatgtcgattgaaaaatgcaaagaaattattctcgagatattggacggccaacctgaagccatacaggtcttcgagcacttcatccaaggatatagcccttgcagagcaaagatgcgtagcaaggcacacaatttcgttgagagagtgaaggcatgtcctgatatcagccgcgaagatttccatgctttgctgaacgttcttgctaaatattataagaacgaaatcaagaccagcgaagaagttctcgaaaaggttgagagaatcataggtaactatcccgagttcctagaagagttcaaaatttttgtgcctcaccacctaagggctcatctgccaaatgagaaatcttgcacaagtccaaagagtagtcgagtcagcgagacgtttgtgagttttactctagatgctatgaataaattggatggtctccgagtaaaagcaaccaatggaagaaaccaagcgactccattgaagtatactcaggaccaaaaccaaaaccatgaaggcagaggttatagtttgaggcataaacaaactaagagaaccactggcctgattgaaaatcctagaaagcaaggtgatgacaaatcacctcatgcagaagatgatgaggaacacaaggctgaacctttgcttcagtggagtacctcacgagaaaacgaattacccctaaaagtggatcctagtaattgcaagcattgcactcctagctattgcctgctaccaaagaattgtgtgactctccagtcaagctaccaaactgaacttggaaggtctattttaaatgattctttggtttctgttacatctggacgtgaggattgctacaagttcagaactaaaaatcaatatgaagaaaacatgtttaagtgtgaagatgacttgtttgagagtgacatgctattgcagaggtttagagcaactgctgactttattgaggatcttcaatatcggtttggcagcaatgtgaaaattcaagaacacctaactcctctacataagaggtgcattgaacagctatataatgattctggcattgacatgcttgatgctttgtcagaatctgagaacaccagttctgctcttgctgttatactttctcgtctaaatcagaagataggagatttctccgaggcacgattatccttgaataaaatgtgcccagatactgttgccaataattactacagatcacttgatcattgtagtccctccttcaaacaactagacatggaaaggatgagcccaaaagctttgctggcagaagacaaacaaatcagtcggatcaaatctcatactgatattcacattcatgaggacgtaggcgttatcattaactatgcatatagtagaagttgttctactgaagataagccaatgatgaattggacaaagttagtaaaggcatttgtttctgtgaagtttcaatggccagacttgaaggatacagtttctcgcagaaacgtttgtgaacattgtgggatgagcagagattttctcaataatattcctgttgctgtgcttactaatgagtttgttttttcttcaaaggaagtggaaagtctaagagccaagtccaatgagtctacttcttcgcttgatcattttgacgcggaggttgaggagggtgagttcataccagatgtagaaaatatacagttgcgtgttcgatgtttgcctaccaataattctatgcatagtacctatggacattggagtggatctgaagagcataaatcatcaagagatgactccaacaatgaggttggaagttcagaatattttggaagaacatctaaagaatgtgatgcaaacagaggaatatcttgttgcactctggctgtgctctgccggcttctccaggttatgtacgagagactactagtagctaagaatctttcagaaggagcaagcacccatgattcatatgcacatttcaaggagaaactctgcagcctgattgatgggtctactgacaattggaactttgagcagcactgcttgaaatttcttgggcccaactcctacgtactatttactttggataagcttatcgatcgtgttatcaagcagatttgcaagatatatccaagccgtgaagacagctctgtccttcagcggcaagagaggtcaagaagaacatttaacattttgaaagacccagctttgccggcaagaagaacaaactcgtccaaagagctgttgcatcatcaaaatgcaagaggcacatcaattgagttgccgaagcaaggtcgtgaggaagcaaaaggaggttgtgagtcccatggtgacactggaaaaatgaaacagaaccattttcagagaaggaaaaaacgcgctttggagaacggtccaccgagtttttctcagcctggctcagggaatcaagctcataattgaacatgtagttatatgcagccctgcagaaggctatagatttgcaaggatctttcaacacaaaatgtgcacggcacaacagctatttgaggatatctggagggaagcagaaattttcatggagaagcaggacacagcataaccagccctagggagaggttctgcctaggcagagagctctgcaacctcccgctctcctgtagtaactctctatcttctcaacctgggtagcggacttggccaaagccctgtaaattgatccttttgggctagttctccaaaccctgtaactttgt

SEQ ID NO: 24815 - DNA, 3236 bp, Oryza sativa
  ref <308>: DATABASE ACCESSION NUMBER: AK100257
  ref <309>: DATABASE ENTRY DATE: 2002-08-28
gctccgcgtggcattccgtcccccccgcgtgacgccaacaatgcccaacaacgcagccatcggaagcatcgtcgccgccgtcggcgtcgtcgccgtggtctgcgcgatcgccgcggtcacgagctccaagaaggatcgcaatggcgagctcaccgccaacgtcaggctctccaccgtgtgctccgtgacgcggtaccctggcaggtgcgagcagagcctcggccccgtcgtgaacgacaccatcgaccccgagagcgtcctccgcgccgcgctgcaggtggcgctcgaagaggtcaccagcgcgttcaaccgctccatggacgtcggcaaggacgacgacgccaagatcaccaagagcgccatcgagatgtgcaagaagctcctcgacgacgccatcgaagatctcaggggcatggcgagcctcaaacccgaggaggtcacgaagcacgtcaacgacctccggtgttggctgtccagcgtcatgacgtacatctacacctgcgccgacggcttcgacaagccggagctgaaggaggccatggacaagctcctgcagaactccaccgagctgagcagcaacgcgctcgccatcatcaccagcctcggcgaactcatgccggctgccaagtcgaacggatccaccggcgcgcaccgccggcttctcgggttgcagggcagtgaggcggcagagggggtaagcttgcgcgagcttcttgccgtccacgacaaggtacaggagctcacagatgtgaaagacgtcagccgccatctcttgtccgagacgctggacgcgatcaccgagatgtcccacgacgcaggccgccgccttcttggcgtcacgctcagcgaagccacagacgacagcgacgacagtggcctccccggccgccggctgctgagtatgtctttccacgacgccgaccacggggtgcacggcggcgatcatcggcggctgagtatgtctttccacgatgctgaccacgaggtgcacggcggcgagcatcggcgtttgagtatgtctttgaacgacgccgaccccgaggagcaaggcggcgagcatcggcgtctgagtatgtctttaaacgacgccgaccccgaggtgcaaggcggcgagcatcggcggctgagtatatctttgaacgacgccgaccccgaggtgcacggcgacgagcatcggcggctgagtatgtctttgaacgacgccgacaccgaggtgcacggcggcgagcatcggcagctgagcatgtctttgaacgacgccgacaccgaggtgcacggcggcgagcatcggcggctgagtatgtctttgaacgaggccggcaccgaacagcccagcggcgagcatcggcagctgagtgtgtcttccagtgacgctggctcctccacggactccacctccgactccgatacgcccggcggcgaccccaaggagcccgcggccgttgatgactccaaaaacgccgtccccggggagcccgccgccgccgccgccgccgagcatcggcagctgggcacgcttttcaacgctatccacaacatgacgagcaaggccgacaccgtcaagcgccggctgctgagcatgccacaagacggctccgacgccaccgagcacgagggcggcgggcgcgcgcttctgtccatccagctccagagcatcgccgacatgtccgccgagatgaaccgccacctcctcgcggcggagctccccgacgagctcgccggcaagcggcagctcctgtccacgacgctcagggagctcaacgaagcaaccacggcggcgaagggccagctcgacaagatcgagaacggcacggcgcactccgacgccatcccggagcgaattctcggagatgagtacagggccaccccccaccaccggctgctcaccacggacgtcgtcggcacgatcgaagacatcgaacacgagcgccacaaccagcccaagcccggcgagttcccgtcgtgggtgtccgcccaccagcggcgtctcctgcaggccggcacgcagaagcccgacaaggtggtcgccaaggacgggagcggcgacttcaagacgatcaccgaggccgtcaacgccgtgcccaagaactccccgacccgcttcgtcatctacgtgaaggccggcgagtacaacgagtacgtcaccatccccagctcgttgcccaacatcttcatgtacggcgacggcccgaccaagacgcgcgtcctcggcaacaagagcaacaaggacggcgtcgccaccatggccacccgcaccttctcggcggaggggaatggattcgtgtgcaagtcgatggggttcgtgaacacggcggggccggaggggcaccaggcggtggcgctgcacgtgcagggggacatgtcggtgttcttcaactgcaagttcgaggggtaccaggacacgctgtacgtgcacgccaacaggcagttcttccggaactgcgaggtgacggggaccatcgactacatcttcggcaactcggcggcggtgttccagagctgcctcatgacggtgcggaagccgatggacaaccaggcgaacatggtgacggcgcacgggcgcaccgaccccaacatgcccaccggcatcgtgctccaggattgccacatcgtgccggagcaggcgctcttccccgtccgcctccagatcgccagctacctcggccggccatggaaggagtacgcgaggacggtggtgatggagagcgtcatcggcgacttcatcaagccggaggggtggtcggagtggatgggcgacgtggggctcaagacgctctactacgccgagtacgccaacaccgggccaggcgccggcacaagcaagagggtgacgtggccgggataccgcgtcatcggccaggccgaggccacgcagttcaccgccggcgtcttcatcgacggcttgacgtggctcaagaacaccgccacgcccaacgtcatgggcttcgtcaaatgatcgatcacgtatcatatgccatcatcacatcgagtctccacacttaatttgctagtatatatttgtttagtttgcgaggaattttacggtcaggtaccaccagttacgttaactcgttgtgtatggtacatttttttttgcctcgtcaaggcattgaagcacacttagacaagtgcgtgtgtatttaagaggaaatgtacatgtggaggatatgaaaaagaatgtattatgcattttaatttatcaacttactatacaccaagtgagaagcactacatat

SEQ ID NO: 24816 - DNA, 2442 bp, Oryza sativa
  misc_feature (337)..(337): "n"=any one base of a, t, c, or g
  misc_feature (390)..(390): "n"=any one base of a, t, c, or g
  misc_feature (394)..(395): "n"=any one base of a, t, c, or g
  misc_feature (400)..(400): "n"=any one base of a, t, c, or g
  misc_feature (403)..(403): "n"=any one base of a, t, c, or g
  misc_feature (406)..(406): "n"=any one base of a, t, c, or g
  ref <308>: DATABASE ACCESSION NUMBER: AK100258
  ref <309>: DATABASE ENTRY DATE: 2002-08-28
ggcgattagcccccaagcatttttgcaaaacttgtttggaactttggccaccgccgccggcgccgcgacgcgacgacgggaaggcgccggccgccggcggccagcggcgctggcggtgaagccgatcgaggaggcgtcctccaccgctcggcgaccaaccgccgacggcgacggcgatggcgacagcgcgcaccatgcagggggccccactctgtttactcccccgcgtccgcgaccgcgaagtctccggtctccgccgcgcccgcgtcgcctcgccctgaccaccaccagtccaccgccgcggcccacacggcacagcctctcacaagggaggaangggggaagtgagcccccgcgccacggccacgcgccgcgggcttcctctccttncctnnctctnctnctncccgagccgcacgccgatcgatggccgcgcggcggcgcctcctcctgctcctcgtcctcctgctgtgccgcctcgccggcgtcctccccacctccgaagtggagggccttggcagggtttcatggcagggttcgccggcggcaacgcggcgttccagagctgggacgcgtccgcgcccaacccttgcacctggttccatgtcacctgtggcccggggaaccaggtcatcaggctggatctcgggaaccagtcgctgtccggcgagttgaagcccgacatttggcagctgcaagcattgcaatccctggaactttatggcaatagcatcagcgggaaaatacctagcgagcttgggcggttagctagcttgcaaactttggatctctacttgaacaatttcaccggtgaaataccgaatgaactgggaaatttatcgaagctcagtaacctccgtctgaacaacaatagtctgtcaggtgcaattcccatgtcattgacaacaatccaaaatcttgaagtgctggacttgtcacataacaacttgtcgggaataataccgaccaatggttcattttcacacttcaccccaatcagtttctccaataacccacgtactttcgcaaattcttctgattcgccatcaaataactcgggagcagcggtgccatcaggaagaagtagtgcatccagcattggaacaattgctggtggagctgctgcaggtgctgccatgttgtttgctgctcctattgtattgttcgcatggtggtggcggcgtaaaccacatgaccaattctttgacctactagaagaagaaactccagaagttcatctgggtcagcttagaaggttcacactgagagaactgcaggtggcaacagataacttcagtcaaactaatttgctagggagaggaggctttggaaaggtctataaaggaaggttgttagatggttcattgatagcaataaaaagactaaatgaagatcgaattggaactggagagcggcagttcctaatggaagtcgagatcatcagcatggccgtgcatcaaaatctcctacgcctccaggggtattgtatgacacccaccgagcggctgcttgtgtatccttacatggagaataaaagccttgagacacgcttacgagagtgctctgattcacaacaaccacttgactggccaacacgaagaaaaatcgcgttagggtctgcaagagggatctcttacttgcatgaaggatgtgatcccaaaattatccatcgagatgtcaaagctgctaacattttgttggatgaaaaacttgaagcagttgttggtgatttcggtctggctagaattatggattacaaagtttcccatgttgtaaccggcgtgatggggacattggggcacattcccatggagtacctgactgcaggaagaacttcagataaaactgatgtttttgggtatggaatcatgctttttgaactgattagtgggaaaaggggatttgatcttgttggtcttgcaaatgaagaaaatgccagagtgcatgattgggtgaagaaactgctggaagaggacaggctggaggtgctgattgacccaaacttactggaaatctacaatggtggggaacagggagtgcgagaggagatgaggttgctggtgcagattgcgctgctctgcacccaggagtccgctccaagccgccccagaatgtcaacggtggtgacaatgctagaagacggtatcgcggagcactgggatgcatggcaaaggaagacgattgtgcaggcaagcctgcaaggaggacagggcgtttctgaggctcgcaatgactctgttgcaaatctccctccagacacattgtctggtccaaggtgactgccaccttaaggactatgaagggtggttcttttgtagagcttagtgaacttagacagaacacttgccattcttaaaaaaacagcagattatatgttttcttgtagcatgtgtatgtattttagtttttcccctttttttcaagtaattcataatcactact

SEQ ID NO: 24817 - DNA, 1906 bp, Oryza sativa
  ref <308>: DATABASE ACCESSION NUMBER: AK100259
  ref <309>: DATABASE ENTRY DATE: 2002-08-28
gggtgccgcgagcgctcatgtgggccccctccttcaagcttccaactgcaacttccccggcgaggcggaggcgccgccgccgcggcggcggcggcggcgcagcgtgagactaaggaaagccgatagatcggcggagtatcgtacgtgtcagcgacggcctgccttcgaaggccgtgtgatcatgttactgaatgtcgatcgcctaatcttgttttcgactgttgattagccaagagggaggggattataggctttcttctgtggcaatgaatttgataaagcatgcagcttttgctgcaagttttcaaggggaaacggattgtacctcacatgcatcagctaggaagttcagcacctcaggatcttcccctctgctagactcaaccgaaggaaatgggtttaagggacactccatgctggcaccattcactgccggatggcactccacagacctggagcccttgattattgaaagatcagagggttcttatgtctatgatagcaaggggaacaagtacttggatacactagcaggattgtggtgtacagccttaggtggcagtgagcctcggttagtgaaagcagcaaccgaccaattaaacaagttgccgttctaccactccttttggaacagtacagccaagccaccattggatcttgctgaggaacttatcagcatgttcactgccaaggaaatgggaaaagtgttctttacaaacagcggttctgaagcaaatgactctcaggtcaaactagtatggtactataacaatgcattggggagaccaaacaagaaaaagatcattgcacaatcacaagcatatcacggatcaacattaatatcagctagtctgtctggcctccctgcgatgcatctgaagtttgatctaccagcaccttttgttctgcacacagactgccctcactactggcgcttcggtcttcctggtgaggcagaagaagaatttgcaaccagacttgccgataatttagagaatcttatcctcaaagaagggccagaaacagttgctgctttcattgctgaacctgtaattggtgctggaggtgtcatccctcctccaaagacatattttgagaagattcaagcagtacttcagaagtacgatgtccttttcatagcagatgaggtaattactggatttggacggctgggaaccatgtttggatctgatctgtacaacatcaagccagatctcgtctccttagcaaaggcactctcatctgcgtatgtcccaattggagcgactcttgtcagcccagaaatatccgatgtagttcattctcagagcaataagattggcttttttgctcatggctttacatactctggccatccagtttcttgtgctgtcgccctagaagctctgaaaatttatcgggaaaggaacatccctgctcatgtcaagcaaatttctccaaggttccaggagggaatcaaggccttcgcgggaagttcaattataggagagacacgtggtgtaggtttgctgctcgcgactgaatttgctaataacaaatcaccaaatgatccatttcctgttgagtggggagttgcgcaaatctttggagcagagtgtaagaagcgtggtatgctagttaaggttgttggagatgagatcgccatgtcgccaccactaataatgagccaaagagaagttgatggactggtgagcatatacggtgaagctttgaaggccaccgaggaaagagtggcagagctgaggtccaagaaaaaatagttaagagacatttgttgtaaaaataatgataatattaccaacaatttttgtaagctggtgcacacaataattttgtgttgttttttattctaataattcgctgaaatgttacttcttgcaaataaaatgtgatattttatttttcc

SEQ ID NO: 24818 - DNA, 854 bp, Oryza sativa
  ref <308>: DATABASE ACCESSION NUMBER: AK100260
  ref <309>: DATABASE ENTRY DATE: 2002-08-28
ggcagtctgcacacacgcacaagaatcgagtgagccagagttgagagttcgttccatctcccttcgctcgccacgtggcagccgctagtccttatcgccgccgccgcccacctcgccatggcgccgccacccgccgccgccgccgccgtggacggagtcggggtcggggtcggggcgcacagcgtgttcgtgtacgggagcctgatgcaggacgaggtggtgcgcaccatcatcaagcgcgtcccgccctcctccccggcgctcctccccaactaccacaggttcaacatcaagggtaggatttatcctgcaatcctacctgttcaaagcaagaaagttgctggcaaggtcatcaccggtgttactgatgcagagctccagattctggatgaatttgaagatgtggagtacgtgaggacaagagttgagatatcattaactgatacttcagagacaatgcttgctgacacctatgtatgggctgatgcagaggatccaaatctttatggtgaatgggattttgaggaatggaagaggttgcacatgaaagatttccttgcgatgacccacgggttcatggatggcctcgaacagcctgaatccaagtccagggttgaaacctaccaatcattcatgcaggaaatccaacagcctgggacgacgacgacgacgacccaggttgagatttgaaggactacattgcaatattcgccaatagccgatatatatagtgaaatggcagttcgctgtattagcatgttagtatgaaataacccatctcctcgagagtgtaatctttatactttatagcatcatccattaataatacatgtaagaataaagtttctactgcg

SEQ ID NO: 24819 - DNA, 2198 bp, Oryza sativa
  ref <308>: DATABASE ACCESSION NUMBER: AK100261
  ref <309>: DATABASE ENTRY DATE: 2002-08-28
gattccctcccgtctcgtctccgctcattgcgccatctcgcgcatgaacaggggaggggcgccgatctccatctggcgagcagagaagggggaggggatcctgattctgaaggcaagtgtcaacaccaagcttataaatctttgattggtcagtagttctttctgcaatctggtctgatatatatacgtatcagttgtgggagcaatggcttcaaaggcaatgcctcgagcgccccctgcagctcccaacttacagtcactgaaactgtgttctcagaatgattcttctttggagacaaccagtccgagtaaacgaagtgcattggtgccaggaaggtcagctgaatcaagcaaaccgaatcccgaagtggtgcaaaaggagcagaaatcaactcagcatcaaaatgagtccattgatcttacgggtagcaatgatcctgcagaagtaaaggctgagggtaacctggttccaaagcgtcttgcagatgaggaaaagggtgttgtggaggatggaattgcgaacggaagcttgaaatcatcttcagctttaggaaaggagcatggtatagcaagtgcaagtggaagtgccaggttggttgggagatctgagactggagaaagaggtttcagtagcagcagatgcaggccaagcacaagcagtgatgtcagtgatgaaagcgcttgcagcagcattagtagcgtcaccaagcctcacaaggcgaatgattcacgatgggaggcaatccagatgatcaggactagggatggaatccttggcctgagtcattttaagctattgaagaagctaggttgtggtgatatcggcagtgtgtacctttcagaactgagtggaacgaagagctattttgcgatgaaggttatggacaaggcatcacttgcaagccgcaagaaattgcttcgagcccagactgagaaggaaatcttgcagtgcctggatcatccttttcttccaacgttatatacccattttgagactgataagttctcatgcctggttatggagttttgccctggtggagacctgcatactcttcgacaaaggcagcgtggcaagtattttccagaacaagctgtcaaattctatgtggcagaaatactccttgctatggagtacttgcacatgcttggtatcatatatcgtgatctgaagccggaaaatgtccttgtccgtgaggatggacacatcatgctatctgactttgacctctccctgcgctgtgcagtgagcccaacactgatcagatcatctaaccctgatgcagaagcacttcggaagaacaaccaggcctattgtgttcaacctgcttgtgtggagccatcctgcatgattcagccatcgtgtgccactcccacaacatgctttggtccccgatttttctccaagtcaaagaaggatcgaaaaccaaagcctgaagttgtcaatcaggtcagcccatggcctgagctcatagcggaacctagtgatgcacgctcaatgtcatttgttggtacacatgagtacttggcccctgagattatcaaaggcgagggtcatggtagtgccgttgactggtggacctttggcatattcttgtatgagcttctgtttggaaaaacacctttcaaagggtcaggaaaccgtgcaacactgttcaacgtcattggccagccgctgcgcttccctgaatacccggttgtgagcttctcggcaagagatctaattaggggcctgctcgtcaaggagccccaacaaagattgggttgtaagcgtggtgccactgagataaaacagcatccattttttgagggtgtgaactgggcattgatacgctgcgcaagccctccagaggttcccaggcctgttgagattgagaggcctccaaagcaacctgtttcaacatcggagcctgctgctgccccttctgatgctgcccagaaaagcagtgatagctatctagaattcgatttcttttaggactcaataatttttttttccatttgtttgcatcatcttgagtagggttttcacatgtagtgtcttgcagattagtatgtagatttttttttgtttctgtcaacatgtcctgtttttcttgaagtaaacttattggcattcagatttatatttctcagcaaagatctgaaatggttaatcttcaagtgagtcaaagaaaggccgccactttttggcttgtgcg

SEQ ID NO: 24820 - DNA, 2169 bp, Oryza sativa
  ref <308>: DATABASE ACCESSION NUMBER: AK100262
  ref <309>: DATABASE ENTRY DATE: 2002-08-28
gagcaattccactcccccaccaccgccatcctcccccccgccgcctccacccgccggcgtccacctccatctcctcctccatcaccgccaccgccgccatccatacgggctctcccgctcggctcggctactccaccaccggcaacgctccccgtgccgcatccatccccccccctccaagcttccagtcgcaggagagaaggcggccgccggagtaggcacacgcaacaagcaggtttccctcaccggcggcggcggcggcggaggcggcgagaagccggccatggcgacgaagcagcaggacgcttcgacgtccggcgcggccatgtccatgaaggagtacctcaagaggtaccaatccgacgacgcgcagggcaaggccaagaagaagaagaagaagaagcccaagcccgcggccgccgtgggcggaggtgtgcttatcgtcgacgaggaccccacgtggcacaagcccgtccagatcgaggaggagcccgcgtcgtccggggatgagagaccgttggtggacgaggacatcgaggtcaagcggatgcgccgcctggaggcgattcgcgcggcgcggccgtacaatgctatcgctgaggacggaagcgggtgggtcaccgtggccgcccccgaggactccgatggtggtttaaccggtcgccgccgcagaaatgacacgccctcaccggagcgcgggggtgctggaaggaaggatctgtctcctccgcggcggaggcagcggcaggatacgccctcgccggacccgagagatgctgcgggtaaggatctgtcgccgccgaggcagaggcgaaggcggcaagacacgccgtcaccaaagggtagtgaggtagctggggggcatgatgatttgtcaccaccgcggaagtctaggcagcaacgagacccctctcctccacgcaggctctctcgccatgactccaaggaatcccaggacatttcaccaccacgaaggcgtaccaggcatgactcagaggagccacaggacctctctccaccacgccggaaggggcggcatgattctgaagaacccaaagacctcttgccaccatggaggcgcgtgaggcatgattctgaggaacccaaagacctctcgccaccacggaggcgcacgagacatgattcagaagagcccgaagacctctctcccccacgcagacggacgcggcacgactctcatgaacccaaggacaaattgccaccactgaaaaggcaggctttgggtgatggggacatttcacctccaaggaagggtaggaaggaagtggctccgaaggaggtgaggaaagctgggttgatgacagcagaggaagttaaagaggacatcaggaagattaaggaggatgagaggctcaagtttgctgcacaggatccctcagtgattgggaaaggggcaaaagcagtattccgagataaacaaggaaaacgaataagtgaagaagatatgaggaaggcacgaagacacgaaaccaaaggaaatacatatagaatggggtaaagggttggtgcagaagcgagaagctgaggctagattacaggagcttgaatctgaaaagaggatgatcctgagctcgacaccatgctaaaaaacagaatccggtggggtgatcctatggctcatcttgtcaagaggaatgatacagacctccttctggaggacttgggagatgatgaaaagatgaaagaatctggcttcattgttccccaaaatatacctagtcacagctggctgaagcgtggtgtagatcctcctccaaaccgctacggcataaagcctggtcgtcattgggacggagtggatcgcagcaatggatttgagaaggatatgtttaagctgaagaacgagaagcaagcaacggagcaagaggcctacctttggtctgtcgcagatatgtgagcatagctgttcttcaaagaagccaaggtagcttgtgtgccttgttaaacgaagtagtatactgtaaaatgcttggaaggaaggaagcacggcctctcggcgtagcacagcgtgcttgaaaactcaaatgtagaatcaaacttgttgtgcattggttgaaatctttttggcatttttctctttgccactcttaaaaacattttgtaacatcgatgaacatctttactcggaattagaagctgatcttttat

SEQ ID NO: 24821 - DNA, 1055 bp, Oryza sativa
  ref <308>: DATABASE ACCESSION NUMBER: AK100263
  ref <309>: DATABASE ENTRY DATE: 2002-08-28
gagtggtggtggtggtggtggtgagatctagcttggttggttggttgcagctggagatcgatcgggatggggaggggtcgggtggagctgaagaggatcgagaacaagatcaaccggcaggtgacgttcgccaagcgcaggaatggcctgctcaagaaggcgtacgagctctccgtcctctgcgacgccgaggtcgccctcatcatcttctccaaccgcggcaagctctacgagttctgcagcacccagagcatgactaaaacgcttgagaagtatcagaaatgcagttacgcaggacccgaaacagctgtccaaaatagagaaagtgagcaattgaaagctagccgcaatgaatacctcaaactgaaggcaagggttgaaaatttacaacggactcaaagaaatttgctgggtgaagatcttgattcattaggcataaaagagctcgagagcctagagaagcagcttgattcatccctgaagcacgtcagaactacaaggacaaaacatctggttgaccaactgacggagcttcagagaaaggaacaaatggtttctgaagcaaatagatgccttaggagaaaactggaggaaagcaaccatgttcgcgggcagcaagtgtgggagcagggctgcaacttaattggctatgaacgtcagcctgaagtgcagcagcctcttcacggcggcaatgggttcttccatccacttgatgctgctggtgaacccacccttcagattgggtaccctgcagagcatcatgaggcgatgaacagtgcgtgcatgaacacctacatgcccccatggctaccatgatgatgacggggacaatgaattacgaaataacaaggatatgtggcatatatgtggtgccgcatacatgcatgtatcatggctagctacttaattggagtgatggatttgaactagtttcgtatgtagcctgtttgtgtgtaacttgtgtgagatactaccttaaaaactatcggtgtctgttgaacatattctgcgatcaactttaagcgtattattatcattttcattccattctgttt

SEQ ID NO: 24822 - DNA, 2226 bp, Oryza sativa
  ref <308>: DATABASE ACCESSION NUMBER: AK100264
  ref <309>: DATABASE ENTRY DATE: 2002-08-28
gttttttcaacaatcctcaaccttcggaggctagtttggcagaagaatcaatttctacaaatggtcaacagatcgagcaggaaatgcctgtaaatgttgaaccatcagatctatcagttgacaaaagtattcaacatgcactggtagttggtgattataaaggagcagtcaatctgtgccttgctgccaatcgaatggctgatgctctggttattgcccatgctggtggttctgctctatgggaaagcacaagaaaccagtatcttaagaatactgtatcaccctatctaaaggttgtttctgctatggttggcaatgatttgatgagttttgtgagtacatggccattgaatgcttggaaggaaacacttgcgctactgtgcacatttgccaggaaagaggaatggaatgttctatgcgatacccttgcatctagactgttgggagttggagatacactagctgcgactctctgttatatttgtgctggaaatatcgacaaagctgtggaaatatggtctcgcgacttgaagtctgaagatggtgggaagacttatgttgatcttctccaggatttgatggagaagaccattactcttgcccttgctacagggcataagagctttagcgcgtcactgtctaagcttgtggaaaactatgcagaacttttggccagtcaaggccttcttaaaactgcaatggaatacttaaaattgttgggatcagatgaacattcacacgagctggcaatattgagagaccggattgcattttctacagaagagaatcatgctgccagtacttcagttcatgcgggcagtattaacagttccgcgtaccctacaattcaaccgagctatagcaccccagacccttctcagaacctttaccaggggacttcacaatatgctgtgccaagtaaccagtatcaagattaccagcaacaatctaatacagcatatggaacatacaacagtacatattctcaacaaccaacccagatgtttgttccatcaaacaccactccagtgatctcccagccaaatgcaactccagcaccagttccacaacaaccagtgaaggcatttactcctaccaacttgccaggtctaaaaaatcctgagcaataccagcaaccaactttgggctcccagctttatgcgggtgctaatccaccatatacttctggacaatcgactccatatcaaggtgtacctcccaccacataccatcagcctagaccacctacacaattccaaacagttcccacagcacctccagctgtttctagtgccactgtaccaggaacgaccccaagtcagatgttccctggtccagttgctaataacccgacttccaggtttatgccatcaaacaatccaggttttgttcaaaggccaggtttgagtcctgtacagccctcaagtccaacacaggcacaaggacaaccgcagcctgttgttgcacctcctgcacctcccgcaactgtgcagacagctgacacatcgaaggtgtctgctgagttgaaaccagttattgctacattgactagactatttgatgaaacatctaaagctatgggtggatcacaagttaaaaaacgtgaaatcgaagacaactcaagaaagatcggaacactatttgcaaaactcaattctggggatatatctccaaacgtttcatcaaaactcattcagctttgcagtgcacttgatagcggtgattttgccactgcgatgcaccttcaggtacttctgacaacgagcgactgggacgagtgcaacttctggcttgccgcattgaagcgtatgatcaagacgaggcagaatttcagaatgtaaacgagtgccgcgttttgcagctagttctgtatacacacaccttttcgacttcttacaaaagttgttagtgttagcaacttatgagggtttgtctgcacagtagtgctatcttgcttcttgtgttccctcctgccaattatactgaagcttgtcgcttaaaagtggtctgttgtctgggcgattactttttgatagttcttcgacattcctttgtgaggatcagttcttgggtgatggtggttggatttcacgaggattacttgtaagtgggcatctagttgttatagctggcccattttgttttaccttataagttagattttacctgtttggacattggaagtactctcgataattaatacaaggatattggcttgtttattgc

SEQ ID NO: 24823 - DNA, 2211 bp, Oryza sativa
  ref <308>: DATABASE ACCESSION NUMBER: AK100265
  ref <309>: DATABASE ENTRY DATE: 2002-08-28
gagtggaaaattacagaaatatttttttttgtgttgtgtcttctctgctctctcgccattgccgccgcggcgccgcctcctcctcctcttcttcccccgctggtccggcgaatacggcggcaagccggcgccggtggagacggggtagcgtccggcgccagactgcgccgacctgggtgaccgactgaagttgaaggtgaaggaaaggggacgacgacgacgtcaggtgtggaggaagtgacttgcaaggttgccggcgccgcgtcttccttcggagttcgtactcgaggggcgtcttcctccctagaggagtgtacgcttcttctcccggcctctacggcagaggtagtagtagtactagcccaagaagaggaagagcaagacgaagctggaggtggaatcctcccgccggcgacgagaggccgctctagatcgacatggacgcgcaaatggcggccgcggcggcgcaccacccgctgccgcatcagcagaaggcggccaacctggcccgcaccttcaccaagctgctccgccgcaagcgcgctgacgctgtcgccgccgccaccgcggtgggagagcccggtgtgcccgatgcggccgcggcgtctgtggttggagatgagtacgagtgctccgtcgaggcggcggcggcgggtgtgccgtcgttgagcaagctgaagctgtccggtaaccttggcgcggcgtattcgctcgacgcgttcttccgcaatgcggccgagaagaaggcggcgggggtggccggggtggcggtggcgcagacgtcgccgcaggtggcgccggatgtggcgaaggattcgttgctggctaacctgttcgctggcgtctcggcggtgaaggcggcgtacgcgcagctgcagctcgcgcagttcccctacgacgcggaggcgattcaggccgcggacgccgcgctggtggcggagctcaccaggctgtccgacaccaagcggcggtatctccgggaccccgccgcggcggccaagaacgcggcggcggcggggcacaccgcgctgtacgcgcacgccgaggagcagcggcatctcctcaagacgtaccagatcacggcgaggaagctggagggcgagctccgcgccaaggaggcggaggccgaccgcgccaggagctccctcaccgccgagctccgcgccgagcgcgccatggaggcgcgcctccaccccgggcgcaccctcgcgtcgctcgacgagctccacctctccggcctcaaccccacccacttcctcaccgccctccgccacaccgttaagtcgatccgctccttctccaagtcaatgctcaactcgatgcagtccgccggttgggatctcgccgccgcggcggccgccgtgcacccgggcgtccagctgcgccgcgccggggacaccaagttcgtcttcgagtcctacgtcgccatgaagatgttcgccaatttccaccggagggacttcaacctcagcttcttggacgagcgggagttctacgaccgccgccgcttcttcgaggagttcacggagctcaaggcggcgccggcgagcgccttcctcgacgcgaggaacgcgcggtggggcgggttcggcaagttcctgcgcgccaagtacctgtcactggtgcacgcgaggatggagacggccttcttcgggaggctggagcagcgcggcatcgtgagcgccgggccgggcttcccggagagctcgtggttcgccgacttcgccgagatggcgcgccgcgtctggctgctgcattgcctcttctacgcgttcgacggcggcgccgaggaggacggcgcctccatcttccaagtccgcaccggtgcgcgcttctccgaagtgtacatggagagtgtcagcgacgggcgctccgacgaggccgccgccgccgccgccgaggaacgcgtcgtcgggttcaccgtggtgccggggtttagagttggccggacaatgatccaatgccgggtctacctgtcgcggccgggacggcggccatgatgggttgtgacaaagccgtcttgtttcaggtgtccggcggatgataaagggggaggaatgtccattttggggcggccgtcgaggtctcccgccggcagccggctgcggcggcggcggcggtgttggtgatgatgatcagtgggtggttatgtatctattaagggatgtagtggtggtgatcataatataaatggcattttaagtttggatc

SEQ ID NO: 24824 - DNA, 1699 bp, Oryza sativa
  ref <308>: DATABASE ACCESSION NUMBER: AK100266
  ref <309>: DATABASE ENTRY DATE: 2002-08-28
gcttcttccctcgtaccattttcgctgttggtctttattgcagcagctgctgctgttgctcgtgctgagctgagctgaacctgccaatctgcaacactgcaatcgttagcaagttcgctcaactggccagctgctacagatatatctgctgataattgagccccaaccacctttctcttccccctttaaacttccctggtctccgtcctcttcgatctcctctgccgtcgatctcatcggaagagagcgccaagcaagaaagaataattattcctgaagattcctcttctgcatgttgaagtgtacaagacagccacaacaactgaggatatgagctggtggtgttgcattccaaaatccaagaaaggagagaatccttactctcatggcgttagcggtattccgcctgagaaaaacataaggcttttctcttattctgagttgagatcagcaacagaaaacttcaaccgcagtaataaaattggccgaggtggctttgggacagtatacaagggaactattagaaatgggcgagatgttgcggtgaaagttctttctgctgaatccaggcagggcgttcgagaatttttgacagaaattgatgttattaccaatgtgaagcatcccaaccttgttgaattaattggctgttgtgttgaaggaaacaatcgaattttggtatacgagtatttagaaaacagcagccttgaccgtgcattgttgggttctaatagcgaacctgcaaattttacttggagcataagatctgctatatgcataggaatcgccaaaggacttgcatacctgcatgaagagattgcgtcaccgattgtgcacagagatatcaaggctagcaatatacttcttgacaagctttacaaccccaagatcggggacttcggtttagccaagttattccctgataatatcacccacatcagtacccgtgttgctggaacgacaggctaccttgcaccggaatatgcatggcatggccaattgacgaagagagccgatatatacagttttggcgtccttgtacttgagatcgtaagtggcaagagtagttcaaggagtctcctggctgacgataagattctcctagagaaggcatgggagctacatgaggtagggaagctcaaggagctggtggattcagaaatgggagattaccctgaagaggaggtcctccggtacatcaagacggccctcttctgcacgcaggcggcggcggcgcggcggccgtcgatgccgcaggtggtgacgatgctgtccaagcccatccgcatcaacgagcgcgagctcacggcgccgggctacatccacgactacaatggcacggtctccaaggccaccaactccagcaactcgaggttcaagcactcggcgtccgacacctccgacatgttcagcacggtggtgccacccacggtgtccgagatcagcccaaggtgaaaatggaaggaaaacatcaccaggctgattgatgctgatgctgggtctatgtttcttgtcttacctttgcatgttgagttgagtgacagtgcatagagggcacacgtttagatgtgtgccaattgtgaatcgtgttgtttctttccattccttgtgcaaattgcggcatctagatcttgtaaatagtagtaggttgatcctgacttgtttacgtcagagcaattcaagatcgctgcttgttggc

SEQ ID NO: 24825 - DNA, 1546 bp, Oryza sativa
  ref <308>: DATABASE ACCESSION NUMBER: AK100267
  ref <309>: DATABASE ENTRY DATE: 2002-08-28
gccaaccctaccaccaccaccaccaccacctccacctcctcccccctcgctgccggacgacgagctccttccccctccccctccgccgccgccgcgccggtagaagatggctgacgccgaggatatccagcccctcgtctgcgataatggaactggtatggtcaaggctgggttcgccggagatgatgcgcccagggctgtcttccccagcattgtcggccgccctcgccacaccggtgtcatggtcggaatgggccagaaggacgcctacgtcggcgacgaggcgcagtccaggaggggtatcttgaccctcaagtaccccatcgagcatggtatcgtcagcaactgggatgatatggagaagatctggcatcacaccttctacaacgagctccgtgtggccccggaggagcaccccgtcctcctcaccgaggctcctctcaaccccaaggccaatcgtgagaagatgacccagatcatgtttgagaccttcaacacccctgctatgtacgtcgccatccaggccgtcctctctctgtatgccagtggtcgtaccacaggtattgtgttggactctggtgatggtgtcagccacactgtccccatctatgaaggatatgctctcccccatgctatccttcgtctcgaccttgctgggcgtgatctcactgattacctcatgaagatcctgacggagcgtggttactcattcaccacaacggccgagcgggaaattgtgagggacatgaaggagaagctttcctacatcgccctggactatgaccaggaaatggagactgccaagaccagctcctccgtggagaagagctacgagcttcctgatggacaggttatcaccattggtgctgagcgtttccgctgccctgaggtcctcttccagccttccttcataggaatggaagctgcgggtatccatgagactacatacaactccatcatgaagtgcgacgtggatattaggaaggatctatatggcaacatcgttctcagtggtggtaccactatgttccctggcattgctgacaggatgagcaaggagatcactgccttggctcctagcagcatgaagatcaaggtggtcgcccctcctgaaaggaagtacagtgtctggattggaggatccatcttggcatctctcagcacattccagcagatgtggattgccaaggctgagtacgacgagtctggcccatccattgtgcacaggaaatgcttctaattcttcggacccaagaatgctaagccaagaggagctgttatcgccgtcctcctgcttgtttctctctttttgttgctgtttcttcattagcgtggacaaagttttcaaccggcctatctgttatcattttcttctattcaaagactgtaatacctattgctacctgtggttctcacttgtgattttggacacatatgttcggtttattcaaatttaatcagatgcctgatgagggtaccagaaaaaatacgtgttctggttgtttttgagttgcgattattctatgaaatgaataacatcgaagtt

SEQ ID NO: 24826 - DNA, 1839 bp, Oryza sativa
  ref <308>: DATABASE ACCESSION NUMBER: AK100268
  ref <309>: DATABASE ENTRY DATE: 2002-08-28
gcttgtcgcggaaagcttctccatcgatcgatctctcctctctctcccgcgggggctctccggcgcacggtgccctctcgtgcctcggagaccccgatccgccgccgccgccgccgccgccgtgcctgagtagtacagtcttgttgtcgaggtgaggtgagtggtgggaggagaaatggacaccgggatgagggtggcgctgcaccggcaggtgtcgtcggggtcgctgaaggagagcggggagctccggcggcagtcgtcgctggagtctccccggacggggagggcggcgacgaggttcctgttcgggaggcagtcgtcgatggacccgaaccggcggcgcgggcggagccagagccccgtcggcctcgccgaggacctgaccgtgccggacaacctcgacgccaccatgcagctgctcttcctggcctgccacggcgacgccgccggcgtcgaggccctgctccgcggcggcgtcgacgtcaacagcatcaacctcgacggccgcaccgcgctgcacatcgcctcctgcgagggccaccccgacgtcgtccgcgtgctgctcacctggaaggccaacatcgacgcccgcgaccggtggggcagcacggctgtagctgatgccaagtgttatggccacacggaggtgtacaatcttctcaaggctcgtggtgcaaagatcccgagaaacaggaggacaccgatgatggtgtcgaatcctggggacgtaccagagtacgaattgaaccctagtgagctccaattcaagaaaggggatgaggtggtcaagggcgtgtaccaagttgccaaatggaatggaaccaaggttcatgttaagatacttgatagagaatgctactgcgatcaggaagtcataaactctttcaggcatgagctgaccgtattggagaaggtccggcacccgaatgttgttcagttcgtcggagccgtcactcagaacatacctatgatgattatttctgaatacctcccaaatggtgatttatcaagctgtattccgaggaaaggaaagctacatggtcagaaggttctaaaatatggccttgagatcgccaggggcatgacttatcttcaccagtgcaagccagaccccatcatccactgcgacctaaagccaaaaaatatcttcctggatagtggaggccaactgaaaatcgcaggattcggtctgacgaggctgtcgaaaatctctcctggcagagtgaaactggccgatcatgagtccatggttgacagcttcagtcactacactgcacctgagctgtacagaaacgaaatattcgacgcaagcgtcgacgccttctcatttggtttcatcctctatgagatggttgaaggaacacacactgtacatgggaagtcatcagaggaatctggccacacaattcgatatgatgggatgcgtccatcgctgaagaacaagctcaggggatatcctccagatttcaaagcgctgatcgaagaatgctgggatactcagggtatagcaaggccaacattttcagagataatcatcaggctcgacaagatatacgcccagtgcatgaagcaagggacctggaaggactcgctaaagatttggaaatgacacgtgtgggctaagctgcatgaacgccttcttgtgtacatatcactgcgaagcaaatgcgtcactctctgtgaagaagaagcctgagctagcactcactcgtctggaggaggatgacacgacgtaccgacaaatttgtgtacgtgttgtaaaaggcccggcgaaaaaaaaaagtacttgtaaaagatcaatttgagttaaattggaagtaacaaagcttaattattact

SEQ ID NO: 24827 - DNA, 1636 bp, Oryza sativa
  ref <308>: DATABASE ACCESSION NUMBER: AK100269
  ref <309>: DATABASE ENTRY DATE: 2002-08-28
ccgaaatcaaagttgtcacttctgaagtaacagtaaaatggtgattgtgcctgaacataccctgcagttacatccatcatctagtggtctctgattctgatcacaattaagcagagagatgataacaggctactcgtagcaggggagatttacatcaatgaatgctgccttactcatataaacaggtgatgtaataatgtacccaaagtttgtttggggactgatcgatcgagtatctatctatgtatgaatgagaaaatgcatgcaatcagtgcagatggggttgatccaaaacgaaatgatcgatgctggtcagaagaacacaacactagtgaagtggagtatggacgacgatggatcaggagatttggaggtttgacatgtcgaggtcgacgctggcgtgaacctcgcgcaccgtcctgtcgtagtcgtcttcttcgtcctcctcctcagctggttgttggtcgtcgtcgtcgtcgtcggtgccccagccgtagccagagacgggcttgtcgggcttggggacggtctgcgcctcctgcacgatcctcatgatgtcctccacgctctgcggcgagaaggcagctgcagcagccgcactacttgcgctggaagccgcgtgatcggctccccggcggttgtagtagacggcctgcgcctcctccttgagctcgcgcggcaggttcttgaggaaccaggggtggctcttgatctcgcccatgctgatgcgcttgtaggggttggcgacgaagatgcgggagaggaggtggcggcagggctgggagacgtggacgtactcggggatcttgtactggacggacatgatgcgcgagatggtctttctgaagttcttggggtccttgggatcctcgaaagggtaagcgccgacgagcatgacgtagagggtgacgccgcaggaccagacgtcggcgagcttgccgtcgtactcgcggcgggagaggacctcgggggcgatgtaggcgggggtgccgacggtggatttggggcgggagtggaggagggaggacttggagtagccgaagtcgcagatcttgaggcgcggggccgggctgccgtccagcagcgtattctccagcttgaggtcgcggtggcagatctgcatggcgtggcagtagctcaccccgcacaccagctgctggaagaagtagcgcgcctcgtcctcgtggaacctccccgcctcgcatatcctctcgaacagctcccctcccgccgcgtactccatcacgatcgccagatgcctccccgtcaccaccacctccttgaaccttattatgttcgggtgacgcagcgaacgatgattcacgatctcccggaacacgttctcgtcgatcctgttccctctctcgatgaacttcatcgccaccagctcccgcgtctccttgttccgcatcagcttcgctaccccgaagttgcccgccccgatctcccgaactggctcgtatttctccatatcctacctcctcttcttctcctctcacttaatttcttgctttcaattctccttctccttctgcttctgcttctgcaggaggaacagtatctggaggaaagaagcagagcagagcaagaagatgaggaggagatgacagacgacgacgcagataacctgcagacc

SEQ ID NO: 24828 - DNA, 2803 bp, Oryza sativa
  ref <308>: DATABASE ACCESSION NUMBER: AK100270
  ref <309>: DATABASE ENTRY DATE: 2002-08-28
gaaattttgtctcgcttcaaacctcccctaaaaaaaggcgtcccccgccgctgcgccgctctctcccttcttccccgcagcaaaagtagttcttcgcggagaagcgggagaatccccggccggtgatcccaatctggagcgggagggcagcgctggttatatagcactgttgtgttggatctgtcaggtctgacagataattttttttcttccactctggctgttacacaaaagctgctggtgtgcacctctaggctggctgttcaattttcttctggaggaaacccatattgcatttgctggtcatactgtctgctggggttttcctttgattatggttaactctggtagatcagaacgaaacatacagatacactaaccagtatcttgcaattgctcactgaagttgaaaatggttcggttctcttgcttctcttattcgtcccgccatcaccgatcaaagaagttggttgcttcttcagttgaagacagatgggcatatccaaatttaactcagaaggtagatggaaaaaattgtagtaattctaacgttgagcagctcagaagccctcctttcgaggattgctgcagatcagaagatttcagtttttgcactgagaatgagtcagggaagattaagaaaagtcaatctcttggagacatgcttgaaatggagaagctttatgattttgataagaccaacaataaaggggaagattgtgcaattgatggttcccatgacgggaaaacctgtacgggagaatgcacccgcaaaaagaaggaaaaccgtaccagttgttgtggtgattttactgacccacatcaacatgagtgtcagtcctcccttggcaattctgaacatctcatcgaaaagcaatgtgattgtgaggatattgtgtcaacttattgtcttgtcaactctgaagagcagtcatttttgcctgagcctcagcctttgttgagcagatcacagtctgtgaaccttgatgtgcacattcccaccgtcattgaagatagtattgattctgcacaacttgggttacgttctagatcatttgggaacttaagttcactggatggagcaccctacactgaagaagctagagtttcaccaagtcactgcaaagaagcctcagaagactttgttcaatccaatgcacaatcccagtgtcattgtagagatgaacatatcaacaatagttcaactgatgaaatttcacagtgttgtgtggaatcaggaaatgactgccatcattcagattttacatcaactgcagcagtgacaccggttagaaacagtaactcgtttgatgatcctcctagtctatcacatgatgcaggcaatactgaagagatatttcaacaaattgataaaagagaagttgccacatcagtgaagaattgtgaacctgaaccttgttaccagaattgttgcacgtcgtcgcgaaaagaattcaatgttaggagaattgagaactggatcagccaaattcctgattcaaatgacatagctccatatgaacagggggaatgttcaagttctgcgcatttaatgaattccaaacaagtcgatactatcagaaagctcaatgctaaatctcctcttggcatggaaactgcttacaactacatcgcaatgctgaaaccatcatcttccatagcacaattgtctaatcttggcttggttgcaataccaattctcagtgcattcagtgatttgcggctgctgaacttggcagggaactcaataataaggataacttcaggagcacttccgaaaggactccgcatgttaaatctgtcaagaaataacatatcaaccattgaaggcctaaaagagttgacactacttcgtgtcctggacttgagttacaacagaataactaaaattggccatggcttggcctcctgtcctttcctgaaggagctgtacatcggcggcaacaagatcagcgaggtggaaggcctgcaccgcctcaagctgaaggtgctcgacctgcacggcaacagcctctcatcctcgaaatgcctcgaccagctcgccaactgcggcaccctgcagtcgatcaccctggagggcaacccggcgcagaggaacgtcggcgacgagcagctcaagaggcacgtgctgcgcctcctgccgcacctcgtgtactacaacaagcaggcagtgcggtcacgccggtgctccaagccccagggcggcggcggccgccatggccgggccgtcgaccttggtggcggtggtggcggtggcggtggccggagcaagaggctggagctgaggcttccccggaggtcggcgtgcgcctccgttgcgctgaaatcgtcagggtgtcaccaccatgtcagggcaggagcagcagctgcagctcatggctcggtgaggacgtcgaggcagagccggaataatgcgcctcctatggctcccaccattcgtggagctgatcgttcttcagagggagagaggaggctgcctggtacagagatctccggtcagatttttcggattcgaagcgcggatgacctatgaatttttctcaattttgctgcatcaccacaaaattttcgtttcatttgtgggttcgagaactttttatcttgttttgattctttttttttcattcatgaaattgttagcatgaatgaaaatagtagccatagttgtggcatgaactatttgctgcatttttttttttttttggcagtgatacgaaagaattgctagatggtagtagtataatggaatttgcagcatgatgatacgttctattcagaaacacataatgtaatctattttgat

SEQ ID NO: 24829 - DNA, 2442 bp, Oryza sativa
  ref <308>: DATABASE ACCESSION NUMBER: AK100271
  ref <309>: DATABASE ENTRY DATE: 2002-08-28
ttttgctcagttgtggaatgaagtgatatgtagtttccgggaagaagatcttataagtgataaggaaatggacttactggtggttccttattcgtcagaccccagtcttaaactgatgcagtggccactcttcttgcttgctagcaagatacctatagctttagacatggcagcaatttcgaccaagagattccgatctttggaaacgtatatgcgcagacgagtatatgaaatgtgctgtactggaatgctacgagtcattcaagcttgttcttaatttactcgtaattggagaaaatgagaaaaggattattggtattatcataaaagaaattgaagctaacatcgcaaagaacacattccttgccaattttagaatgagcgcactgccagtcctgtgcaagaaatttgtggagcttgtatctgccctgaaagaaagggatgcctccaaatttgacaatgtagtattgctgcttcaagacatgttagaagtaataacaagagatatgatggtcaatgaaatcagagagctagctgagtttggtcatgggaacaaggattctgtaccaagaaggcaactttttgcgggtactggtacaaagcctgcaatcgtctttccacccccaatttcagcacagtgggatgagcagatcaagcgtctgtacctccttttgaccgtgaaagaatcagcgatggacgtgcctacaaatcttgaagcccgtcggaggatagcatttttcactaattctttattcatggacatgccacgtgcgcctagagtacgcaaaatgctgtcattcagcgttatgactccatactacagtgaggaaactgtatattcaaggaatgacctcgatctggaaaatgaagatggtgtctcaattatattctacctgcaaaagatttttccagatgaatggaataattttttggaaagaattggttgccaaagagagagtgaagtttggggaaatgaagaaaatgtcctacaacttcgtcattgggcttctcttagagggcagacactctgtagaacagttagaggcatgatgtactacaagagagccttgaagcttcaagcttttcttgacatggcttctgagtctgagatattggaaggatataaagcagttgcagatccagcagaggaggagaagaaaagccaaagatctctgtcatctcaacttgaggctatagcagacatgaagtttacatatgttgcaacttgccaaatatacggcaatcagaaacaatctggtgatcgacgtgcaaccgatatcttaaacttgatggtgaattatcctggtttgcgcgtggcatacattgacgaagttgaagagagagacggtgaaaaggtgcagaaggtcttctattcagttttggtaaaagctcttgacaatcatgatcaggaaatataccgcataaaattgccaggaccagcaaaattaggtgaaggtaaaccagaaaaccagaatcatgcaattgtctttacacggggtgaagctctccaaacaattgatatgaaccaggacaattatttggaggaagctttaaaaatgcggaatttactggaggagtttcacgagaaccatggtgtgcgccagccaacaattcttggtgtgcgtgagcacattttcactggaagtgtgtcctctctcgcgtggtttatgtcaaaccaggaaacaagctttgtgacaattggacagagagtactagctaatccattgaaggtacgttttcactacgggcatcctgatgtatttgatagaatttttcacattacacgaggtggcattagcaaggcttcctgtggtataaatttaagtgaagacatttttgctggtttcaactcaacactgagacgtggaaatgtcacccaccatgaatacattcaagttggcaaaggacgagatgttggtcttaatcaaatttctctctttgaagctaaagtggcatgtggtaatggagagcaaacactcagcagagacatctatcgcttgggtcaccgctttgactttttccggatgctgtcgtgctactttaccactgttggattttatatcagttcaatgatggttgtcataattgtctatgtcttcttgtatggaagactttacctagcattaagtggactcgagttagcaattatgaagcaagcacgaatgagaggtaacactgctcttcaggcggctatggggtctcaatctattgtgcagctaggtcttttgatggccttacccatgtttatggagattggactagaaaggggttttagaagtgccctaggggatttcatcattatgcagcttcagctctgctctgttttcttcactttctcccttggcacaaaatcacattactttggccgcacaattctgcatggtggtgccaaatataaagcgaccggcagaggctttgtagttcgccatgtaaaattccctg

SEQ ID NO: 24830 - DNA, 1668 bp, Oryza sativa
  ref <308>: DATABASE ACCESSION NUMBER: AK100272
  ref <309>: DATABASE ENTRY DATE: 2002-08-28
attgtgaattagatctcctggtaggaatatttatcatggtttgcatatatatttttatctcatattatccctatcttgcaactaaatcttcattctatatctactggaggttcatggcaattgacatgtttgatactgatgagtattatgatagttattggggaatgatgggcatgacaatgatagtagagataacatgctggatgccgcagacccaagaatggtagtaactgcgttgccatctaatccaataatatatttatttgctgtttggtgttctaaatcagctcatgaagaacacagcagattctaacagttcgaatttcccatataaaactataccttccataagaagtgtcacaatttgctaagtttcgttttgattttccatggtaattaggtatttcatttattgtaacaccccagcctctgtattgttccctgtctcttccatggggtcaggttcacatgcggatagcactcgagtactcgactttctcttttgtcctttcttcatgtgaaaaaagttgttaacccagaagtgctattgttggaggcttgcagcactctccgtatggcactaatcccatcatgtagcacataagttttcactctaatgggcgatgatactacatgttaatgaaagtgtttacccttcaactctttctagagtagcaatcattttcactaggtattagatgcacatgcttttaaagatgcacactactatgttgtatatgtattctattgttctattatgtttcagggtaatgatggagctagacgagcaaactctttccaccacttgggctgtctactccttgctgagcataatattatatctgaagcattccttactgcgtcatcctggtctagatgtgtcatcatgattcagcgatacaaggaagttcttgtatactcagtcctcttagcaaaatttgaacccagccagagtgggaaagcaaatacacacattatgcatggtgcctcacacgtctattttctaatagacagtttgtgaagaatgttcatgatgtggcgaagacatgggaagggcagctcaaaaggagagcagaagagtctcatgcaatccaaatgcctgataaatactcagttccttcaatgtgtacatgccctctggaatcgagatattacttatgatctatcaaaaaagtttgcaaaagctaaaagacttgggatgaggaggaaggtttccaagaaattgagatgagacaatggctacaggatatccgagagattggaaaatgtattaaattgcagcaggcgcacaagggcaagatttgtacatggaattgggagtttgaagatgaatttgaagatatcttccagtttattttgagatgatgcaagaagtggatacaatggttgggtgttttgaggttgatttttttggaccgggaagttctatataagaaattgaggcctgaatttagatccatgtatgccattgacagtagcaagtaccctcatctaaggatcatctcaaatatgtgagaagtatgcacttgctatgatttctaataatcagcttgtagggttccccgtaaggaaaaaagagtacaacaactattttacattttagcatcaattacttcggatcgactattttacccctattttgatcttcaattttgattttgcccctgt

SEQ ID NO: 24831 - DNA, 1452 bp, Oryza sativa
  ref <308>: DATABASE ACCESSION NUMBER: AK100273
  ref <309>: DATABASE ENTRY DATE: 2002-08-28
gaccccaccacctccggtccatctcggccgccgccgctgtcgctgtcgcgatcgcgatccccgcctagatagacttccccaagaacccgccgccgccgctgcaggggtggcgtggcatcgcgggagaccagctcgagccttcagcctcttttgcgccgccgccgccgccgccggtcgatccgtgttcttggctcaggcggcgtcaatggcggcggcgaatgggagcgcctgcggcggaggcggcgtggacaaggagaaggaggagttcaagcagatctacggggtgctcaaggaggagctgctcagggaccccgccttcgagttcaccgactcgtcgcggcagtggatcgatcgcatgttggactacaatgtacctggagggaagtgcaatcgtggtctctctgtggtcgatagctataagctgttgaagggcaccaatgttctaagtcaggaagacatgtttctcgcgagcactcttggttggtgcgttgaatggcttcaagcttactttctcgtgcttgatgatatcatggatgattctcacactcgacgtggtcagccttgttggtttcgggtgcctcaggttggctccattgctatcaatgatgggattatccttcgcaaccatatcacgcgaatgcttcggctccactttagaggaaaactttactatgctgatctccttgatttattcaatgaggtcgagttcaagacagcttcaggtcaattgctagaccttatcactactcacgagggagaaaaagatctaaacaaatataacataggagttcaccgccgcattgttcaatataagacatcctactattcattttatctgccggttgcttgtgcactgttgctatctggagaggacttgaccaaatatggtgctgtagaagacattcttgttaagatgggaatatactttcaagtccaagacgattatctagattgttatggtgaccccaaatttattggcaagatcgggactgacattgaagattacaaatgctcttggctagttgtgcaagcccttgagcgtgctgatgagagtcaaaagagcgttctatttgaaaattatggaaagaaagatccagcctgtgtggcaaaagtgaagagcctctacagagaactaaacctagaggcggtctttctggactatgagaacgagagttacaagaagttgattgcggatatagaagcccagccaagcatagctgttcagaatgttctgaagtccttcttgcacaagatctacaagagacagaagtagggggggtttctgtgcaggaagctgtccattgttgcatgtttcttctctagcaactgatgttgtatgttgcaatttgctgatcttggataataatgttgcaaggtgttatttcgggtgtgatggaccgcttggtgtagacattagacaataatacatgagctgtttgtcttgttattagc

SEQ ID NO: 24832 - DNA, 2135 bp, Oryza sativa
  ref <308>: DATABASE ACCESSION NUMBER: AK100274
  ref <309>: DATABASE ENTRY DATE: 2002-08-28
ggtagcctcatgggtgctcaagttcatggctgatctgagagaaatgttcgtggacctaagaagtagctctatgatccagtgttcatcgatcctccatgtgagattcgcgtgagagttcatcgtctttgcttgctcggataatcaatcaccaatccagcgggcggccggccactggcttgtggtttggttttgggggagagattgagattttgcttactttgagtgagatctagttcttcttgagttcttcctcatcaagaagaggaagcagctcgcatgcccatctcccctctcctcgcccacctcgctccgtcctcggttgctccggcggcatttggtgcccgtccggcgcggcggcgcttcgttggtaaatccgaattcgcgtctccaagctctgctatctttttgtgctttgggttgttcatctcgtgcaaggtaggagttgttagggttaagctagagaaatggtttgctagctaatgatttttacttgtacttatgattcagcatgtttctgaacctttgggttttatgactggagcagagagtgaagagtaatctggactagttttttttaaaactgtgtgcacttgccgtgttgttcgctgcagcctacagcatagtttcagctcaaatgacttgaattatacagtacatagaaagatgaaggaattggaacatttgttaatctgtgttactcataatattgtggagcttctattgaatgcattacagtagaaaaaaaaaaggtcaactatgatatttatgttgcaggaaagtgtctgatgtttttatagtttgaaactgctgctagctgaaaggaaaacaggcatgggcaatagaagttttgacttgagttgttctttgagaaaagaggaggaaaatggcacaaatttgtcgccatttgtccgcaaactttttaaagagtgggatgaccgcaaggcaaggggtttgtttcaccatgacatcagttcctgcgagacaaaggtactacctggtgaacacaattttgtggcgacattaatagaaggacgtgaccagaagaagcggcctactcaatttggaatgaaccaagtcctgcagccttttgatagcgtgaaattcaatttcactaaagttagcccagaggaagtgatcttcacattcaaagaatctcagaatgactctgtaaagtacttcgacaatgttcctcatgctgttgcagcttctcctactgccattttgatcaatgttagtgagtgctacacccctctaacagttatgcctaaatcctaatccaatatggtgcacacatgatctgtttttgccattgtttgtttgataggtgagtccaattggctactgccatgtgcttctgatccctcgaatccaggattgcttaccgcaaagggttgataaagagagcttcctacttgccatgtatgttgcaagtgaagcaaaggatccattcttcagagttggttacaacagtctgggtggtttcgcaactatcaatcatctccacttccaggcgtactatctgaaagtgcaatatccagtcgagaaggcactgacggagaagcttacgactctggggaatggtgtcagcattattcagctggttcagtatccagttagtggttttgtatttgaaggaggggcatgcctggaggatttgtccgatgttgtttcaaaagtctgcatcttcttgcaagagaataataaacctttcaatgccctcatctctgaatctggcaagagagtgttcctgctaccacagtgctacgccgagaagcaggccctcgggagagtgagccaagaattcctcgacatgagaataaacccagcagtctgggagctcagtggccatttggtactgaagaggaggaaggactacgatgaagcatctgaagcaaccatatgcaggtttttggtcgaagcgtctctgtctgaatcagaattccaagaactgaagagctgcatcttggagttcctgtccagtgcagctcctgaagaataaaggaggccaaacagttattcagagagataccgatttgtaaccgtaggtgcaataaaaagttggcccgagtctgttcttcagactgatgtacaattgaaacctctttgataaattttatataacagatgttggtgtt

SEQ ID NO: 24833 - DNA, 2885 bp, Oryza sativa
  ref <308>: DATABASE ACCESSION NUMBER: AK100275
  ref <309>: DATABASE ENTRY DATE: 2002-08-28
ggagagagagagagaggctcatcgcctatccgaccaacgcaaccactccaacccaccggcggcggcggcggcggcggtggggcgcggcgacccggcaccacgcgaccccggcgtcgccatgccgcactcgcgctccgattcggggtcgggttcccgcggcgctgacccttgccgtgggaggaagcgcgggaggctgttgatgctcgaggaggaggaggaggaggaggagtcggggatggaggggtgctcggcgccagcatgcggcgatgtgcggggggatttcgttggatggtgttcggaccggcatcaggtggcttcctgcagcggcgaccagacgcaaagcgccagcatgtttgccgcgatgcaggagaacgcctgctccatcgatagcaaaggtgtggtgtgtccgcagtccgggctagggtattcagctggccagaacgggacgcacggtggtggcgggtctatgctgcatcagaatttggaaggctgcatgtatatgaatcagcttgggcagatgtgcggcccttatccacctgaacaactgtacgatggattatccactggtttcttgcatcgagaccttgctatttatgccgtttttggtgggaaaatggccaaccctgtttccttaggttccctgaaacagtttctttcacaatggagttctgattctgtggtcgccacaagagacgaatcggtggagaataagaaaatggcccctgttaacaaattgattcttcctgataatctttcaagtgaagaatcatgttggatgtttgaggacgcagaaggccgcaggcatgggccacattctcttgctgaactttcttattggcatcacagtagctatctacatgacctttcaatgatttaccatgttgatagcaagtttggcccatttacacttgtatcactaattgattggtggagtggaggcacagagcattcagaatcttcagccaatgattctgggtcactgaacgctttaatggatgatgtagttgaagatatcagccatcagctgcatgctggaattatgaaatcagcccgcaaagtttttattgatgaaatatttagcagcgtacttccagaaatgattgcttgcaggaagacagagaagcaaatggctgcaaaacgtaagagccaagctgctaagactgacaatgtgagtaacaagaatgctttggtacttaagggcaagggtgatggaacatctactcgtccaaaaagcctaaactcgtataataataaagtaccggaagatccttctgtggctgttcaatcaactgcaatgcagtatgaatttgctgatatattatcggcagtttgggaaacaatttataacaaatccatgaagagtatctgggatgaagtactgtatgatcctgtcatggactactgtgatgcatggcttaaaagaaaaaatgagtcgaatcttctctctacagttgttcctggagcctctgataaccaaaagatgcaagacacagatgaaatgtcaccaaaggcaatttgtgattcagatgctcctgaaagtgacatggatttccctccaggatttggaccaaatcaggaatctgctgagcattcccactctgcgtgtgttgagtatgttactgaaaaaacagatgggaggtctggatcaagtatcacgttgttttctggcccttaggacgagttcaggtaatgctggcaaatgaactatatgtggcagcaaaggaagctttgttccagcattttgaggaggtcatttcagaggagataacaaactgtttgtgcattggatttgaagatgatattaatcaagaacgaattcgtacgcctgttcacgcaccagaaccatccagtcctcctggaatatctgtgcatgaaacgcccagtcctgctgaaatgcctcgagatgaaatttcggatatggctgaaatggctcgagatgaaatttcagatatggctgtagatacaataccctgccctgctgatatggcggcatctggaacatcaactgttcctgaagtgacaacagacaaactgatcattccttacgtggaacatcaatcgccctctgcatctcatgcaagtatatttggaaagttggatgcacatgaagaagctgaattggatgacagttttgatgaggtgcctcctggaacagaggctggcttagcttcattggtgattatggagaaaaacaaataccagccctcaaaatcagtagactcagtgcttgacatttatagatatactagttgggcattcttcaggcaaatactgcatgagagtgtaatgaaagagtgggcatctctcttctcaggtgctctcagcaattgttttgactcatggtatgccaggaaaaatattgtggctaaaaccatggatgatacattgagacccaaagaatatacttactacaggaagaggaaactgaggaaaaactgtgaagcatcatcatcagaaaaaccaatggatgagcagctctccagacctcttcgtgatcttgttgaatgcaaggttaatatgaaaaatatccatcgatcaagcaaggctgggatttcgcagagagtttctgttgtggagaagccctccaaaaagcgtgccaaaccttcacataatgataatattaatctgaatatccagcaggacttgaaactcctttccgacaaggtgcaaaagagaaacaggtcttcccatcctaccagtaagcctcttgttagtagcaaagtgcctactgaggatagaactacatcagcaatgcctgcaaagaaaagaaagcagaaaaacttggccactgagtccaacctgaagacaaaagcagtaattttatctccagaatcacatggttgtgaagcgcctactgagaaaagaactacagctataatgcctgt

SEQ ID NO: 24834 - DNA, 2340 bp, Oryza sativa
  ref <308>: DATABASE ACCESSION NUMBER: AK100276
  ref <309>: DATABASE ENTRY DATE: 2002-08-28
gctctcctccccttctccccatctctctctctctcctctctccccccattccccacctcgcttcgcctcctcctccgcctccgccgccgccagggcctcgccctcccaccccagcagcgccgccgccgccgccgccgccgccgcggccggatcccacgcgcggctcgccgcgccgccccgttcgaccccccgaatcgccggatcccgtcgccggcgccgccgccgcgcctgggggggagctcccaccagggcgctccccgctatcctcctccgtccttccgccgaggtgatttgctcggagctttcgctttcttactagtttttttttggatggggagtgatcttctcttacctcggtgggtgcttaatgtgctggtttgaacagttggttgtgggggaaatgagtagatgttgtgcttgtgggttatctgagttggttggttatggcttgaattgcttcttatttggtgctggaatggttagctgaagcaagtaatgcgctaccagcttagtcatacttaggtggtgtgcttgctaatttagcagattaaaccggttttatgcgaactgcgaatatatagaagtgatggactgtgagcatcttttttgcggggataaggtttagtgtgtagtcgaatcattctagctttgcagggttcgggcgtgagcttatggggtactagtaaggagtaaatatttagtttagtaatttgttgcctccttaagcaaatttgaattggatttgctttgcaaccacccttatgcgattgcttgatgattgcagtgctgtagaagctggtcacagttgaaacctggaaggcagctgagtctatggtttttgtgggccattgtgctatcgatgcgagtagagagcatgcgtggcagctgttcttcgggtgatgcccctgaccagagaagctgccgatgcattcggtgtggcaacaattacactgtttgcaatcttcgctgttctgggcctcttctgcattttccagtcaatctatttccggtttcggattcggagaggggccttcattccgctcggatactttaacggcccttgggtgactcgcattgttttgattctgatcaccatttggtggggagtaggggagattgtcagattgagcttcttgaagagaaagttgttctccagcatattattgcagaagggtgtatgcgacgcgtacatcctttccaatctagggtttgcggagccaagcatcttctttgcgtttgctttccttcttcacggctcgttacagaagagggagttgggcactttgaaccaaagatggaattggaagaccataggctacatgttggttttctgcgttccggtgttcttcgtgcaggctcttctcgtgtttgttgggccaacatttgttaaggatgagaacaatacacatggaaggaaaaagattgctaaatacttcatccggacatccatgccagttggggacacaaatatttgcacctatccattgtttggcaccattttcctgggacttatagacgccatcctgatgagctatgtctcctatgttggatctcgggttttgtccttggtcatcaacaaggcactgcgaaggagggtttccttgctgatgttatcggtgcttttcttccttcctatcagggtgcttctacttgggttttctgtcctgccccaaccaggagatgtagcatttgaagtgatcatcttcttgtcattcttgatgatgatatcctgcacaaccgttggtgttctcttgctggtgtactatcctgtagcagattcattggctctccgagagataggtcagagggaaataacagagatggttccttatgatgattactactatgaaggtgcatcgcttgtagccaaccagagctttcgagaaattgaacggaactcagatacttcaacgaagcgtggttccatatctttccgcactatgatcagggaagaccaacttcagcaggatggtgttgatgaaattggattctcctctcgtagtggtgctcatattggatcaccctcaccttcaggttcatccccaagtgctgcaatgcccatgctccctctcaaggaagtacctagatactaagaagtattcacctgttccttttgcccttctactatgttctcccttttcttcttcctctttcttcctcttactaccttaatgataacagttttgtggcaatcaaaggtttttgtaaagtttccaagtagcttgactcatcattagtttagtactcaaatctcatttatcaaagtggcatgtagctggatgttgcaaaggctgaggagctgtgcatctggcattggctggaaaggctgagttggaattc

SEQ ID NO: 24835 - DNA, 2352 bp, Oryza sativa
  ref <308>: DATABASE ACCESSION NUMBER: AK100277
  ref <309>: DATABASE ENTRY DATE: 2002-08-28
gaggccatcccaattcccaaaccctagccgccggcggccgcaccacacatccccgacccaccgccgttgccgcagccgcagctcgatcgcgagcgagaggggctagcggaaaccccagcagcgtgagggctaagcttcgcggcggattggagatgacgcagaagcagagccagttcaaggggcaggggaagaagaagaccatccctcccaaccgccatggcaaggcgccccacgtccgcaaagggaagagggccgtgaagccgaccaagttcaccaaggacatggacgccgataaggtagactcggtttactgaatgcttgctctattcatcaatcagcacctgctttctccctttcggacataagatgttatttggggcagcatttggagattgggggtctagccttctctgagctctgaagtaggcaagaaacaaacatgaattaaactagtgatacatgcaaaccaaatatgttctgtttttgagtgatataagatggaaagttgtgtgttcgttaatgtgctccaaaataacatagcaatattcttttactactccaaaagagagttacatgcctattgattacggattctctactagtaccaataagatcaaagttaatgattttgtcggaactaatatccagtgatagttcttttcaacataggttacatatgtagtaatatgtttcttcataagttgaggagccatggaaataataattgagaggtgtatggacatatggttagtatggttagaggggtaaaggtaaaggctaaattgctttgattagcagctgggatttgtcttttagcgcctgatttgtgttgcatttcaatatgggtgcccatattaggctaatacatgtaaatctcatgtggttgacttcaacattgttctggtgaggcccttttagggtaactgggtgctgaggtcatgctccatgattcatggcctatggctgggaactgtacaaaatgcaaaaactgatgttaatattaccgtataaatatatgaatttatgataagtttgactccagaggcaattgcagagagagtccgacagcattgctgattttttggctggctgttgctgaatatgtccgctaatgccattactgtcgttccatttacagtggttgatctgtttgtattggttgtttgggtgcttgccaatcatctaccgtatgttaaacctagggatggatttaaaatctatttttactggttgacagacacagcatcagtattcagtagtcctatagatatgccaagctgtagtttaatccatggtttttctgccagtacttgcaatgataggtctgtttagtatgatattaacagttttctatggctcggtaatatggtaactaaactggcatagctgtagcctgtagtcaacatgttatggccattgataagttacatcatacttgggactacgatacattctttgtagactatagttttctagctcggtatgtttttgtaatattccgaattgtgagggatgctgcctcagttttctattccactttcttgttataacaagattggtaactcaattgcatgaccgtgtagttgttgttgatgttctacggtttgatctgaaaaaccagttttacattgcttcttgttgtattttgatttacaggataagttgtgtttgtgaactatgtagatgtttgggaaatatttggcaatgttttaccttgacttgcggtgtggtttttgcacgggcaatcgtgtccgaagttatcgaggatcaaattttattagactattttggtgttgcagatttcagtaggtttggcattctctatgatactaataaacgaccacttttggcgccatgtctgtttgtcaaatggtgacattagagtttggaataattgaaagcagactagaccttctgatcttattgttattaactttgtgattacgtttttttcttatttgagatatttaagatatttagtaaccagtgaactcatttgatgttctcttcttcccaggaactcacaaaattcatcaaccagtgcaacgagaagaaggctgcaagtcttgccagcaaagaaggcggcgacctcagtatactcaaggcggacgttgatccctccaattcaaactaggaatctgtggctacctctgcctacggctatgtgctatagaagatgagtgtgtggaatggatattatgttacattgcatacttgcattctagtatttccctgcagaaatgtagtaattctgtatttctctgaagaaggttatgcttactgctaaatgtttacaatcaatcaacggttaatactgtaaagttctcttctcatacatacaaataattaagg

SEQ ID NO: 24836 - DNA, 2821 bp, Oryza sativa
  ref <308>: DATABASE ACCESSION NUMBER: AK100278
  ref <309>: DATABASE ENTRY DATE: 2002-08-28
gaccattaattgcgagctgcttcttcttcccgttcttgtcaagactgaaactcactggatcatcgaggagtggcaatggcggagcagcagctgatgcatggcaccctcgacgccaccatcttcgaggccaccaacctcaccaaccccacccgcctcaccggcagcgcccccgagggcatccgcaagtggtgggaaggggtggagaagacgaccggggttgggcagggcgggacgcggctgtacgcgacggtggatctcggcaaggcgcggctcggccggacgcgggtcatcgacgacgagccggtgaacccgcggtgggacgagcgcttccacctctactgcgcccacttcgccgacaacgtcgtcttctccgtcaaggtctcgctgcccatcgacgccgcgctcatcggccgcgcctacctccccgtcggggacctcctgtccggcgaggtcgtcgagcgcaagctcgacatcctcgacgagcacaagaataagctcccccacgggccgaccatccacgtccgtctgcagttcaaggacgtcgccgtcgacggcgacgggaagtggtggggcgccggcgtcggcaacgccgggtacgccggcgtgccgtgcacctacttcaagcagcacaccgggtgcggggtcaccctgtaccaggacgcgcacgtgccggacacgttcgcgccgacgatcccgctcgccggcggcgcgcactaccagcaggggcggtgctgggaggacgtgttcgacgccatcagcaacgccaagcacctcatatacatcaccggctggtcggtgttcaccgacatcacgctcatccgcgacccgtcccggcagcgccccggcggcgacgccaccatcggcgagctcctcaagcgcaaggccagcgagggcgtccgcgtgctcatgctggtctggaacgacgtcacgtcgctgcagatcctccagtcgctcggcatcaagtggggcttcagccagacgcacgacgccgagacgttccagtacttcgaggacaccgacgtccactgcgtcgtctgcgcgcgccaccccgacgccggcggcagcatcgtcatgggcgtcaaggtgcccttcgcttccacccaccaccagaagaccgtcatcgtcgaccacgacatgccggccggcgccggctccggcctccgcagcatcgtcagcttcgtcggcggcctcgacctctgcgacggccgctacgacacgcagtcccactccctcttccggacgctcgacgccgcgcaccacaaggacttccaccagccgagcatcgacgacgccgagctcgccaagggcgggccgagggagccatggcacgacatccactccaggctcgagggccccgtcgcctgggacgtcctctacaacttcgagcagcggtggcggaagcagagcggccacggcgacctcctcgtcaacctcaccgccctcgagcacctcattgcgccgcagtccgcgatgaagctccccgtcatcggcaacgacgaccacgaggcgtggaacgtgcaggtcttccgctccatcgacggcggcgcgtgcgacggcttcccgagcaacccggatgcggcggcgcggctcgacctcgtgagcgggaagaacaacgtgatcgagcggagcatccaggacgcgtacatccacgccatccgccgcgccagggacttcatctacatcgagaaccagtacttcatcgggagctcctacgggtggaggcccgacgacggcgtcaggccggaggacgtcgaggcggtgaacctgatcccgagggagctctccctcaagatcatgagcaagatcgccgccggcgagcggttcaccgtctacgtcgtggtgccgatgtggccggagggccaccctgacagccaggccatgcaggccatcctcgattggcagaggaggacgatggagatgatgtacgccgacatcgccggcgcgctcaaggcgaagaggatggacgccgacccgagggattacctcaccttcttctgcttgggaaacagagaggtgaagaggagtggtgagtatgtgcccggacatcacccaagagatggcacgccatatgccaaggcacaaaagacgcgccggttcatgatctatgtccactccaagatgatgatagtcgatgacgagtacatcatcgtgggatcggccaacatcaaccagaggtcgatggacggcggccgagactcggagatcgccatgggagcattccagccacaccacctgaacatcggtggccagcttgcaagaggtcaaatccatggcttccggatgtcactatggtatgagcacctaggaggcgaaccgcacgacgacttcctgcacccggggagcctggagtgtgtccggagagtgaacgagatggctaacaagcactgggagctctacgccagcgaggagctccatgaagacctcccggggcatctgctaacctacccgatcgccgtggctaaggacggcacggtggcggcgctcccgggggcgaagttcttcccggacaccgaggcgccggtgctggggaagaaggcgatcaatccgttgatgacccccgatatcacctcgtagatcaggtgaaagtttgtgctggtggtgcatgcggagcaaaagtttgctagtcctacactggagtgatgctgcttccatcagaatgtgtttgtttttcaacggtgtaagttgtcctagaatgtcaccctctatgtaatgttgaatcttaattccattgtctaaaataaccaaatttgtaatgttactggaacaaattttgtaatgatgagtatgcacctgcaaatcgatcacccagaggaggccaacc

SEQ ID NO: 24837 - DNA, 2186 bp, Oryza sativa
  ref <308>: DATABASE ACCESSION NUMBER: AK100279
  ref <309>: DATABASE ENTRY DATE: 2002-08-28
gcgctgtggcaagatagatccgacgagcccgccttcgccggcggcggcggcggctactcgtcctcgccgctcaagtggcgtgacctccaccaccaccatcaccacagccccgtgtcggtgttccagggcccgtcgtcctctccggcggcctcccgcagcccgccggcgtcgtggctcgccggccgcgaccgcgaccgcgagcgcctcttcgccggcttcgtgcgcaacgcgctgggctcctgcgttgactacgccccggcactcagcccgcggtcggaggtcggcggcggcgagctcgcgttcgagctcgacgagaacctcgcggaggcgagccccgcctgcgagccgtgcgcccgggagctcctcgccggcgcccaggctcgccaccgcatcttccacgaggagctcgtcgtgaagaccttcttcgaggccgagaaggctcaccgtggccagacccgggcgagtggcgatccatacttgcaacattgtgtagagacagccgtgcttctggccaatattggggcgaattcgacggtcgtctccgccgggcttctgcacgacaccattgacgattcattcattgattatgatcacatctttcacatgttcggagccggcgtggccgatctcgttgagggggtctcaaagttgagccacttgagcaaacttgctcgtgataacaacacagcaagcaggattgttgaagcagatcgattgcacacaatgcttcttgcaatggctgatgcacgggcagttctaataaaattagctgaccgtgtgcataacatgaaaactttggaagctttacctcttggtaaacaacaaagatttgctaaggagaccatggagatctttgttcctttggctaatcgattagggattgccagctggaaagaccagttggaaaatctttgcttcaagcatctgaatccagaagagcacaaggatctatcatctaaactaaccaaatcctttgacgaagtgctaatcacatctgctgtggacaaactagatagaggtctgagggatgcaggcctctcatatcacaatctttctgggaggcacaaaagcctatacagtattcacaacaagatgctaaagaagaatttgacaatggatgagatccatgatatccatggcctgcgtctcgtgtttgagaaggaggaagattgctatcgagcacttgatgttgttcatgaactatggccccaagttcctggaagatttaaggactacatatctcgtccaaaattaaatgggtatcgatcattgcacactgttgtcatgagcgagaatgtccacccatttgaagtccagatccgtacaaaagagatgcacctgcaagctgagtatggattcgcagcacactggaggtacaaggaaggcacctgtaggcactcctttgtactccagatggtggaatgggctaggtgggtgcttacatggcaatgtgaagcaatgaacaaagaacgacctgcatctctaggcgacagtgatgcaattaggccaccctgtccatttcccatgcattcagaagactgcccttactcatatactcggcaatgcgaccatgatggaccgatatttgtcatcctactggaacatgacaagatgtctgtgcaagaattccaagcaaactcaactgtaatgaacctcatggatcgagttgggaccaacactccaagatggagtccctacagcatccccatgaaggaagatctgcgaccgaaggttaaccacgagcccataagcgatctgagccggaagctcagcatgggggatgtggtggagctgacaccggcccttcctcacgagtcgctccccaattaccgggaggagattcagcgcatgtacgaccgtggcggattcgccctcgccacccggggtggcagctcgaggcggtgacagtacttcgacaatcttaacagccccaccgcatcattgtacaatgttgtccaacctaattcaattcattgtaaatacaaccctaattcttcgcagccgcagaaaccggaacaacacccccaccaagttctgtaagctggggggagtctgttctgctgcctggagtctgttagcttgacccaggaggctgcaatgtgtaaaagtaaaaacagtgtataatcttttccaaggtagttccagcttctcccaggatttgtggagaggaggctgtagcagaatct

SEQ ID NO: 24838 - DNA, 2126 bp, Oryza sativa
  ref <308>: DATABASE ACCESSION NUMBER: AK100280
  ref <309>: DATABASE ENTRY DATE: 2002-08-28
gatgggccgagcactgaaaccacttccgccctaaggtagttgggtcaagtaggcggcgctggtcgagctccggcgagccgccggcgaggtcgccgcccaagaattcctctcgacacctctgcttctggcgaacggtgagtctccggtaaacggaagcgatcgaagaagtgggggggagggggggagtcgccgcgtggttgctttgtcgcctcccccgccggtggggatcccttggcgctctcgagccacagccatggcgctgcacgcgacgtcctcgcgcgactccgtgcgcgcggcggcggaaggagagccggaatgggcgggcgacgcgtcgcggcggccggccgcgttctacagcgcggtgttcgcgcagatcgaagaggtcgggtgggagcggctggtgagcggcaagggcgacggcggcgtgtcgtgcctggtcttccgcatcctgtaaggatctctggtctcctatgtttaccggcatgtgtggtgtttgacctgtggctctgtggtttatcattcatcactagcatgcatggctcatggaatcgcaaaccagattttataatcaggacacccagagaggaaattgacagtagaagttgcttcagaagcaaagcttttttttttcgaggagtagcaatgttatttgctatagattggaggagaaactgcaagatgtcttgctgtttgataaattgttcggcaaacatcttcttattaagctaatgaagagattagaatggaaacagttcagaactatatgaggaaatatccaaacaactatatgaggaaatatccaaacacttcacctatgtgatattcttaacttttgtacttcatgtaaacttttagtttatggtttgtaatattcttcctggtttcagggatgatcagggacgaaaccatttactggagatcacgctgcccatgaactacccttcaagtcctccttgccttgtggcagtatatcccgcccgacttgcgatgcttctttctcatgtttcatgtcatgagtggaatggtaatgcacgttatggcatttaacttgttttcttcttacaggatgttccttatctaccagaattacagtggtcaaaaggctcaagactaaaagatgttgtctgccagttccaagagcacctgaagatattgcaagattactggtctataatggatgacattgataaggtcctttgggttgttgatccaacaaagccaacctttgctatgtctcatcgccgtatagctttaggtgatgattgctatcttttactacatgttaatgtgcgaaagcccagatcattaccagaggttcgcttcctgggaacagatgggaaactggacagactgataactaattggagaaaatattgcaaaaagtggtatatccttagatttcttacattacatgctgtacatatgtcccatacaaaattttatactgacatgcttagccatgcttaatgtaatatcttctttcctgaacaccaatgtgtattttgcttcctgaacaccaggacttgcaggatagttcattatgtatttccagtactaataaagtaggattgcagcaaagtgtaataaatatcctgttatttagcatatttttctattattaggagtgcagacaagaaattccatgaaaacctgtcaactgtcttggatttcgctttgcctccaccaccttcagtcaacatcgaagatgacgagcaagttgattgtggaatatgttatgccaagcatctgccaattgatgatgaacttgggactcacagcgggggcacgacagattacacatgtgaaaacccgagctgcagcagagctttccattctgtctgcctgagagactggttacgcgcgattactacaacaaggcagtcgttcgacgttctgtttgggaactgcccctactgcagcgaccctgttgccgtgaagatcaccgaccgctaaaacagtcttcagaggcagatttcagctgattctaaccactcgtgagaccattactaactagtcagttgccatgtacagtgttatgtttcagttttctcaaagaaagctctagagcgcaacgtggaatgatgctctcatcagtttttttttcattcagaaaatgatgatttagc

SEQ ID NO: 24839 - DNA, 2649 bp, Oryza sativa
  ref <308>: DATABASE ACCESSION NUMBER: AK100281
  ref <309>: DATABASE ENTRY DATE: 2002-08-28
ggtgggaagcaagaatggcgtgctctccgcgtgtgttcctctcggcgtcggctactcctcctcctccatctgctgctgcttcctcttcgtctccgttcctctccacggggcatgtgtcctcggctccgtccacgtccaggcaagcgtttctttcatatggtgtccccattgatccgcgcttgccttcttgctcgtgttcttggccacccatttctatctcttttttttttccgatgcataattcatggttcgaaggtaaaggtgctccgtgatgctacgttcgtttgtccagtaagttggggagattgttgtggtggttagtacacaagaaaatcattcgctgtcagttgttggtttgttccaactgctctgcaattcgagtgaatttagcatcagctgttccatatattgatgatatttggtacgactagtttagaacttttcattgtgatgaatttggtggccatcgtcgctggctcacttcactggatcagtctggcacagcactagccctcattttcccaaaaaaaaagaagaaaaaaaaagagagataatgtctggcactacccacaattacttttggtagcagaagaatactactcgtttttctagagtgttaaacaattcaccttcaccttttgggttgggagtgatcaaactactattggaattactattatgtgccaacggctatttctttgcttcagtttatcatctgtagtatttccaccgagttaactgatgcccaattatatgttttttccttgcttagatggactgtccaatacaagcagccaggacatacattctatcgaaggacccatgtgcaaagcttcttggcttttgctagcacagatgtatgattcaggctttctgtgtagatcatttcatttttgggggttcaaaagtacttttggtttggtaggtctacagaatgtaaaattacaaaatttattgaatatggtattggtaacttcaagtgtttttgtaggagcatgatatttagtagtggatcttgagcaggtgctgtatccctcaagaatttctgcagaaagagattcattatttttagctatagagtagatattattttgcctctaaaaatggattcaatacttcttttgaaactaatatacaatgttcttttgctttagtcaaaactttgtcattatcgtttggtatctaagacactgagttcaaatgaatcaggcatcagaaggcaaaagaagttcaggtgataatgtggtaatggttgatccactggaagctaagcgcttagcagctcaacaaatgcaacaaattcaggccagagaaaagctgaaggtgcagtatttgatatttgtcatgtacttccacagttcccaccagacctgtctcctctaaagttcaaaatattcttgttgttttctaaaccaaaattaataacaacacccccagttttataaacacttatcagcaaatttctttcttagagctggaagcagtgattgacttttccctagtcatataaggctcttagcctttttactgacttgtgctgccctatctactttttgctggaccagatctttatcttctactgtttattgatcaaaatgtggcagtgtgttctgtgttgcataattcagttatcctaaactaattattgaggaagctttaactgtgatgatgttcatgtggacgaaagttgcttttgaaatctgcaaggtttctttgctcaaatttattttcgattattcagttgcttgtcatggcattccatgaccatgcataaaagctatcatggctagtctgtaaaatccttatcagggagaaaataagtactgcacctaaaaacacatctatgtaaaccagtaatagtttcctcagtcattaccgtagattactccatgtttcctgctggagaactcgcctgtttgtattcctctctgattaaaatcaaaatgctctatgttggtgctaatgctttatgaacatcctttcaacattatgccatatcatagttgcctgctacgcagagacgtcgtcgagcagaagctattaatggtgcattggcaatgataggactgactgtaggattggtactggaaggtcagacaggaaagggtatcttggcacaggtatttcatctgaatataaagaaggcataccatcttagtaatcagagcccacaacgaatagctatgatactgtaaaaaatataccattgttacctatctaccataaagtacagcacatttataatcatctgcactttcattcctgcagctggctggatatctcacggctttgtctagtttattcgggcaatagcagatcatgattcatgagttcctttttttgcttttaacttcctcaaccaggaaagcttttgtctgaatctcatttgctggatccaaccaatttgtttatggttaatcctgtccatatttgcaatgacatgcagatttgcaggctagtgatccaattaattgtattgatctggcgcctgtcctgaaaattcatacacggtgtatcaagttaaaacattgtattctcccgcaaaaaaaaaaatcaatgctttgtattcatattcttttccatgtactcaacagcttattatgacagtgtaaagcaactgaagagtagttcaattgatcattcatactc

SEQ ID NO: 24840 - DNA, 1617 bp, Oryza sativa
  ref <308>: DATABASE ACCESSION NUMBER: AK100282
  ref <309>: DATABASE ENTRY DATE: 2002-08-28
gatagttagttagagcagctaaaggccatctgactcccaaagaatagaactgcaacgtaccatgaactacccctgattaccagaaacagagggctgataaaacatcaccaggcggttcctcacaggggggttgtgcagtctacaagcaaattgtacataagaggaattgaaagagatgtatcatcatcaacaacagctccaaagccacaaccaactcttgccatctaggcagagtttcccttcagaacggcacttgcttatgcaaggaggaagtgtttcaggggaatcagggcttgttctctcaactgatgcaaagcctaggttaaaatggacccctgagctacatgagcgatttgtggaggcagtaaatcaacttggtggtccagaaaaagctaccccaaaaacaatcatgaggctcatgggcgtccctggattaacactgtagcatctcaagagtcatcttcagaaatacagactaagcaaaaatctccacgctcaagccaatgcgggaaatgtgaaaaatgcgctagtttgcaccacagcaacagagaaaccatctgaagcaaatggatcaccagttagtcacctaaacctgggaacccagacaaacaaatctgtgcacataggtgaagcccttcaaatgcaaattgaagttcagagacggctacatgagcaactagaggtacagagacacctgcaactccgaattgaagcacaaggaaagtatctacaatcggtgctggaaaaggcacaggagacacttgcaaagcagaatgcaggttcggttggtcttgaaactgcaaagatggaactgtcagaattggtctccaaagtatcaaccgaatgcctccagcatgctttttcaggctttgagattgaaagttcacaaatgctacaagggcacaccatgcatctcggtgatggatcggttgacagctgtttaactgcatgtgatggttcccagaaggatcaagatatcctatcaattagcctttcagcccaaaaaggaaaagagattggttgcatgtcatttgatatgcatgtgaaagaaagaggaagtgaggatttgtttctcgacaagctaaacagaaggccttcaaatcatccagaaaggtgtgagaggagaggtggctttagtatgtcatgccagacagcaaacttggatctgaacatgaacgacacttatgacgggcctaaacactgcaagaaatttgatttaaacgggttcagctgggcctaggaaatgagcactaacaattgccatgtcctttagcactatcagtgagaacaagtgaaaacagattttttcttccgatgatcaatggtattgccatgccttcgattgaaagatcaacgccacttcacaatttgaccatctctgctgttataaaatggtaattcactgaaataagtgatggaattagcgataagatgcttcttgtgcaccacacaagttaccaatttggccatgtagatcccattcccggagtcggtagcatttgagaacttggcactctccattattctgccttaccgtgattgtagtttgtaccatagaaatataacaaattttgttaaaaattccatttgagctaatgattactagttactactgtc

SEQ ID NO: 24841 - DNA, 2002 bp, Oryza sativa
  ref <308>: DATABASE ACCESSION NUMBER: AK100283
  ref <309>: DATABASE ENTRY DATE: 2002-08-28
ggcggggcccaccctggaggttcgtctcctcgcgcattgccatcgccgagctcccgaaaatggtgcggtaacgggagcaatcgcagaagaggactggaggagatcgattccccattgaggacgtgaaattggattctgtggcagaagaaagatcgatcgatctggtttggtctggtctcctgtaaaagaattctcccatggcgccgccggccacctcgctcatcggcggcggcgtcggcggcgtcgcctatgtcgttctgctcttgttcctcgcccaacgcctgcgtctcggatgctgggttcgaggtatccagccgtgttctgatgtcagatgagcaaggaagaagtgggttgctggctacatggaggcgattgatcgtcgagacaccgtcgccgggagccggtgctgacgctgctcatccaggaaccaaatctcttccgctggccgcggcgaggactcaccggagagaccccctcgccaacctcaccatgtacagcggcggctggaacatcagcgaccagcattactgggcttctgtggcatacaccgcggttcccctcatcctcgtcggcatgctgtggttcatcgtcttcgggatcgtcctgctcatcatctcctgctgctgctgcttctgccggaaaaagtacaacacctactcgccggcgacctacttcatctcgctgatcctcctcataatattcaccttggccacaatagccggatgtatcatactgcattgtgggcaggagctattccacagtagcacgatcaaaaccgtggactacattgtcggacaaggcaatctgacggtggatagtctgaggaacttctcaggtagcttggctgcagccaagaacatcggggtggatcaggtcttcctaccagttcaagtgcagcagaagatcgacgtcatcgaggataagctgaattcttctgcaaatgagttctccacgcgcgcgctcgaaaactccaagaagatcaagcatgtgatggacaagatgcagtacaatttgatggttattgcagctgtaatgcttggccttgcgatattcggattcctcttctccatcctggggctgcggtttcttgtttccctgctggtaatcgctggctggttcgttctcgtcatcacaatcatgatgtctgctgctttcctcctcctgcacaacgtggtcgccgacacatgcgtggccatggacgactgggtgacgcacccgcaggcgcacacggcgctggacgacatcctcccctgcgtcgacgtcgcgacggcgaacgagtccatgtaccggagcgaggaggtgacggtgcagctggtggcgctggtgaacaacgtcatcgtcaacatctcgaacagggacttcccgccgtcgttccggccgctctacatcaaccagtccggcccgctgatgcccaagctctgcgaccccttcaacccggacatgagcccccggaaatgcgcccccggcgaggtcaacttcgacaccgcggcggcggagtggaagaagttcgagtgccagaccaccgggccgcccgggtccgaggtgtgcgcgacggaggggagggtgacgccggcggcgtacgggcagatgacggcggcggcgagcatcagccaggggctgtaccagtacggcccgttcttgatggagctccaggactgcagcttcgtccgggagacgttcacggcgatcagcgacaacaactgcccgggcctcgagctctacagccggcacgtctacctcggcctgctcctcatctccggcgccgtcatgatgtccatcgtcttctggatggtgcacacgcggcagcggcggcggcgctcgctcgggctcggcaggtagatgtgaagagtgatactgtacatcgcaatatggcatgcctgccatggcagccatgccccgcacctgttcatcaatctgatctggtgatttgtactatatgatgtgaatgatgtcaatatcgagtatattttggaagtgaaaaaaagaaaatgtttagctgctc

SEQ ID NO: 24842 - DNA, 1659 bp, Oryza sativa
  ref <308>: DATABASE ACCESSION NUMBER: AK100284
  ref <309>: DATABASE ENTRY DATE: 2002-08-28
cccctccacggccactcattcctccctccccaccaccaccaccaccaccggcggcggcgcaatgctggcagcggcggcggcggctctccggccagcgcccaccaccgcggccttctccccctccaccgcgaggtccccgccaccaacgctcctctccttcgctcctccccgctctcaccagcgattccacctctccgccaccgccgagggcgcgggcaccaccgcggcgcaggaaggcgcgtcggcgtcggcgtcggctcccccggtcgacgaagcgcgactagcgcagttcgcggcggattggcaggcggcgcgcgcggagagggaccaggggaagatcctgaaactgcaggtgatacgggccaacagcggcgggttgatcgtcaggttcaactccctccagggcttcgtgcccaaccctctccttagccccgcgcattggtgtaaagaccccaaaaggcccattcaagatgttacaaaggaccttgtgggttcttccatttctgtcaaggtggtcgaagtgaacgaggaagaaaggaagcttgtcttctcagagaaggatgcaagttggttcactcattcttctctagtcaagattggtgctatctatgatggaattgtcggttcagttttccactacggtgcatttgttcatctgcgatttcctgatggaaattatcatcttactggccttgtacatatctctgaggtctcttgggatcttgtccaagatgtccgggattttttaaatgaaggtgatactgtcaaggtcatagtggtgaacattgatatggagaagtcaaggatagctttatcaatcagacaattggaggaagatcctctactggagacattggacaaagttattcctttggaggctgatcaatcacctagtgctgggatcatatcatctgattcatctccttcagaagctgatcttcttccaggacttgatggtatatgtaatgaactattgcaagaggatgggtatgatttctgtttgtgtgtttttttttttttggtgtatggttttttgatgttgatgtactactttatgtgcccagtagctcttcttgactagagaacagttttgttaaccaggagggaacccatgaataggtttttacgttgcaatctccatgttttaatcagttctatttcttcacagtataacagacgtacagtttgggcgccgagcattggagaaacgtgttgtttcacaagatctggaactctggctttccagtgtgccagctaaggacaatcagttcaagcttcttgctcgagctgggcgacaggtccaagaactatatttgacaaccagcctagaccaggagggcataaagaaggcggtacagagagtactaggacgtgttccttgagtttggagaacagcgagtatgaggcagcatgcctgtactccccccaattttctgaccaaccgactatagtgaaacaacagcacgagcagacaacctgaaaagttcgtcgttgtttcctcattctgatgctgagcttcctctcagctggagactacttaaccgaaaattgcaaattttgtcagtaatacaatgagtaggtagttatcttcgtgcatgcatgtacctatctgaaacctcaaggccacctgtatatatatcagtattcatcttcagtgcc

SEQ ID NO: 24843 - DNA, 3414 bp, Oryza sativa
  ref <308>: DATABASE ACCESSION NUMBER: AK100285
  ref <309>: DATABASE ENTRY DATE: 2002-08-28
gatcaaccctctctctctctctctctctgcctcggcgacctcgcctccgcttactctcccacccagacaaaaccctctttgcctctcatggcgtcacgcggcggcgacggcctcgtcggaggagggcgcgggcccctcggtgggcgggacggtagagggcgcggcccggccggtgggcgaggcggcggaaggggaggcggccacccgcagcagcagcagcagcagcagccgggctacggccgcggcgacgggggcggccgtggtcctgcccctgctgctggtggtgtcgttggtcgaggaactggaggcggcggcggcggcgggcgcggggacggcggacgcggccgtggccgtggcggcggcggcggagatggcgttcgccctgctatggccgcggctccggcggcgtcgactcctggtccggttgctgttgctgctcggagtactcctcctcctactcccgcggtccagatccccgcggtggcgtcgtcgtcgtcagcgcagccagcggcggcggcgcagcctcctccggcagccgcggcggtttctgccctcgcgagggacgttgggaggcagctggctgtcgtggcgggcggcggccgccccgctccccccgcggcgccgccggcgcccatcccggtgtcgagcaagggcgtcgcgccaccgtcgcggccggggttcgggacggtgggggagaggatcgtggtgcgcgcgaaccatttcctcgtccgcgtctccgacaacgacatgatctacctctacgacgtgagtttgagtcccccaccaaagaccaggcgcatcaacagggtagtgatgtctgagctggccaggttgcaccgtgagtcgcatctcggtggcataagcttcgcgtacgacggaagcaaggccctgtacactgcaggaaaactgccgttcgactccatggacttcaagatcaagctgggcaaagagctcagggaaatcgagtacaaggtgacaattcgacgtgctggccaagcagatctgcaccacctgcacgagttcatcgccggccggcagagggactctcagcagcaaacgatccaagcactggacgttgtactgagggagtcaccttctctgaactatgtcatcgtttctcggtcgttctactccactatgttcggccgacaagacattggtgatgggctggaatgctggaaaggatactatcagagcctgcgcccaactcagatgggactctcattgaacatagacatatcctctaccccattcttcaaacctatcagcgtggtagaatatgtcaagaattgtctgggcacacctactaatgctaatggccctgaccctaggcggcctctttctgacattgatcgcctgaaggttaagaaagcactacggggagttcgtgttgaaacaacacaccaggggaagagcagcaagtacaagatcactacgattacatctgagccactgagtcagctgaacttttctatggatggaactacccagactgttattcagtacttctcgcagcggtacaaatacaggctgcagtacacgtcttggccctgtctgcaatccggcaacccttctaaccctatatatttgccaatggaggtatgcaccattgtagaagggcaaagatactccaagaagctcaatgacaaacaagtgactggcctcctgagagcaacatgccagcctccccagaaaagggagcagaaaatcattgagatggttcaacacaacaactacccggctgataaggtggtgagtgattttagaattaatatttccaatcagatggccactatgccagctcgcgtgctgcctgcgcccacgctgagataccatgactctggaaaggagaaaacttgtaatcccagagttgggcaatggaatatgatcaataagaaaatggttggtggagctgtggttcaaaagtggacttgcgtgaatttttcacgcatgcatattgatgccgtgcacagactatgcggcgaactagtttatacatgcaatgctattggcatggttttcaatgaaatgccagagatagaggtggggtcagctgctcctaataacatcgaagctgccctgagcaacattcacacaagggctcctcaactccagctgctcattgtgattctcccagatgttaatgggtattatggaagaattaagagggtgtgtgagactgaacttgggatagtatcccagtgcctcaagccaggccgcaagctcttgagcttagacaggcagttcctggaaaatgtctcactcaaaatcaatgtcaaggctggaggacgcaactcagttcttcagagacctcttgtacccggtgggcttgaaaacacaacaataatttttggtgccgatgtcacccatcctgcttctggagaggactcatcggcgtcgatcgcagctgtggtggcctccatggactggcctgagatcaccaagtacaaagccctcgtctctgcccagccacctcggcaggagattatacaagatctcttcaccatgactgaagttgcgcagaatgctgatgctccagcacagaaggctgaaggttcgaagaagaatttcatatgcggcggaatgttcagggagttgcttatgtcattctacagtaagaatgctaaacgtaagcctcaaaggataatattttacagggatggtgtaagtgatggacaattccttcatgttctgctctatgagatggacgcaatcaagaaggctattgcatctttggacccagcatacaggcccctggtgacatttgtggttgtccagaagaggcaccacacaaggctcttccctgaggtgcatggaaggcaagatctgacggacagaagtggaaatgttcgtccaggaaccgtggttgacactaacatttgccaccctagtgagttcgacttctacctgtgcagccatgccggaatccagggaacaagcagaccaacccactaccacgttctccatgacgagaaccgttttagtgccgatcagctgcagatgctcacttacaatttgtgttacacctacgctcgatgcacccggtctgtctctgttgtccctccagcctactacgctcacctggcagcattccgggcgaggtactacgatgagccccccgccatggacggagcttcgtcggtcggcagcggcggcaaccaggcggcggccggcggccagccaccggcggtgcgccgcctcccgcagatcaaggagaacgtcaaggacgtgatgttctactgctgatcgaatcggcgcctagcttgggttttaactacaaacattttgttggtcgctcgtcagtattcattcaggctgttagtgtactgtgctatctctgaaattgtgatggtgtcatttgggacatgttaacctgttgttgaacttgtgatctgtgatgttgatgcagctgct

SEQ ID NO: 24844 - DNA, 4221 bp, Oryza sativa
  ref <308>: DATABASE ACCESSION NUMBER: AK100286
  ref <309>: DATABASE ENTRY DATE: 2002-08-28
gaccccgagatctcaaaaacaccttcgtcctctccacccaacgccataccaccccccctcccccctctctctcctccgcgcgcctcagcggcgaggggtttcgccgccgccgccgccgtcgcgccggggggacggctagagaagatgctgaccaagttcgagacgaagagcaaccgggtgaaggggctgagcttccacccgcggcggccatggatcctggccagcctccacagcggggtgatccagatgtgggactaccgcatgggcaccctcctcgaccgcttcgacgagcacgacggccccgtccgcggcgtccacttccacgccacgcagccgctcttcgtctccggaggtgatgattacaagattaaggtgtggaattacaagacacaccgctgcctcttcacacttcacgggcaccttgactatattcgcaccgtgcaattccaccacgaatacccatggatagtaagtgctagtgatgaccagacaatccggatctggaactggcagtcacgcacatgtgtagctgtgctgactggacataaccactatgtcatgtgcgcatcattccatcccaaggaggacctggttgtgtcagcatcactggatcagactgtccgtgtttgggatattggtgctttgaggaagaagacggtgtcacctgcagatgacatcctgcgtctcacccagatgaacacagatctgtttggaggtgttgatgcagttgtaaaatatgtgttggaagggcatgaccgtggggtgaactgggcatcatttcaccccacattgccactcattgtttccggggcagatgaccgacaagtgaagctatggagaatgaatgacacgaaggcttgggaagttgatactttgcggggacacatgaataatgtgtcatgcgtgatgttccatgctaagcaagacatcattgtgtccaactcagaggacaaaagcattcgcatctgggatgccacaaagcgaaccggtattcaaacgttcaggcgggaacatgatcgtttctggattctttctgctcaccctgagatgaatcttcttgccgctggtcatgacagtggtatgattgtgtttaaattggagagggaacgtccagctttctctgtgagtggagatactgttttctatgtgaaggaccgttttcttcgtttttttgaattcaccacacagaaggaagttcagcttgctccaataagaagacctggatcagtgagcttgaaccagtcacccaagacactatcttacagtccaactgaaaatgctgtcctgatttgctctgatgtggatggaggctcatacgaactctacattgttcccaaggattctgctggcagggctgactatttgcaggatgcaaagaagggagctggtgggtcagctgttttcgtggcacgcaacaggtttgcagtccttgagaagagtagcaatcaagttttggtgaagaatcttaagaatgaaatcgtaaagaaaagccctcttcctattgccacggatgcaatttattatgctgggactggtaacttgctgtgcaaagccgaagaccgagtgaccatctttgatctgcagcaaaggttaattcttggtgagctccaggcaccttctgttaaatatgttgtttggtctagtgatatggaatctgtcgcactgctgagcaagcatgcagtggttatagcaaacaagaagctcgtccatcgctgtacactgcacgaaaccattcgtgtgaaaagtggtgcctgggatgagaatggtgtgtttatttacactaccctgaatcatatcaagtattgccttcccaatggagatagtgggattattaaaaccctcgatgttcctatatacataacaagggttattgggaacaatatattctgtctagatcgtgatggtaagaacaagctggtcacagttgatgcatctgagtacattttcaagctggcccttctacgcaaacggtatgatcatgtgatgagtatgatcaagaattcccagctgtgtgggcaagctgtgatttcttatttacaacagaaaggctttccagaagttgccctccactttgtgaaagatgagaagacaagatttaaccttgctcttgagagtggtaacatccaaatcgcagttgcttctgcaaaagagattgatgacaaggatcactggtacaggttgggaattgaggccctgaggcagggaaatgttggtattgtggaatatgcataccaacgtacgaagaattttgagaggcttgctttcctatatcttattactggttacatggacaaggtgggtttcatgtgcaaaattgctggacagaacaataacctgatgggtcaattccacaatgctctgtatcttggtgatgcgttgaagagagttgagatcctagagaatgctggacagctacctcttgcttatattactgctaccacccatgggctcacagaaattgctgataggcttgccgctgagctgggtgaaaatattccttctcttcctgaaggaaaagctcgctctcttttgatcccccctgctcctcttacagccagtggtgattggccattgcttagggtgatgcatggtatctttgagggtggactggatgctactgggaaggctgaacttgaggaagacgatgaagctgctggtgctgactggggtgatgaggacctggatatggttgatgcaagcgaagcgatggcaaatggtggtgacggttttgatgctgaggagggtgaagcaaatgaggaggatggcgaggaaggtggttgggacctagaagatctggaacttccgcctgaagcagagacccctaaaaatgctggcaatgcacgctcagcggtcttcgttgctcctccaccaggcatgcctgtcagcctgatttggactcagaaatcttctcttgctggggagcatgccgcagcagggaactttgacactgcaatgaggttgcttagccgccagttgggcataaaaaactttgctcccctcaagcccctgtttgttgatctgcacatgggcagccactcatatcttcgtgcacttgcaactgcccccataataccaatcgctgttgagaaaggttggagcgagtctgcaagtcctaacgtgagaggccctcctgcacttgttttcaccttcccacaaatggaagacagactcaaggctgcctataaggccaccacagatggtaagttcccagaagccctgaggcagttccttagcatcttgcataccatccctcttatcgtggtagactcgaggagggaagtggatgaagtgaaagagttgatcgagattgtgagggagtatgttcttggcctgaggatggaacttaagaggaaggagctgagagatgatgtcaaccgccaacaagaattggcggcttacttcactaactgcaagcttcagagagttcatatgaggcttgtgcttggaagcgctatgggtctgtgctacaagcaaaagaacttcgctactgcagagcactttgcaaggatgcttctggagaacaaccctaatgaggcccaagcaaggagggctcgacaggtgcagcagcagtgcagtggcaagaaggatagctctgagctgaactatgactacagaaatccatttgttgtctgtggcgccacgtatgttccaatctaccgtggccagaaggatgtttcctgcccgtactgtggctcccggtttgttccttcgatcgaagggcagctttgtaccatatgtgagcttgccgtggttggtgcagatgcttcaggcctcctctgctcccctacgcagtcgagataagcgtcggtagatatgctcccttatattctttctagtctctcttaagacttcgctatgatatattttaccaggatgtttactgattgtaaggaataagtagtgttatacatggttgagtttttgtttcactttttctccatttcccttgatttttgtttgcctcgaggctgttgttacacttgatacatgcttgaggacttctgatcagctcatgcaaatgctatgctcggacgttatgtaccaatgtttgtttcactcatgtaaacattcggcgtcgtgttagttacattcattagtaactatgaatgtaacagttgccaatgaccaagttaacaaattacgcttagtgttgtaaatttcaatccagacgtgtgtggattgtgctcgggcaagaacagtttatagattagtgaattttgc

SEQ ID NO: 24845 - DNA, 2553 bp, Oryza sativa
  ref <308>: DATABASE ACCESSION NUMBER: AK100287
  ref <309>: DATABASE ENTRY DATE: 2002-08-28
gactcgcctccttcccttccgagaccacgcgcgaactgccccatgacactccctcctcctcctcctcctacttaactaggaaatcttcgcgcgccagctgatcgtataccacgtacgtacacatgggctaccaccagcccgtacacggcggcgccgcggccggtgccggcgggagtggcggcggtggcggcggcgaccacctgcatcagcatcaccacccgcggttgcacagcccgcggatatccgggggcgggtcgatgacccggcgtgccaactcgttcaagcgcggggagatcgagctccagatcggctcgccgcgctcgccccgcggcgacggcgtcgggagccccctcgccgagtcgtcgtcggcgtccgaggcgtccgcgggcggcggcggcgcggtccaccaccaccaccaccagagccagcagcagcagctccggttccgcctcttcaagcggccggggtccggcgccggggaggtcgtgctcgggctggggatccgggagaggaggcggattgggaacctgctgttcctcgcgttctgcggcgtgtgcctgctcctcggcgtcgccaagatctgggcgggcggctggttcgccctccccggcgacgacaaggacgctgatttgcaggatctctcaatctcattctccagtgatggggggtatcaatttgatagccactttggacatgttggagggaaagagagtgacaggatgttgatgacagtgggatcagaagacagtgttcctgaggcccccgatgtctggtcccagccaagcagcggaaagttcagacaatgcattatttcgaattctcataaaaaggaagattctcacacaaatggatacattctcattaacgcaaatggaggtttgaatcaaatgcggtttgggatatgcgatatggttgctgttgctaagatcctgaaggctacattggttctaccttcacttgatcatacatctttctgggcagatgacagtgaatttaaggaccttttcaattggagacacttcattgagtcactcaaagaagacattgatattgttgaaatgctgcccccagcatacaagcatattgagcctgtggctaaagctccaatatcttggtcaaaggtgaattattatagagatgaaattctccctcttttgaaaaaacacaaagtcatttactttacgcatacagattctcgccttgccaacaatggtcttcctagttatattcagaaattaagatgccgagttaactataggtctttgaagtattcccaaacaattgaagatcttggtgctaccttggtttcacggatgcatcaggatggaagcccatatcttgctctccatctaaggtttgagaaggatatgctagcttttactggttgcagccatagcctgacatcagaagaagaagaagaattgcgtaaaatgcgttatgaggttagtcattggaaagagaaagaaataaatggaactgagagaagaagtatgggtggttgtcctttgactcccagggaaacttcgtttttactcaaaggattgggtttcacacgaagcaccagaatctgcttggttgcaggtgaagcttttggcaatggaagcatgcaggcgctgatggatgattttcccaatatatattctcattctacccttgcaacaaaagaggaacttgagccctttagaaatcaccaaaatatgcttgctggtcttgactacattgtagctctccagagtgatgtctttctttacacgtatgatggtaatatggccaaagctgtacaaggtcataggcgtttcgagaacttcaggaagacgatcaacccggataggatgagtttcgtgaacctgatagatgaatatgatgaaggaaggatgtcttgggatgacttcagctcagaagtgaaacgtatacatagagatggagagcgaataggggctccatatctcagggagcctggggaattccccaagctagaagagtctttctttgcaaatccgttgccgggctgtatatgtgagaagcttaatgacgagtgaatatgtatatatttgacgattctttaaccatctacgccacaggtcaggagttcaggatatatagtgcccctctgctccttgacagtgggtcagcagcaatatgcacaattatttagtcatgatcacttgaccagtgaattcgtgctgatgagagttcagagacgagacaccaattttcaggttcatcccacaaaagtttgctgcatgaagatcatcagatattgcaaatacgaaaaccatgtgagaagtctggcagctgctaatcaattttccagcagccagagcatgccatctgagaaggctggaacatcagagcaactgcaatcagtatacggaaggtaaataccgcggaggagattacacttacggctttgtattgccaatttgccatatcataggttttttggtgcacatggtgcttcccaatcttgctgttgctaagctgtattttgtgtggactcaatacaactgaattttgtcacttgtattttatctggatatattgaattaaacg

SEQ ID NO: 24846 - DNA, 2982 bp, Oryza sativa
  ref <308>: DATABASE ACCESSION NUMBER: AK100288
  ref <309>: DATABASE ENTRY DATE: 2002-08-28
ggttcgctatctcttcttctcctcttctctccccttctctctcttggtttctctctctagccatcggctgcctctctctctctctctctcctcgctgccccataggtggacgcgggtcaacgggccggtcgccggcggcggcggctgcggcggcgagaggaggtagaagctccggcgatcgcgagggcaggcggcgggttggtgcgctgccggcttcgagttcgagcgggcgggccatggggaggaacgggagcgtcaagcgtacgtcgtcgtcgcgggcggcggcggcgttcacggcgaatccccgcgactaccagctcatggaggaggtcgggtacggggcgcacgccgtcgtgtaccgcgcgctgttcgtccccaggaacgacgtcgtggctgtcaagtgcctggatctcgatcagctcaacaacaacatcgatgaaatccaacgggaggctcaaatcatgagcttgatagagcatcctaatgtcatcagggcttactgctcatttgttgttgagcacagcctttgggtagtaatgccatttatgactgagggttcatgtctgcacctaatgaagattgcatatcctgatggtttcgaggaacctgttattggctctattctaaaggaaacacttaaggctttggagtaccttcacaggcaaggacaaatccatcgtgatgtcaaggccggcaatatccttgttgataatgctggtatagtgaagcttggggacttcggcgtgtctgcttgtatgtttgatagaggtgatcgacaaagatctaggaacacatttgtgggaacaccgtgttggatggctccagaagtgctccagccaggcactggatataacttcaaagctgacatatggtcatttggaatcactgcacttgaacttgcccatggccatgcaccgttttcaaagtatccccctatgaaggttcttctcatgaccctccagaatgctccacctggtctcgactatgatcgagaccgaagattctcaaagtcatttaaggagatggttgcaatgtgcttggtaaaagatcaaacaaagagaccaacagctgagaagttgctaaagcattcatttttcaaaaatgcaaaacctccagaattgacaatgaagggtatcttaactgatttacctcctctatgggaccgtgtaaaggctctccagcttaaagatgaggcacagttggccttgaagaaaatgccttcttctgagcaggaggcactctccatgagtgaataccaacgaggtgttagtgcatggaacttcgatgttgaagatctcaaggcccaagcatcactaattcgtgatgatgaaccccctgaaataaaagaagacgatgatactgcaagaaccattgaagttgaaaaggattcattttctaggaatcatttggggaagtcgtcgagtacaattgaaaatttcttcagtggacggacctctaccactgcagcaaattcggatggaaaaggcgatttttcatttgaagcttttgattttggtgaaaacaacgttgatactaaaattatgcccaatgggtatgaaaacgctagatcagagaatagctcatcaccctctacatcaaagcaagatccagagtcaaaatattggagaagtacttctggacagaaacaacaaacttctggcactccagctgtccattctggtggggttaatagctcaacaactgaaaagggccatggtgttgaaagggatgcaactgttcaattggcatctgataaacttaggactgaaacgagaagagcaacaaatcttagtggtccattgtcactgccaactcgtgcttctgcaaacagtctgtcagctcctattcgatcttcaggaggatatgtagattctttgggcgacaagtctaaacgtaacgtggtggagattaaaggacggttttccgtgacatctgagaatgttgatcttgctaaggttcaggaagttccattgagtagcctctcccgcaaatcaccacaggcttcaccactaaaaaaatctgctagcgttggtgattggttggtgaacactaagccaatgtctaacagtcatcatgtgaaggaactctgcaatagctccgtatcatcatcaattttaattccccaccttgagaaccttgtgaaacaaactatgtttcagcaggatctgataatgaatgtgttaagtagcttgcaacagaatgagaaagttgatggagtattgtctggaatatccccacaactccgaaatacggatagtgacacaatggttggatcagttaattctgaaaaagaacggtcgttacttgttaaaatttcagaattgcaatctagaatgattactttgactgatgaactgattgcagctaagctaaagcatgtacagttgcagcaagagttaaatgcattgtactgccgagaagaaatagaagacattagggatgatgacaacgaagaaacatgaagaaacataacgccagacattcgactgatatgaattgcctgccctggcttgcatcgattgcttcgctaactgccagtgaagatgagtttaacaagagaacctcatcaacctgcacttcctgaatcataaaattggtagaattcgcagaagccagctcatgcaggtgctctaagaaaattcgttctgggaaggttgacatgccctggcctggtgccatcagtgtgtatattagttttttgttaagctttcttttccatttattttttcaatggtgttttggtggtcatgaaattatggtgccgtgtattttacagcttcggccacaactatcattgaaatagctgtgattatgtagatcctagggcgacccgttggttctcatagcagaaaagacagcctaataaaatgtattttttttctacctgctctggttattcttttattcttgtttcaaatatggcgacttgaaaactccagaacagtttgcatatcaatggatcgtatttatgaataatgattt

SEQ ID NO: 24847 - DNA, 1410 bp, Oryza sativa
  ref <308>: DATABASE ACCESSION NUMBER: AK100289
  ref <309>: DATABASE ENTRY DATE: 2002-08-28
gagctatctcacgtagtctccctctcccggtcttcgcgacgacgctagctttacacgttcgtgataatggcggcgctgctgctgctggcggcggcgatggtggtggtggtgttcgcgcacgcggcggcggcgcagcggtacaatgctatctacagcttcggcgactccatctccgacaccggcaacctctgcgtcggcggctgcccgtcgtggctcaccaccggccagcccccctacggcaagaccttcttcggccgccccaccggccgctgctccgacggccgcgtcgtcgtcgacttcctcgctgagcactttgggctgccgctgccgccggcgtcgaagggcggcggcgacttcaagaagggggcgaacatggcgatcatcggcgccacctccatggacgccgccttcttcaagtccatcggcctcagcgacaagatttggaacaatggccccctcgacacccagatccagtggttccgtcagctcctcccctccgtctgcggcaacgattgcaggagctacctgtccaagtcgctgttcgtggtgggcgagttcggcggcaacgactacaacgcgccgctcttcgccggccgcgccatgacggaggtcagggactacgtgccacaggtcgtcagcaagatcatccgtggcctcgagacattgatcaggatgggcgcggtggacgtggtggtgccaggggttctacccatcgggtgcttcccgatctacctgacgctctatggcacatccaacggtgcagactacgatcgcaatggttgcctcaagagctacaatagcctctcctcctaccacaacacgttgctcaagagaagcctctccaacctccagaggacgtacccacatgccagggtcatgtacgctgatttctactcgcaggtcactgctatggtccgctctccccaaaacttcgggctgaaatacgggctgaaggtgtgctgcggggcgggagggcaggggacgtacaactacaacaacaaagcgcggtgcggcatgtccgggtccagcgcctgcgccgacccggccaactacctcatctgggacggcatccaccttaccgaggccgcctaccgctccatcgccgatggctggctcaagggcccctactgcaaccctcccatcctccactgatttattaatcctacatgtataatatctgcagagagatgagatgtgacccaattaattgtgcactgtttgcttaattaggccgaagtgtgtgtttgtatttgtgtgtgggttaattaatatttgttcatggggtttacttaattagagtttggttgtgatttggagagggtgattttaagcctgatgatgtatttagttggggatcgaatcaaactgatccaagtgaataatgaagctcaaacaagggcttttccattt

SEQ ID NO: 24848 - DNA, 2766 bp, Oryza sativa
  ref <308>: DATABASE ACCESSION NUMBER: AK100290
  ref <309>: DATABASE ENTRY DATE: 2002-08-28
gtatgtttgcggttgcaccatgttttggtgttcttggttaacatcaaatagcatagccagctgattcatccatgcgcaactttgacaaaatgcacttttttttcaaatctctgttagccttttttttttttccaatagacgtgctgcctcacctatttctcattgttctgttcaccctttttgttatagctgtgtttccatcactaaatcctcgctttgttaaattagacgacactcgtttcgtgtttcaccacttcaacagagttgatgacttgcaaaagcccattgaaaacccagaaaacataaactgggagagctatgcaagaggtgctgtttatgccctgcaaaattttggatatgatctcaagaagggtattataggatatatttctggtgtgaaaggacttgacagttcagggctcagttcatctgcagcagtaagctaactgatatgtcatgtatatttgagttaaaattgctggcacaatcatctgtaatatgtagaaaactggaaatatgagtttagtgccaacctagttgtgaatcgaatatgcagtatttcataatcatgacatatacttggctcacatttgacttggagttcaaagcaaatttgtgaagctactaactttgtactagtatcttctaaaccttcagctcaccataacaaggacagaaacttccagttcttactctaggttctcaaaagaattattaatataattgatactttggttagttatgtgatcatcaaatgcctatttctgtatgctcctcatcaggtcgggattgcctatttgatggctttagaaaatgtgaatgatctggttgtatcaccagtggacaacattcagttggacaagtgagtttgtttccttttagtaagcattccatgtggactaacattatgaattcatacatgggatccagaacagttctaatttcaagtatctatgttgaagtccccacaactatctactattgccatgttctaaagcaacaatcaaatattgctacataagatttattagctcattgagtcatggtcactagcagagttcttaatttcatatccctatttgtcaggtccatcgaaaataaatatttgggtcttgaaaatggtattctggatccatcagctattttgctctcacggtatggctatctcaccttcatggactgcaaggtagtactttcccttgtattttctgaaagtctactattttagtaatatattcagtatgacttctgttttttcaaagttttgagactggtatatcattttttctgtaaaaaaggcttttttttattcacacaagttcattttttatgatattgcattgggtccatataattatttcaatccttctcgacaattctttctttgttttgtggtttcattgcgcatagttttagaaaatgtgcacttcaatgctctctgttagcatttatagtgactgagactctctttgcttgagtagaccgccacacattcctacgtctacttctcagtgttgagtaaaagtcagcaatgtcaaggagaactaccattcaagattttgttagccttttcagggctgcaacataacctaccgaagaagagtggatataatacgcgagtttttgagtgcaaagaggctgcccgtgctcttttatggtgagctttgtttgagtataacaaattctgtcaggcaaatatgcatcttgttcagtttgcagattcgtctatgatggatgttggcagattttttgttcagaacatacccaatttcaattatcattttgttgtttgaattcccagtgcttcaggctgtgaagatgcatcaagtattcttcgtaatggtaaactatttatatgtactttttgttatgaccaactctaaaatttaaggttgataccattttgttttcttctaacacagttaacccagccatatacgaggctcagaaggttgtcatttgaattctctctcttaaaatattttcttacttgtaccatattttgaatctgaatacattccatcacactcttttcttgcagtgtatattagaagaaaatctcgctaggagagctgagcactacttctctgagatgaagcgagttgtcaagggaagagatgcgtgggctcgtggagatcttcgtgagtttggccagctgatctctgcatctggtcgcagctccatactgaactatgaatgcgggagcaaggagatgatccagctgtacgagatcctcctcaaggcacccggcgtcctcggcgcgcggttcagcggcgccggcttcagaggctgctgcctcgccgtcgtggagagcggccacgcggaggcggcggcggcgttcgtccgggccgagtacgagaaggcgcagccggagctggtgagcaagatcccgccgggccgccgcgtgctggtctgcgagcccggtgacggcgcccgcgtcatatagctcaccgcccaccgccgtactgccggtctcgccggagcagcctcgcattgccgtgcccggcgcgccgcgaaggcggtggcgtcgtggcgacgccggcgtgcaaggatggacggtggtcgcttgggcctcggcgcggcgagctcccccggtttacgcgtacggagcttggctagttccagttgagacttgagagtgggtgtaatggtaatggtataggtacgaactgtccgtgtgtatacgggtacagactacagagtgccagcttttgtccgtgtatgtgtagaaccaattgatgatcaatttttgataaatatctcagc

SEQ ID NO: 24849 - DNA, 2969 bp, Oryza sativa
  ref <308>: DATABASE ACCESSION NUMBER: AK100291
  ref <309>: DATABASE ENTRY DATE: 2002-08-28
ggtacttgtaataaaatttggactcctttcccctccctcccctccttccctctgcgcacccaacccaacccatccgcagctttctcccacctccgcgcagccggtcatacccccattccaggccgctagggttcaccgctgccgcccgcgacggccgccgcgcgccgggcacacagcgcgctttcgccttcacgggctcccgttgccgtctcgcgtcgtgcccgcccccgcgcggaggcggagctatccaaagttatcgcgtccccctcgcatagatctgatattcgcgactggacccgctcctctcggctcgcaatgctttttggagttttgtttctctcccatcccaccacctcggcctcactgagatctccgactccgattacgccagccgccccctaaacctagccgcagcgcatccacccccgcgcgagactagcagcggcgggagtgcgcggccatggcgacggatcgggagaaggagcgggaagcggagctggagagcgccatgtacaccaactgcctcctcctcggcctcgatctcgccgtcctcggttccccctcgtcccccgccgccggccctcgcgtcggcctcttccgccactccaatccccgcctcggtgaacagctcctctacttcctcctctcttcgctccgcgggcccgcgcagtccgccaaggactttgataaggtgtggccgatcttcgactccgcacaatccagagagtttaggaagatcgtgcaaggaatcatcagcgagctggagcagcagggagctctgccacggagcaactccagggtatcttcactcgccacctgctgtgggccgagatttgttgagctattgtggcaactctctgtgcatgccttgagagaagtccacaggagaacatttgctgctgatgttgcatcaagcccgctgcctgcagcactcacagacgtctcttatctacatgccgctgcattactccctgtgactaaggcaaggatagctcttgagaggcgtaaatttctaaaaaatgcaaatattgctgttcaaaggcaaacaacctggtcaaatttagcccatgaaatgacagctgaattccgaagtctttgtgctgaagaggcctacctacagcaggagttagagaagctgcaagacatgcgaaacaaatccaaactggaaggggaactttgggatgaacgtatctcaagttcatctggacagaattcccatttggtgtctaaggcaactcgtttgtgggaaacaatattggctcgcaaaggccaacatgaggtcttagcttctggaccaattgaagatcttatagcacatcgtgagcataggtaccgtatatcaggatctcaattgctagcagcaatggatttgagttcaagcgttccacattctgagttactatcagctcgagctagtgaagcgtctccatttttggacaaacaagaacagatgtctgctctattccaaggaaaggaagaagccctctcaaggttagatgataggaatggacgtgctcaacaacagactgttgatgtggctgaaattcttcgccgttggactcatgctttacagcgtattcataaacagtctcttcatttggccaaagcaaatgatggagatggaccagaactactccgaagtgcatctgatggtgaaactagtgcccatgctgactcattaacggcaacattggctgaacatcgtcagcacttagtcagtatacagggcctaattaatcaactcaaggaagctatcccggcaatgcagcagtcaatagcagatctgtcagaggaagtaaatagcgtatctagtaatccaatggataaaatcatctccagattgtctccgtcagtgcaaaattcagggtttggaagagcagaagaaagcagcagtgaactttcagagatgacttccaagctttcttctacacaccttgacaaggctgggagcagtcctgctctaaagctaccacctttatttagtctgactccaagttcttctggaaaaggaacacaggcacaaaaaaggaatgcgttaggacggcaacctagccaagaaatcctgtctgaagagaaaactcttccccttccctcaactaaagatgaaacaaatggctcaatacatgaaaatgagggttattttgctcataacatcagacgttctgttcgtgaagctgctctatcaaagccattaagaaacccagagaggccacatgaccagagtagtggtgatggttcagagcacttctttattcccctatcaacaggtgcttcaaagatggagattgatgccgtcgataataatagaagaatgcaaaaactgggtttttcatcaccacaaatgaagttcagtgatcttcacttcaatgttgacagcccaatgcatgcaactcctgttctgtcaagtaaacttaatgggcatgatgatcctaacactgtcacaagcatgcttgatccagtaagtggtctgggacatcagtcatttataactgatgatgctcttgatcaagtattctccccaccactgttgttggagacttctttatttcaggatgcatacgaggacttgcttgctccattatctgaaaccgatacagctttaatggaacactagagctcacatgtacattgtgtaatactttgaccactgccgtaagcttcagtgcttgatcacagcctggaggttcttatggtttggttctgactgctgctgggacatttttggtgaatttcttgctggttgtgttgcttgccagttgccaccagcttgtgagggatgtctgcgtcagaagaaggggtattattagggaaagttggggtatttggttttggggagaggaaaagagtgttttagcggtgatatagatgtctgtaatgttccagccgttgtgtgcacagtaagataagattcaaaatcgtgtgtatttagcgtacattgtatgtatttcttgtaataatttgcttcgctt

SEQ ID NO: 24850 - DNA, 2886 bp, Oryza sativa
  ref <308>: DATABASE ACCESSION NUMBER: AK100292
  ref <309>: DATABASE ENTRY DATE: 2002-08-28
gtatcctcttgcaattcaattcagatttcagtttcagattcagcttgcattttgtgaatttgtgatgtccttgcggcgacctcattttgtgaatttgtgatgtccttgacgcgacctccagctcttcttctacgtgatgttcttgtcgacggtgaggacgaggaagacgcacgatcgccggaattcatggcactccgagtggtggccggcgaagatcgtgctgtggatgggcttcaccgtcgtccccttcttcctccccccgcctctcatccagctctacgggaaggtcgcgcatttcggagcagggtaagccccgcatgcactttttttttaatataaaagactataacttccggcctctacaccaatcagagatgcacacacgcaaccaacacacgtttttcagcacgttcagctaaatcaggtctctttatcgacgtaaactgatggatcatatgatgcacaattttgacagggcgtttctggtgatctagctcgtttccatttaacaatggtgatggctatattattttttcttccaacattgttatattactatgatatgtttggattagtggagcaacggtgttttgagaatgatctcttagacatttatcacattaggtgatatcttgattgatattttgtcattggcttttgcagttcacccctgcaattgatatttggagcataggatgtatatttgcagagctgcttacaggaaagccactctttccagggaaaaatgttgtgcatcaattggatctcatgactgatctacttggcactccagcagaatcccttgctaagatacggaatgagaaagctcgatgatgcctgagcaacatgaggaaaaagcctcgggttccttttactaaaaagtttccagtggtttggagatgctgagaagttgacaaaggcccttttctcctttgctagccgattagctcccgttatcatatttgtggatgaggttgcatgatggtaatcggaacaagctgaagcttaaggatgagtttgtactgctgggctgctggcagctcaggtagaagaggtgactcctccattgagctctactgctttcataattgtactgtaccattatttcaatttgaaaaagttatgcttgatttgagctgtggtgacatttgttcctgtcaaatgttgataataatgaacctatctaatacaggccttcaaataattaaaagtttcagagattactaaccttagttctcaggttagtttattcagaccacttccgatccttttggcatgcgattattttgtgactcatttcagatagattgtcttcaattcatccattgtgaatatttgaattgcttccttgcactaaatgtatgcaggcatcaaggttagtagtctggctaatattgctcgattgttaattaatcgtgacgaccttataaaatcttgacttttgtttcagaatatggatagaacatcatgctacaactttacctgctatttggaaacatagagactttggatgtttcttcttattttaacaagaaagacatcaactttttttttttgctgaaatttttcattcagatctaaacctcaacattttctataccacaacatattgatactgggacagatggccttgaatgtttttcatgacccagcagttacataggttatgttgattatcctcatatatgtcttttgacttgtcggtgtctttatttgatttattattatcaacatgcataaactgtccggaatatgaatttctctgctttacaaaagctaacaatattatgtggttttatgtccttaaaactcaactgtttatttctaagtgtaattaattaattaattagtatgcactcatcacttcatggttcttttcataagtacggttggacaaataagttctatacatatggatgtaattaattggcatttggtttcttcataccaccaaacctgcgatctatttgttctgtgtcatatagatgtctagcggtagctttaacatatcttaaaatttcatactaatggttctccaattccccatgtcatgcataaaagggttgccatgctaataccaaatacaagtcagtataaataccaaatacaagttagtataaataccaaatatgccgtgatgacatttttttaacatgtcttgagtttctctggtttagaccatagactaatttggtgtttgttgtaaagaaaggttgaacatggagtaggcccaggttatgtcaactgtcatcttaaaatactagaggatatgatttggtaaagctgtagaggttagtttaatcataaaaaagtatcattttactttagccataatttgggatgtaaaatgagcgaaaaaactcagtgctctgctgaaatagtttgtgagagtaaagtggacttttttttttttgttaaaacatcgtgaacaacgagatgctttataggtctttctaccaagtactgggaagagacatttagttcacttgtttagggcagcacataaacttatccctcatatgttctcttttatgaatgattagaatgttgaagatgtacacggctagaaatctacagcagataaacacatttgagcagatgtacgccatttgatgacttcttttttatgaaatgccagttcgtgatattgccttacaacttgttgcagggttatgccatccatctaatgggaggtattaccagcgatttgtggacaagctctccattctggatctccctatttggttagttggatcacaccgtagagaacgcaatgtaatacatcttaaataacatcattttttattgttgaaaaatttcaaattaacttaaaaatacactggcatttgtatggtgtgacaaattaaagaattagaggtgtgcggt

SEQ ID NO: 24851 - DNA, 1534 bp, Oryza sativa
  ref <308>: DATABASE ACCESSION NUMBER: AK100293
  ref <309>: DATABASE ENTRY DATE: 2002-08-28
ggcaccaacgcgcgcaacggatgaaccatccgcctgcatcgatcttcctgcgatggccgccgcgtcgacgttccctctggctctgctgctcgccattgttgccgcatgctgcgtcgccgggggcgagggcggcgcgctggtgggcgacacgtgcacggcgtcgtcggcgtcgagctgcggggcggggatgcggtgcgccacctgctcaccgctgcccgggatgggaccacccgtgtgctcgcggacaacgccccttgaccccaaggcgcacgggacggacctcgcgttcaaccggtacacatggctcacgacgcacaactccttcgccatcgttggctcgccgtcgcgcaccggcacgcccatcatcgcgccgcccaaccaggaggacaccgtcaccgcgcagctcaagaatggcgtgaggggcctgatgctcgacgcgtatgacttccagaacgaagtgtggctctgccactcgttcggcgggaaatgctacaacttcgctgcctatcaacgcgcgatggacgtgctaaaggagattggggcgttcctggatgcgaacccatcggaggtgataacggtgttcgtggaggactacgctggtccggggagcctgggcaaagtggtgggcgggtcagggctgagcaagtacctgttcccgcctgccaagatgcccaagggcggaggcgactggcctctgctcaaggacatgatcgcccagaaccaccgcctgctcatgttcacgtccaagaggggcaaggacggcagcgacgggttggcgtacgagtgggactacgtcctggaaacccagtatgggaacgatgggctggtgggcgggtcgtgcccgaagcgagcggagtcgatggcgatggactccaccaagcagtcgctgatcctgatgaacttcttcagcaccaacccgagccagagctgggcctgcggcaacaactccgcgccgctcgtcgccaagctcaaggcctgctacgacgcctccgccaagcgctggcccaacttcatcgccgtcgattactacatgaggagtaagggcggtggagctccgttggcgaccgacgtggccaacggccgccagcaatgcggctgcgacagcatagcatactgcaagcctgggtcagcgttcgggagctgcagtttgtcatcgcctcctgcagcgccaccaaagatggctgctgcttcaccgccggcagcggctccagcaccagcaccagagatggctcctagttcaccgccggcagaaccaccagagacggcgacggaggctgctggttcagcggtgcgaccggcgtccatcaagttagagaaggacgacacgacgggcacatcgccagcggacaccgccaaatcctcctcctctaatcgctctcctcatccgtccagctgcagcttcctctttggattattattgccatctcttctcctcctccacctttatatttcagattgatcgatgaggcttttatccatctcatcaattcgatggtgctaatatacttttattcatggatggactccatgatcc

SEQ ID NO: 24852 - DNA, 2231 bp, Oryza sativa
  ref <308>: DATABASE ACCESSION NUMBER: AK100294
  ref <309>: DATABASE ENTRY DATE: 2002-08-28
gtttagcacaagcaattgaatggcaccggtttttagctggtggaggctgggagccatatagcatttggagctagcctagcggtattcctctcctagcctcccctcctcctcctcctcctcctcggtagattcgtctcgtcgtcgccgtcgcctccctcctctccgtccctcacctccttgcatggagccaggcgcgccgtggcgcgatccgcgccaggggtacctgtatggcgtcggatcggcggtgcagatgccgatgcagcagcgctccgacgcggccgcggccggcggggtgctcaagaggagcctcggcgacatggagaggtggcagcagcaccagcatcagcagcgacagattgcgatgcagcagcagctgtacctgcgaaccgtgaggcagcgcacggccgcggcgtcggcggccgtctcgccgctcacctcggcggatatcgcggctgttctaggcgggccaccgtcccagcctctggttctatccgggtccagcatgggaggggccttcggatcgccgtcgtcgacgctgtcgtccatcaccaccgcgtccagggcggtggcgatgccgctcatgcagccacagctgcagcggcagcagcaggtgacatacatggcgtcctcgccacaggttcaggcctttggaacggcgagggcgctgcctccagcgccggcgacgagcgacctgtccatcctgcaggagctcgagaagcagcttctcggagacgacgatgaggtggaggccgcgatgagcgggaccggctccgcggtcaccgggtccgagtgggaggagcaactcaactccatcaccgcggcgccgtcgcccccacttactgcggcgacgaccccgaacaacaacaataacgccgtgggtatgacgcggtcgccctcgaactcgtccacctccacggcgtcttcctcggcttcctgttcgccgccgacctcggccaccacgtcgcggcaactactctccgaggcggcggctgccatcgccgacggacacaatgaaacggcggccactcatctgaccgccctcaagcgcgcggcgaactcacgcggcgacgtggagcagcggctggttgctatgatggtggcggcgttgtcctcccgcattggtcagaccgcctcagtcccggacatctgcggtggcgagacgcgcgccgggtcccaactcctccacgacatatcaccgtgcttccgcctcgccctccacgctgcaaacgtggccatcgtcgacgccgtcggcgaccaccgcgccatacacctggtggacttcgacgtcagtgccccgcagcacgccgacctcatcaggtgcctcgctgctcgccggttgcccggaacctccctgaaggtcaccgccgtcaccgatcccgcctcaccattcacgcagtctgtaacagcaacactccacctccagaagctcgccgagcgagcgggcatagattaccggttcaaaatggtgagctgcagagcaggggagatagaagcatccaagctggggtgcgaggccggggaggcgctggctgtcaacctggcgttcgcgctctcccacgtccccgacgagagcgtctcgccggcgaacccgcgcgacgagatcctccggcgggtgcgcgccctcggcccgcaggtggtggccctcgtggagcaggagctgaactccaacacggccccgctgaccacgcgcttcaccgacgcgtgcgcgcactacggggccatcctggagtcgctggacgccacgatcccccgggagagcgcggagagggcgcgtgctgaggcggcgctgggcgggagggcggcgaacgcggtggccagggaaggcgccgaccggctggagcggtgcgaggtgttcggcaagtggcgctcccggttcggcatggcgggattccggccggtggcgctcggaccgggcattgctgaccaggtgttggcccggcagggccccgtcgcggcagggttcgccgtcaaggcggagaacggcgtgctccggctcggatggatggggcgcgtggtcaccgtcgcctccgcctggcgttagaccaggggatgccgcgacattattgccgtcactaaatcggtcacttaattaattcgcgctctttttccatttttttcattttccatttggtgagtgagtttggtattgatctggtaaagcttaattagttgtagcaactcataattcttggtagctaatgcttatatatggaaaaagagtaaattatacc

SEQ ID NO: 24853 - DNA, 3113 bp, Oryza sativa
  ref <308>: DATABASE ACCESSION NUMBER: AK100295
  ref <309>: DATABASE ENTRY DATE: 2002-08-28
gaaccctaagactagaggcgggctggagcgtggaggcgggaggcgggcgcgtcggcgcgggcgtggctaggcggcagtaggacgcgtcggcggctcaggcgtgcgcccgcggcgtgtggtgccagtgcggctgcgagccggcgactgcggcgtgcgacgacgtctgcgagccgggccggcgactggggtgtgcggcgtgcatctgcgagccggcgtgaagcagggtcacgggcggcgcatggacgaccgttgaggcgtcgcccacagccggtcggcccctctcctcccgtcctctcccctcggcccttgcatgcctcctctcccctgtcctgtggccctatgctcccactggtcacgctgctgcggccgctccctcgcgccgtgctccgccgccgttgctaggccgtctcgccgatcatgcctgactcgattcaatcgattgccggaggtgaggtttttggattttggagtagcggtgtgaaaaaggattagatttctcattccctctcatttccttttccgactacacgaactagagattagatttctcccgccatacatatcctgtccctaacccaaatgcgtgatgtggccgccgcttgcagcgctgctccgtcgcctatcctctcacccgtttgactctcccgccatccacgctaaccttgtcaagtcctcctccatctccagccctatccctgccaccgccctcctcaccgcctacgccaatgcgggcctcccagccgcggcgtcccgtctgttcgacgaaatgcccacccgggatgccgtcgcctggaacgcgctcctcgcctgcctggtcttccatgctcggccctgcgccgccgtggccgccttccgtgacatggccaccgcggggttcacacccacggctacaaccctctgcaccatggccaaggcgtgtgccacgtctcgcgcccttcgtcctggccgtcaggtccacgcgcgcagcatcctcgcgtgtcaaggcgatgtcatcatggcaacaacgcttgtagatctctacatgagctgtggccttgttgaggaagcgctgaggctgtttatgtgcacggattgcccgaaggatgttgctctatacaatgctgttatttcaggttgtgtggagaatggcagattcagggaggctttctttattctggggaggattgagcttaatggaattacgctgacatgtgctctcactgcctgctcagcaacagcgaatttgatgtatggtatgcaggtgcattgcaaggctctccgtggtgggtttactttagagacgatcttatgcaatgcacttattgatatgtacgcaaaatgtgggcggacaacggctgctcgtatggtgtttgatcgaatggcttgcaggaatgtggtttcctggtccagtatgattgatgcttatagtcaccatgggcatggggaagcagcattagatttgtttaaaaggatggatgaaactgtaccagtggtcttgccaaacgccattacatttcttgctgttctttctgcttgtggacaatctggtcttgtggatgaaggcagagctatgtttcatttgatgaaaagacaatatgggattaatccgggaccagagcactatgcatgttttattgatttactaggccgtgcaggccagattgatgaggcatgggatctctattgtagtttcagtacaacccgaagtgagctttctggttccatctgtgtggctatgttgaatgcatgtagagctaatatggatgtggtgagaggcaacaaagtagctctgcaccttctggaggttgatccagaaaatccaggaagtcatgtgctaatatcgaattttcatgctgctgctagacaatggtttgaatcggatgaatcaaggaggattataattgataagggtctcaggaaagaagcagctagtagtcatatctcctccactggctagaaactgattttgcactagtctggaagtacaactcatcagcttagcaaaattatacagcacaaggataccaagaacttgggaaaccaagccacaaacacagctcatgctaattggacttgatgagtgatattgttaaagggactcacaaggacgctaagtgggaaaggggaacattttcggttcagtgtttactatggacaggatatgagattatatggtaggaccaatttttctcgcactagtgtacatttgtaaagcagtcatcttgtttccaagactatgcatttgaaagactggtcttgcaccagttctgtggtgacaggcattagtacgacagcactgaacgaaccgtctactggcaatgaatgctgttacttctgcctgagacattggaggtaatctttagcagctagcgccccattttggaaccccttctctgagggagggagagagatggtttggaatggctttggggaggagagaagagaggggccttgagctgagccttggcctccatggatacttctccatctcatcatcaccaggccaagcagccaaacaattgcagtttttggaagaaagaactatgcaccggtttaattctacccatatggccatattctcttttgtttagcgcatggcgggggctatttcttctaatatgccaaggtcttaaggtatcaaggactgcagacacctgctatatgctatcgccactaagttaatttcaagctagttggggattgattttgcaactgaatcaaactacatatcttggtctgaatccattcctcaattttcttcttggtccatctccacgctcgttctggcgttcctttgttggtcgatctcaagtttgcacctcagcatttcctcactcccaatattacttgtgttctttcttggcagcaaactcgatattttttcttttttttgtgggctgggcttgttaagtaacaaagagaattgttgtttcattgcgtttttagatggatccctaggtttgttttctaatgagccaaataaccacactgaggttgtactatgtttgaagcccaacagacaactaaacacaacgtgcctgcttatatgtttgaagcccagacccgacctaataagaggtgtattttggacctgttaaaatttactcctatttactaatgttacactttagacc

SEQ ID NO: 24854 - DNA, 2523 bp, Oryza sativa
  ref <308>: DATABASE ACCESSION NUMBER: AK100296
  ref <309>: DATABASE ENTRY DATE: 2002-08-28
gaggagacgctttgccgaattgccgtggcctcgcggcactccctcctctctcgcagactcgcagtagtatgctagggatgagaatatgagatgcctctcccaattcatggcgccgccgtccgtggcaccctgtcccgcgcgtgtcctcctcgtctcgaccccatccccgccttctctctcccgccgccgcccggcaggtcgccgctgcggtggcggggacgggggcgcgcgcctccggaccatccgatgcggcgcggcgaccgaggaggaggacggggaccggcggggtgagcgggtggaggcggcctgggaggaggaggtggcggcgcccggccgtgacctcgtcacgctcgccgcctgcctcgtcgggctcctcagtggcgtctccgtcgtcctcttcaacctctcggttcatgaaatacgtgatctcttttgggacggcataccattgagaggcgcttcatggctaagggaggagtccatcggtgaaatctggcagagagtgatacttgttccagtcagtggaggcattatagttggagtgtttaacacattaagaagttctatagcaaccaactcaaatgacactatgtctaagataaaaggtgcctttaggccatttttgaaagccatggcagcatcttttactcttggaactggaaattctttggggcctgagggtccaagtgtggagattggttcatctatagccaaaggatttggaaatgtgtttaaattggaaggagggaaaaaactttctcttgtggcagctggatcagcagctggaatcgcatcaggttttaatgctgctgttgccgggtgctttttcgccgtggaatctgttttgtggcctacttctgttgactcttcatccctttccaactcaacacctatggtgatactcagtgcagtgatagcgtctgttgtttcagagattggtcttggttctgatcctgcttttaccgttccagaatatgatttccgctcgccaacagagattgaaagtatgaggatatttacatgacttaataaatgtcagaacttcctctatatcttttgctgggcatcttctgtgggttggtgtctactacactatctaggtgtacagcactttctatggagatagttcaaagtttacaaacggcaaccggattaccaaaggctgcatctcctgccttgggtggccttattgttggtcttctagcccttgtataccctgaagttctttattggggctttgaaaatgttgatattttgctggaatcacgaccattcacaagtggactctcagcagctgtattggttcagctcattggagtaaaagtattggcgacatctttgtgcagggcttttggattggttggaggctattatgcaccatccctttttattggtgcagctacaggcatggcgtatggaaaggtcgtgaggtttacatttactggcccggattcactgttccaaatcccgttcctagatgtggcgtcacctcaagcatatggcctggtaggtatggcagccacgcttgctggtgtatgcaaggtgcctcttacatctgtcctcctactgtttgagcttactcaggactatcgtatagttttacctttgcttggtgctgttggagtatcatcttggattgcttctccccagaggttctctaggagcaataggagtaagccggattcctcagaggtgaaatcaagtaattttaaacaggaaaaaagtgtgccctcccagacacaaggagcttctgtggatacagataagcctattaccgacctatgtaagcttgaaagttcactgtgtgtctatgatgccaagcatgagaattttcaggaaaatcttactgttgcagaggctatgaagactaaatatatttctgtttcaaagacaactccagtagttgaggcactaagtcttatgcttgtggaaaagcaaccgtttgttatgataattgagagcaacagatctctaataggcttggtaactctcaaagatatccaggatttctgcagaactgcgaaaactaccagggtacagactgaggaacctgtacaaacttatgtttgtggagccgttaagtgtaaaatgtggcctgtgacacctcagacatctctaactactgttgaaaagatcatggattcttatggagtggatcaacttccagtagtttcagaacatgttgatcgtcaagatagaggacttttggttggttttgtagatgaagaaggcattgccattgctcgaagagctgtagcaacaaaagatcttttgagttttacatctgagataaagggggatagatgacttaaaagtagagctggtattacacagttctgatatttcatcccagaactgggagctgttcagaattgcccagcatctgtgtacaagtggccaacgcttcggactcttttaacatttttaccaggttgttttgttaacttcagaatgtaactcagaaacgtactgttgaagggcctttagttttgcacaagtggatatatgcggttttattgcacc

SEQ ID NO: 24855 - DNA, 1629 bp, Oryza sativa
  ref <308>: DATABASE ACCESSION NUMBER: AK100297
  ref <309>: DATABASE ENTRY DATE: 2002-08-28
accagatgaattcccagttcagagtttcaggtactctcaatctgaaacatatagaggagctagtagcaaagagaagtaattagagtgagcttaagtagtaattaattagaggaggttaattaattagggaagatgataggatggggagatgtgtacaaggtggtgggggcaatggcgccgctgtacttcgcgctggggctagggtacgggtcggtgaggtggtggaggttcttcacggcggagcagtgcgccgccatcaacaccatggtggtctacttctccatgcccttcttcaccttcgacttcgtcgtccgcaccgacccgttcgccatgaactaccgcgtcatcgccgccgacgcggtgtccaaggcgatcgccatcgccgccatggcggcgtgggcgcgcacgcgctgcggctgcgccgccgccaaggccggggcgcagtcgtggtccatcaccgggttctccctcgccgcgctcaacaacacgctcgtcgtcggcgtgccgctgctcgacgccatgtacgggaggtgggcgcaggacctcgtggtgcagatcgccgtcgtgcagtccatggtgtggttcccgctcctgctcatggcgttcgagctccgcaaggcctgggtcgtcggcggcggcggcggcgtcgggccggcggtgatgtcgtcgtcgtcgccgccggagaagcagagcgacgtcgagatgaacggcgccgtcgtcgcggcgccgggcggcggcggcggcgtccggctaccgttctgggcgacggcgaggacggtggggctgaagctggcgaggaacccgaacgtgtacgccagcgttctcggcgtcgtgtgggcgtgcatcgcgtacaggtggcacctgagcttgccggggatcgtgacggggtcgctgcaggtgatgtccaggactggcacggggatgtccatgttcagcatggggttgttcatggggcagcaggagagggtgatagcgtgcggggcggggctgacggcgctggggatggcgctgcggttcgtcgccggtccgctcgccacgctcgtcggcgccgccgccctcggcctccgcggcgacgtcctgcacctcgccatcatacaggccgcactgcctcaatcgattgcttccttcgttttcgcaaaggagtatgggcttcatgccgatgtactcagcacggcggttatattcggaacattgatctctctgccgattctgattgcatattacgcggttctgggctttgtctaacatgcatttacagcacggcatgcttacttatattagatttgcttcggtccaacaaaaattatctcgagataccgatacctcacggtaccgataactcatctgctcagctagatccaacgatcgaaaataatttggtaccgtgaggtaccggtatttcgagatactttttgttggacgataacaaacctctaattacattggatgctgagatctaaaccaatgtggagcgtcaatgacgcaacagaaggatgttaattaatcagagtacttcagcaatagagagtttcagtgttgcaagctctgattaatgatctaatattccaattagtcgatattgtgtttcgagcaaagtaaataataaagttttcaacagttttgctacct

SEQ ID NO: 24856 - DNA, 3892 bp, Oryza sativa
  ref <308>: DATABASE ACCESSION NUMBER: AK100298
  ref <309>: DATABASE ENTRY DATE: 2002-08-28
gggaatccacgatctctcgtctctccacgtcgcatcccaatccccatctcgcttctcgcttctttgaccggcggcgccgatgctcctccgccgcggcgccgcctcctcctcctcttccatggcctttccagcgccatcgttttacccgtcctccaacagtgcttccctaaagtgtacggtggtggctgcgctcgatggaggggctcaacggcggtttcaacatagccttgaggtcggggacctggcggcggcgtcggagcctctagcacaggggtttggcagcggcggctgctgctggaggtcccagcgatttaaggtcgctgcggctctcccaacagttttttggaggtcttcgacgtggtgacgacgcatcgagttcgacgggtcactgtcgccgctggcggttaggtgcgtgattagcagctccctgtgttttcccctttcatcaatgggcttgtgattcaagcgattacattgatttaaatgtggatttcgagtttctactgtctactgggtaggccaatggcatagaggaggattaggacgagaagaagctgtcctctctgttgcctctcctgtacagcccaacatactactatcatattgtctgtagctagcacatgcagaagatagactggcaggatgaggtggtggtggttcttccccagacccgtcactgctctggttgcatttattaccttttgggttgttgtcctatgaattgagcctaattagttgatattcaacagctggaggttatatttcctttttacattgcatcttcttggttgttcaacagcagtgatagcatttgttcccttagtgaaacagctatcttgttgtagcagtgatagcttttgttcccttagtgaaatagcttttggcaaattgtactatcttgttgtattggctagatgagtgtcctagatgtttaatatggcccgaggagtttgctaagatgtgtgacagaattcaaaaatatatttcaatagaatttttgttgttacctctaaataaaagaataatgttctaaatgataactatattatgttgaatcatctctaaagagttccttctgtttttgttcccactggttccatttacatggtcatgaagcagtttgcttgctggaccttttgcgtcgcttacatggctcctcccattatatctggcttttaggtaaagactattcatttctttgattgttggataactaagccagggtgatgtgaattgctgattgctgattctactgtatttaatacaaatttttcctatctttttaacagtgcttcagagggcaatgaattcttctgaagttttccattgttacctgttttcagtttcagtaaaaaactaagctcttcaatgtaaatgggacaacaatttgaatagttactataagatctttagggatcaaaagatttacttgttgcaggcttaactttcatttacattgcagaaacttatcattggtagataaggatgtgttaaaaggggcttgcttagtacaactcaaggcgaggctaatactatgccattcagaacacgatagccatgacagccaggcaaaggcaacggaaaaaggtaagctgcaggaatttctctttttacctcaccattaaacatttgcctttcattgtttgtacctttttatgatatgccatttgcatgtctgatggccacagatggttctgaaattcaattatatttttgtgtaactttgcaaacagatcgccatatgcccatatattgccattctttgtaaatgacaggcgtagacatcaatcactcagtccagtaattgcataatagtagtatttccttgtttttatcttatcatgtgaaaaagtcccctataaaatttggctttctcactattattgctttgcagaattaacatggcaagttttgtacaggaactacatatgcttgcattgaagtttctttggggaaccaggagatgctttaatctttattgatgtattgtcctatggtttgttggatagtcgatctacaaaattaatcctagcactcccaatttacctacaagaggtattcttggatgggtacaacatgttagtttggttcggttttgtcaatacaaaatcatgaggatttctagatgtgtatattctgtgatattatctataatttgatatatattaaatttatctgattatacatgagtttatatatgcgacaccattacgaactgctactatagtctccccgtgttctcttcatacacatgaataacatatatggtacaataaaagagaattgtagttttacagcctctgtgcaagtagctttttaagtttaaatggtaaatatttagttttaccttaagagaagtttaccaaaaaaaagttctttcaactgagatgcttatgatgtgtgcttgatgtcgccttagtcaatcttgataggcccaagatccccgctcaatcttcaaggaataggtttacttcatgataattcatgtctcatgttaatattgggagaggcaacccactatgctcagctcatggatcttcaggaatggagctgccagcatcttattgacaaacaaatacaaggtaaatatgcattggagatcctttctgtgatttgctctctgatgttctccttagagagaaagagaaaaaaaaaaggttaatccttcctattatttctttttattcattaattatatgtaattaccattttgaccaaaaaaacgagcactccatctgatcattttctaaaccatacaggaaaaatactccatgcacatcaacggttaatgcttttctatgagctggtcttaatatctctaggctgcactgtgttaggctggagcaccccggtccaattcttttgcctaccaaataaacttaccaacaccaagccagttgagtgctgcaatgtgcaaattaaacaatatggtctctgtagcctgctcagcaggaaaaccatttgaaatacctgtggaaatatccctaaacatgcattaaccatgatgatcatttttttttaaatactgtacggtaggtagatcgatatttgtcaacgccttagctatactagaatacgaggggcatctaagagaaaaatacaaatattgaaggctctcatggtagtttggtagctaattaatcacataggtgatgtatatttgtttctagcatttatatcagtccattgattcacagtggatactcagttattgcatttagatgtctcttttcaggaacctttatatttaagttcctttacatggctattttaagagtccgctgatttgattagtaggataacatagactgaagtgaggatctgttcattaatttgagttccttctactgattttgtaacatctctctatgtgctgacttaagtctccaaacttttgagttctacttagtaacatctctaatatactgagttaattctccaaactcttaactttaagaatgattttagcagatgctgggtattgcatttggtgatctgaattgccaagggggatatgtttcttgagtagaaagttctcatagtgaagagtcaagtccctacttaaaactaatgaatctgaaatgtagttggtttttcgtaccatagttgatcaatgcaatactattgcctcatctgactgagtttttggccaatgctagagtttacagatactattttaatactgcagtcctcgcaaacaagattatgagaaacttaaccatgtactattttcagttagttttacataacaaactgcatcttgtgcccatagatgttggatgaatcatactatgcttgccatccctactatgcgtcgtgaaattgttgtataaattatcatctatccggaactgcttctggggactttggttataaaaagaactatttaggt

SEQ ID NO: 24857 - DNA, 2784 bp, Oryza sativa
  ref <308>: DATABASE ACCESSION NUMBER: AK100299
  ref <309>: DATABASE ENTRY DATE: 2002-08-28
tgggagaagagaaaaaaaaaccaaaccccccaacgaaaacgcaagcgaaaaggagaggcgacgcgaggcgagcgatctcgcctttaccttagccaagccagcccagccgcccccacccagcgcaacgagcaggcaggccacgcacacgcactctctctcctcctcctcctctcctcttcttcacctctcctcccctcgcgcggcgcggaagccaaggggaagcaaaggaggcttcgagatttccgcggaacccccacgccaccaccatcctcctcctcctcctcctcttccccccatcctccgcctccacctattacccacatcctagggtttccccctcctcctccgcctcacctcccagtaccccatcctcccaccgccgcagccgcattcgaaggtgtgtatccatcgatccccgcctacccgccaacgactccccttcccgtctcgaggtgcctctggtccggggatcgatccttggttcctcgccgccgccgccgcttggtttcggtggggggtggagctttgtgttgctcggtgatctggaggcgtgattcgccgcgccggggccgtggattggttttgttgattggggggagttgggggtttcgatttgggagggagattgaggtggtggtggtggtgtatcgaggggccctggttttctctgctattggattggattgggatccatgatcgagattgctcggtgaagtttttggtcctaggggaattttttttatcggcccggatcaggaatggagggttctcttggggagatctagggttgcttgttctgtatcgtttctgtgtgcagaaaattagttgaaaaaaatcccaaaaaaaatagaaagaggaaaaaaaagagagagggggagagtggaggagagtttggaggctatggcgctgaattactcgtcgtgctcgctcaccagctcgttcctgatgaacgaggactgcgctggcatgatgtgtgggtgcgggtgctggtcggaggaggcctcgccgctgtcatccggtggggtgaactccctgtggtgggatgagctggagtttgagctggagctggaagaggaagaggagttcgaccctgtggacctcttgcctaccgaccccttcggcatgaacctggagaccacgttcaccgcggcgatcgccagttgcattgaggacctcacagtcatgtccagtgctgggcgttttggagacagccgcgatgatgctgtttttgccgacctgagttattacttgaataaggcttttgttctatcaccggagtttcagtttggtggctatcggggtgtttttgaaggccccttggggtttggaggcctttctgctggtgaaggtgattcttttgggttcatgaagaacccttcttcctcaggaaatgctgatgattcttttgggttcgtggagacccctcctacctctggaaatgctgcattggagtgcggcgatgcagttgaagttgttcctgtccaggagggaggagttccacatgagggaatgctgtttgcccttgactaccttggccttcgtgacatcctctctgttgagagagtgtgtaagacattgcattcggctgtcagaaatgagcccttactgtggaagtccatccacattgaaggggatttgcgccagagaatttctgatgctggtcttctacacctgacacagaagtgcccagatactttgcagtgtctaagtattgcgtgctgcgtaaatatcacagaccaggggctgaaggctgttttagaaagtaatccaagattaacaaagctgagcattttgggctgcccacggttaactttggatggccttatttccaatctcaagtcatttaatacgaaggcggtgtttggaattaagcacctcagagttggaacactcttcagtttacgaaaggagcagtacgaagagttattatccttgttgaataccgacaagacacaggaggtgcataaccgggggccaagattccttcatgctaatcggtttttatcagattgcaatgatggatatgctcttgatattgagatgtgccctatttgtcagaactacaaacttgtttatgattgcccagatgaaggatgtgatgacagaagatctggtaattgcaaaggttgtactgtttgcatactgagatgttatgagtgtggaaggtgtgtagacaagttggcattcaaggagtcattttctctggactgggtttgccctaattgtcaagagaagaaggatctgtctcccccaatgaaataggggtttgtcccccaatgaatactcttcctccgctaacagagaacagcatgcaatgctgtcatgcaagccatcttaacatatcatttctactgagaaaacagacaaaaaaaaaacgaagagtttgttattcttgaaggcgcagccatcctgacatgctacattagcttcttgcaagaaaaagaacaaaaaatagtagttagtttgattcagcaaaaaaaggaaaaaaaagattgtttcgctactattgtctgactggtgacatttcagagggattgcggttcaagagcggaagtacagcgtgaactttacgtcagtattgcagcagctgctgctgttcttggaatgttaagatcgaagatgaactgctctactcctttcacggtctcaccagagcaaataaagagaggactgctgtaatttaccttgtacatgcgtgccacaatgttgttgtagttctgagaacatttgtcacactaccatgtaatttacaactacttgcagagaaataaatgacttctaacc

SEQ ID NO: 24858 - DNA, 2771 bp, Oryza sativa
  ref <308>: DATABASE ACCESSION NUMBER: AK100300
  ref <309>: DATABASE ENTRY DATE: 2002-08-28
atcatggcttccctccctcatgcacgctgacgctgcaatgctcctcctctgcggcggctagatcattcattccaacaattaaattaacaataattgaattgaaggacattaattagtttgatcgatggcgggtgcaaacgcgtcgacggtgaagccggtggtggcggcgtgctacgacaacaacctggtgaactcgcaggggatgttcctgggcgacgagccgctgcgcttcgccctcccgctcctcctggtgcaggtctccatcatcctcatcctctccgccgccgcccaccacgtcctccgccgcctcggccagtgccgcttcgtgacccacatgctcgtcggcatcttcctcggcccctccgtcctcggccgcaaccctcacctccgcaccgccctcttctccgagcgcggcacctacatcctcgagagcgtctccctcgtcgccctcatcctcttcctcttctccatggccgtcaagaccgacctcaccctcctccgccgccccaccgcccgagccctcgccgtcggcctcgccggctccctcgtccccctcgccgtcaccctccccgtcttccacgccctcagcccctccctccccgccgacctccgcggctcctccctcatcaccgagctcgccgtccgcctctccctctcctccttccccgtcgtcgccgacgccctcgccgagctcgacctcctcaactccgagctcggccgcgtcgccctcaacgcctccctcatcaccgacgtcacctcctggttcctccgcgcctgcttcgccgccgccttcctcatcacccaggctaagtccccgctcttcaccgccaaggtcctcgcctccttcgccgccttcgtcctcttcgtcttcttcgtcgcccgccccgccggccgctacatcgcccgcaagcgcaccccgcccggggacctcctctccgagggctccttcgtcctcgtcgtcatcgccgcgctgctctccgcgctcgtcaccgacgtcatcggcttcaagtttatgatcggccccatgatgctgggcctcgcgctccccggcggcatgcccatcggcgccaccctcacggagcgcctcgactccttcttcatcgcgctcttcctcccggtctacatggcgctcgccggctaccgcaccgacctggcggagctgagcctgataggcgtcagcgcggagcacgaggagaagttctgcgcgctggagctgttcgtggcgctgtgcgtggccggcaagatggtggggtgcgtcgcggcggggctcttcttctccatgccgttccgggaggccaccgtgctggcgctgatgctcaacatccggggcatcgtggaggtggccgccatcaacaactggggggacacgatgaaggcgacggcggagcactactcgacgctgacgctgtcgatggtggtcatcacggcggtggcgacgccgctgatcaagctgctgtacgacccgtcggggaggttcgcgcgggcgaagcggcggaccatggaggagtcgcggcccaacgcggagctgcgggtgatggcctgcctcttcagcgaggaccacgcggcgccgctgctggacctgatcgaggcgtcggggtcgtcgcgcgacgcccccgtgtcgctgatcgtgctccacctgacggagctggtggggcacgcggcgtccgtgctgaagccgcacaggaagtcccggagcagctgcggcaacccgacgccgtcggaccgcatcgtgaacgcgttccgctacttcgagcagcaggcgccgctgggggcggtgacggtgagcccgtacgtggtggcgtcgccgtacagcagcatgcagcacgacgtgtgcctcctggcgcacagccgcaaggccaacctcatcctgctccccttccacaagtcctcggacggcgcccggagcaccgccaacaacgccatccgcggcatcaaccggtcggtgatgcagtacgcgccgtgctcggtgggcatcctgatcgaccacggggtggcggcggggtcggcgtgcgccacggcgtccaacagcacgctgcagcgggtggcgctctacttcctgggcggcgccgacgaccgggaggcgctggcgtacgtggcgcggatggcggagtgcggtttggtggcggtgacggtggtgcggctgaagctgcgggactgggtggggatggggggccgcgacgagatgagggacgaggaggcgctgcaggagttctggcagaggtacagctgcgcgggcgcggagagggtggcgtacgtggagaagacggtggaggacggggaggggacggcgtcggtggtgcgcgccatgagcgacaagttcgacctgctggtggttggtaggagagagggcggcggcgacggcgcggaggggtcgtcggcggcggcgctgacgagcgggctgtcggagtggagcgagttcccggagctgggagtgctgggcgacatgcttgcctccgccgacttcgcggccaaggtctctatcctcgtcgtccagcagcaggccgccaccaggaacgacgccgattactgacttaattggctagtcatgctgatatactaccacattccctctgctcttctcttctctgctctgctgcaatattagtgttcttctccaagtaatcttgtgttttaggatttttggcgagcttctgtattttactgtacctaggattgcataatcttgctttgattctggacacagtctagatttctatcgctaggaatatgtacaagtatgcatatgatattgacatatatcatgttcgtgt

SEQ ID NO: 24859 - DNA, 1493 bp, Oryza sativa
  ref <308>: DATABASE ACCESSION NUMBER: AK100301
  ref <309>: DATABASE ENTRY DATE: 2002-08-28
ggctctctcttccttttctcttccttctcaccgatcctggaatggtctcggagggttcttagctggcttttcgattggattagcagcagccgggtcagacggagcggaggccgtgccggagaagggagaaggaaagtttcaggtgaacatctaacatggatgatcacatgggaagacggacagttggtggccttctcttcaccaaggggggctcaattcttctcttcagagaagacagtgcgcgtcacaaggccaccaattgctgcacgcgacacggttgcagcagcaagcatttggccggcaaagacaagcaaacacacagggcagcaacagcagccaaggaagcatcagaaacccctcggagatcacagattttcaggaaacccagcacgaggactcctcagggaagtactgctactgataacatcagcaggaatgcagcaagctcctatagcgaaaacgacaataggccaagagaaactccagggcgtgatttaatcgctcgtctcaaagagagggtcaatgcatcaagaaaacgatcattgaacagagaaaacagtccatcatcaccaaatggattaagtgctacttcctcaagtagtagccgcacagtctcaagaccgtcgcatcgggcagcttcccgaataaggaaggcagatgaaggtgcaaatgcaggagctgtaaatgtacgcagagacagcagtggagataccaggaggaattcagatagggatgtcgatgatttcttgctagttgagcaggcagcaagagatagcactgaaggattcatatctggattcttggcaagatacagaagtaatcatcagggactactttcatctttggacgacagcatagaggatgcaaatgggtactggcgcttcaatatggaaggaagtgaagagcttgagaactacttcatattcaatgatcggtacagagggatgagaatggacattgacggcatgtcttatgaggaattgctagcattgggagatagaattggcaccgtaagcactggcctttcagaagacgcgctgtccaagtgtctagacagaagcatgtacatggccactacttcaggaactcatgaagattgtgagagaaaatgcagcatatgccaggaggaatattcagatggtgaggaggtgggcaagatggtctgcaaacattactaccacttctcctgcataaagaactggctccggcagaagaactggtgtcccatttgtaaatccgtcgctctgaataccaactagcactagcagggtgcttcttcagaaaccaaatgtacagattctccatgaatgttctacccagacacaatttgcattctttttttgatactcttttagatcgaaccattcgttcgcatcctccagaccttttgcattattggtctccttcagttcacaatttgcacttgtgcagtacgaacatggaaaggaacaggaaataactcctgaaaaatgaaaaaaaaaatatagttcccc

SEQ ID NO: 24860 - DNA, 3539 bp, Oryza sativa
  ref <308>: DATABASE ACCESSION NUMBER: AK100302
  ref <309>: DATABASE ENTRY DATE: 2002-08-28
gagcagcggtccaaccaggggctgttttgcaaatccatttcgcctcaccggagatgagatcccatcgacgcgacgccgccgcctccttcctcctcctctcgtcggagccaccgccgggagggattcatcgcgagcggcggctgaattggaacaggtgaaaccaatgcagccgcacccgcagccagtgaggagatcgtcgtctccggcctccgggaatagcagtttttgatcgaagacgcttatgaaggtaatttattaacggtgtttgtgcatttgtggaattgtggatagctattctgattttcatgctctcttgctatttactatagccttaacagagaaaattataggtcataatcaaggtgcttaaatactgtctaactacttcatgtagtaaccaagtgaacaccatgtttgattcgataactacattaaatacaaaccaaaaaagttactagcaaggcacatctatttagctagtaaagacaaacccctaacaaccaatagatagaatggttaaccttttttattcctctcgaaacccttacagccaacagatagaaatataaaatggtggtttcctgacaaagttctagggacagcaacagaacaagtggatgagaacacagataattgtgtgcgcctgcgttgctcgattactcgaagcagccagtgtggtaagaatcccaatcctgtctcctctgtgggctggtcagtcaatgaagaatgaagaatctgcttcatgcctaccaagtaccaaatgctatcctcgcacgtgcattccaaactttccgagactctgttcttcccaaggacccataggctaaagagaatcacaatggagtatgtagtatagtttagaatttgggttggatggatgggtgtacaccgtgcacctagtaagacaaagtagcaaactttgcgccattatatttttcagaatgaaacacatggttcgttgtgccattatatatatactgttattttttctgatcctaactcctatctacgcttttgaaatgagttgggaaaagcaatttaagaactcttccagcttccattcacttgcaaattgaaaccaaatcatatggttctgctcctcgaacaatcagttaagattgcagacaaaaccaattaccaaaggctcaaagctgccctgaaggtaggcccgatctatggatgaaaacagtaatacgataagtactccttttctgaagtgagatcagtgtgcgtacaaagaaataaatcatccaacagccaacagatagaatggttagcctttttattcctctcaaacccttacagccaacagatagaatagtaagcctctttgtccttctcaaactgtaagacggtggcttcctgccgaagttccatggacagcaacggaacaagcggataataaaacagacaattgtgtgtacttgtgctgctcgatcactcgaagtagccagtgtggtaagaatctcatcctgtttcctccgtgggctggtcagtcactgaagaatgaagaatctgcttcatgcctaccaagtaccaaatgctatcctcgcacgtgctttccaaactttccgagatactattcttctcaaggacccataggctagagggaatcacaatggagaatgtagtacagtttagaatttgggttagatgggtacacataataagacaaagtagaaaactttatgccattatatttttcagaagggctaatgttctggcagcaaaatattctagagaacgcatatctattttttctggttctaagtcctcctaactcctatgcacatagtatttgaaaatgagttgggaggcagtttaagaactcttccagtttccattcgctttaaaccaaatcatatgactgtactaacacaatcaattcagtattttcagaatgcggagatgaaaggttcgaagcagcctagaagatccatggacgaaaatactaatatgataagtagttttcatcgtacatatggagtgtatgttaaactaaagaaaaactcctacatggttcgtgggacaaaaatgatgatactagtgaattacaacttaaatatgtggccaatatcatgatcatctcagaaagtgagatcagtgtgcccacaaagaaataattcatcttcatatacacacacacactgtagtctgaagttgatcctacaattgcagctggctggtcatcacagcgagaactggaatcaaataattgaaatgccgacgtatcacagaaaaagataagccattctctctcgtcctatcagataaaagctggaacgtaacagtgtgatatttttctgcaggtccaaataacaaaacaacgtgatacacacaagtggaaggttttccattatctaaaaaagcgcacacaaaatgggagatacgatgccaaagtaaagagagcaaatgtcgtgtcttccactatgagcaaagaacccttgcaacctgcagatagaaacgaataaagctacgataaaaattgtcacttaaatagatatacactcatttcatacatgtcacctaaaaagtcatgattttttttaaaaaaaattagcaagatagatcaatatatattatttcaatttttaaagttaaaattcaacctacacaagtagaaaaaaaaaactatcaaaagtgcatactattacaattaatatttgttacttaattatttatttatatgagtcaaatttgaagttacatgtttgtagaataatatatcatatagtattgagttatcttactaatttttcaggtgatgtgtatgaaacaagtgtatgtacattcgagtgacaaaaaccacatcctaatgcaacgatgtgaacatccaagggcagtataaaaggaggtgcagctgcgaggcattgacctgcactcccttcctcctagctcgaagtgagcaatcactcttgtgaaacttttgcagacgccagccatggcgatcaggggcatcccgtcctctcgcgagatgaccgtggacgacttcaagaactggctgaagcagttcgacaccgacaacgacggccggataagccggggcgagctccgggaggccatccgccgccgcggcggctggttctccggcctgaaagccggccgcgccgtccgccacgccgacagggacaacagcggcttcgtggacgagtccgagatcgagaacctcgtcgccttcgcccagaaaactctgggcatgaaggttactgcctggtagaactgaacactactggcagcaataagcattattaagctagtttcatggattttcatatgcttgagcttaaaatgggtagagagcactgtggcagtagtgctagcttttgattaagctataaaaatattgccttctatgttgcttttctttgctgtgtggtagtaactggtaaagtttgacttgcatgccagcttctcctgaataatttgtgtaaaagcaggagaatgtctgccatgatgctgtgatactttgagtgatcctctgttggtattgactctggtgaagatgaaaatgaattggtgattatggccattttagtaac

SEQ ID NO: 24861 - DNA, 3869 bp, Oryza sativa
  ref <308>: DATABASE ACCESSION NUMBER: AK100303
  ref <309>: DATABASE ENTRY DATE: 2002-08-28
ggtctgttcgctcgcgagtagcaagtcgccacacgcgccgcagcagctgcctcgaagacgccgccgccgccactggctacctcctccgtcctccctattgattttcttatcgctcgaagccggtcgtcgtctcctacagttccggcaagatgcctccgcgccgccgaccctcccctgtctccgcagcatagcgccgccggatccggccgccgcctcctaaccactcgacttctcgttgcccccgctgcctactccgcccaccgcctgcttccagcccgcggctccggcggcgcctccacgcaccgccggtcagccgcctcgctggcctcccgctaaacccggggatccaccctctccccaaaatcccccttccctaaccccaaccccacctgaaacctaatccggcgctcttgccgttgttgcacggccgccagagtcaagaatctcgccggagcacgaatctctgccggatccaaaggataaaaagggagggaggaaatgtgacactcagtgtattgtactccaaactgtagtggaagcatcctttttggtttcacgaaccatttaatgtcaaaagattaagggatagaaggcaaatggcagaaactgcaatatacctagctctcagaaaaataggaattgccctaggacgagagagaagtgctactgctttggaacatgaccttgaaggaagatcagctttggaacatggccttgaaggaggatcctttctaattagatctcttaccagagtaatatctgagattattaatagtaatgatatattagttcttaggcaagcagaacttcaaggtagattgaggcgaatagaaagtgaacttcgcatgatcctttgcttcctggctcaaatagaaacaagatatgataacaagcaagtacttcaaagttggattggggaagcacggaaactaggatgccttgttgaacaaataatggacgaatatattgtctatattgtacagagcaaacaatatcgacttaccaagagagtacaggttatactggcctcacatcgcttcactgctcagctgaaagaaattgaggtggagctggagcatctttccaaaatgaaaaaacgatgggttcaagtggacaaggaaacctcattagcttcttcatcatcaatgtttggtcctcatgtcaacaacatagatactaagcgatatgccgaaagaaaggaagaactgattgaatcgctaaagagtaaagatatgacgaaagatggagctctttctgtgattgcagtgtatggtcagcctgggtcagggaaaacccatcttgttaaggatgtttatgctagtgagaagaagtatttcagtacttctgcgtggatttccattgctcaatgtcccaatgctgacactgatgctttgaaaagaatgatgatggaagaactaggaaggcaagttggcacttccactgagagtacctcactgagagtaatgacggaaaatcaggatagcaagttcctgtttgtatttgacgatgtatgggtgccagacatggttcacaaggtacaccgtgcagcttctgataataaaatgggcagccggataatcataatcgctcggatgccagaggttgcttttgtaagaagtgaatcttcagtggagtcacagtcccaaacaccatctagttcgctggaacctgtaagaccctcggcgagagtccccaaggaattcatgaagcttacttgtttacatcctaatgacagttttgatatcttctgtacaaaggcttttggaagaccaagtgactgccctatagaactccgtgaagtaactttgaagattattggcttgtgcaattttcttccccaagcaattgtttctattggagcattgctcagctcaaagcaaaaaacagagtcagtctggagtgaaatggctcaacaaattgaagatattcaaaaaagcaagtcaagcctgaacaatgtgcaaaaagtactatatctcagttacaagaaccttccaatgcatctcaagaactgccttttgtattgtagtacttttccggctggttttctcctgttgcctgagagtcttgtccggttatgggctgcagagggtttcatcgagaaccagggatcattgcaagtggaggaaattggtgagcgctatataaaggagctaatccactggggatttctgcaggttgtagatgtggacgaacaaggtagagtagcaagttgcaggatgcctattgtggtgcatgagctggctgtatctatctctcaaaaggaagaatttggagctatctgccatggtggtaaactagcagagatggataccaatgtccgctgcctatttatctcggaaaaccctgaagatattggtgcattagtagattttccgtaccttcggactcttatggccagcagaaatgctgctgcaaatttgaagtccttaccggcatcactgacagccaaacttaagtatcttactgttctgaaactgcaagaatctccacttgaagaattgcccagaggtattggctaccagctgtttaatttgcgatatcttggcttgcgaaaatcacaaatacgatgccttccatcttccatggccaatctctacaacctgcaaactttggacctcagggggagcagaataaatgaactgccaagttggataggcaaactcataagattgaggcatctttctgctgacacattggatggccaaggcccagacatataccgagctgtgaaagccccgaaaactgtgaactacctgaaagaattgcggactctcgagacagtgcaggcaagtgatacctttgagaagcatgtggagaagctgacccagttaactactctatctgttgttattggagaaggccgatccagcaaaacattgttttcttcattgtcgaagctttcctgtctttctagtttgcatgtcagtgcaagtcgtgtggacgaggagtctcttgactttgaaaccctgaatcctactagtcttgaaaaacttgttatcaggggcgggttggctgagcagacattccaatatcctattttcaaatctaaacagattaaagttctggagttaagcttgtgcaagctaagggatgattcgctcgtcctactatctacaaatttgtgtaaccttgaatcgctccgcctccataatatcagtggcatctccaagctggtatttcaagcaattaacagttttgccaacttgaggacacttttactacatgaaattgatggagtggatgaacttgagattccaaatggttcgttgggaagtcttcaagttctccatgtggtaaaaataagtcagctgaacagtatccatgaccaggagagaatcatatccgtcagggacctatactttccacagttatggctatccagagagaaacgaaatgccagctagtagcagccagctggacgccccatgaggccatgatatcacagttcacaggcataagcattacacaagcttgtcacatcatcaagaaggcaggagctagcacggattctattgctacgagcctatataaacttttactggtttgttatttgcagacattcggtcgatcgtcgactgtttactggtttgttatttgcagacattcggtcgatcgtcaagttgtcgcgtatgttatttcttgcttgtactttcacttaccatgggatatcatttgtatcaaataatcgtaataactttgtgttgtttaattgtttctcaattttctttcctttttttttctttagaaaaaagcaaagccttgctttgaaactagtttaccgtcttgtttagaaagtttaaggttacgagaatttgttggtcggtagccagactatgagaatctaaaaggctggatttttttttgcttct

SEQ ID NO: 24862 - DNA, 3196 bp, Oryza sativa
  ref <308>: DATABASE ACCESSION NUMBER: AK100304
  ref <309>: DATABASE ENTRY DATE: 2002-08-28
gattctgtccccgatcccgtcacgtctcctggaaacaccccacccgcttctcgtctcctcgtctcctcgttcgtctctcgcctcgtcttccccgtcctccgcgcgattccccaaccctccccgaagccgcagtccaccgcaagtcgcctgcctcctccgccccgcgccccctccccccgtgcgccggcgatcgccggtgcccgccaggttatttcttgtggcatggcaaggatacatattggtcttggcttgttctttcatgaatgatgtccttccgttcgaaggacagaaatgtgcaaccacgatttaattggccatggagaagcgaatcaccattatcagcacaactgctcattgatattccacctgaaatagagttatcggactacagaaggttgccaggttcaggaagcgagagcccatctggacttctccatggtgaaggcttcaaggacgaaccaattgctgacttggatattttctttgaaaggctttatgaatatttctgtgcaaaagggctacgatgcattgttaccaaatggatagttgagatgcttaacgtactttttatggtatgctgtattgggttctttttcttaattgttgattggaatgccctcggccatttgaaatgtggtgtagaggcactcgaatccggggaaaaaccatgtgatctaatgcaagtcgttaagcataatccattagttccattcacatttcctaaaatgatcactattggatcaatggttatattgacaacttacggtcttatcaacttcctcaagtttttcgtgcaactcagaagtacattgaatattcgtgacttctactgtaacagtctgaaaattacagatcttgagatccaaaccatctcatggcccaaaataattgagaaggttgtcctgctacagaaatctcagaaactttgtgttgtaagggacctctcggagcatgatattatcatgagaataatgaggaaagaaaattacttgattgggatggtcaataaaggcattatctcatttccaattcgtccttgggtacctggagctggaccaactgtcaaatcccatttgcaaaacaggagaaaccatctgatactcccgaaagccctagaatggacattaaattggtgcatcttccaaagtatgtttgatagtaaattctgtgttcggaaagattttctaacaagcccagctgtgttaaagaagcgacttgtatttgtgggcatttcaatgcttatcctttcaccctgccttgtaatattcccattagtgtacctcattctgagacatgctgaagaaatttataatcaccccagtacagcttcatctagaagatggtcaaacttatcaaggtggatttttagagagtataatgaggtagatcagttcttcagacataggatgaacaacagcgctgtgcactctttaaattacctgaagcaatttccaactccactgatttctataatggcaaaattcatatcttttgtttctggtggtttggctggtgctcttataatcattggatttctgggtgaatctgttcttgagggccatatctttggaagaaatctattctggtatactattgtttttggaactatagctgccataagtcgaaaagtagtggctgatgaacttcaagtaattgacccagaaggcgctatgtgcaatgttgtccaacaaacgcattatatgcctaagaggtggcgtggtaaagaggacagtgaagtggtgcgaagagaattcgaaacactatttcagtttaccatagtaatgctgcttgaagagatggcctccattttcatctctccttacttgctcatctttgaggtaccaaagcgtgttgatgatattctgcgattcatctcagacttcacgatttatgtagatggggtgggagatgtgtgcagcctaagcttgtttgacttcagaagacatggaaatagaaactatgcttcaccatttgatgcacttaaaacgcttaggagctcccaagggaaaatggagaaatcatttttaagttttcaaagtgtgtatccatcatgggaaccaaatgcagaaggcaaacaattcttaactaacctccaaaagttcaaggaaaagcaaatacggcagcaggctcttgcacaatatcaagcaatggaagcatcaggctttgtggcaagcaccagaggtcacagggatgatatcttccaccaactactccctagtgatatccataaccgtgctgaggccatctcacctgctgtttacaatttgggcccgttaggattgcttgacacagatcaaagaagtcatccatatattctggattggtactacgtctgccatccacctcacttggatagaaccgaggctccttatttcaacgaagtgttccctgagaccagtgagaacacaggttcagcagcatttaaagcatctgaaattgaagaagcaaggggctgggactctgatatggttcccccgcctcgagcagatcgcgatgagtggaactttaaccatgaaagggttcgaagccatatggatgcatcgacatcaagcaatttgtttcatcatgctccagtagaacaccatgataccaaaggaaatattatcgattggtgggatcaagcacctgaacattctactggtcaacaaggaagttttctggagcctccggaatttggaaatcgatatgttgctggtaaccgttccagttatcactctggtgatgtgtctgatggaagtgtggaagagcttgagcgaagctataacagaagtagcagcagctggagaagacctcaagatttgtccactacaaggtatatggacgactctgacattgaggaagggttgaatcttccttttgctgatctcccgcagaaggatgaagatgctcgacatggcacatctgatactaatgaccccacgccagtcggccttcctgtaagaataattcctagaggcagtgaccctgtttagactgaaaagctctcagatacgtatgtttgtgcatggttgtaaatatctgtgtgaaccacgtcacaaacttcaccaaaactggcaaacgccgcaaattcatttgtacagaaccacatattacctcactgtatagtcttctccctgccctcctagggattgtggagcaggggaagaaccattcttttgcagcacgaaatgcatggatccagttgttgcctcgtttc

SEQ ID NO: 24863 - DNA, 2821 bp, Oryza sativa
  ref <308>: DATABASE ACCESSION NUMBER: AK100305
  ref <309>: DATABASE ENTRY DATE: 2002-08-28
gccgcgtccccaccttatcacttccccaccgaaccgtacaccgtttctcggtgaaaaaagcgcgatcctctctcctcatccatcgccgccgacgccccctcctcatctagcatcgccgcccctcatccttcagcgccaccgcgatctctcaacggcggaagacggaaggccgccccatccgttgcgcctccctcttccaccgccggcctccacatccggcgccgcctctccccctcctccccatccaccaccgcttcaccctcctcttcgagcgacgagattggtggcggcgagcttcgagcgctgaaggccgacgagctccgtgcggcggagggtgaggaggtcggcctctctccttccactgccgctgcggttatctggatctggtggccgcacctcgccgtcgcttctctgttcctccatcgccattgctgctcgttcaggggaccacgccgcgggggacacagctcgcccaacgcgtggctcgagcagtgacgccacagtccagcgtggtgcattggacatggggccttacgggagtagtagaatgctgtgacgtggtatgctggggctgaatgcacatcagcacatgtatgaattgtgaacggggcctttagaatagaagacgagagagccaagcaagaaagccagccattcgccagcggttcactacaagtagccagcgcgccacccagcagtttccccaccaactctgttttccttggccctcctcgtctctggtcaaccgggggcaagtctgactgcgtccgcatctttgctttctctctcttcttcttcttccgcgcctgtttcttggctcccggccgaggacggcgggcgggatgaaggcgggcgagcggccgaagctggtccggggcgtccggcaggagtcgcggcggttccggctgctggtcatcgtcgtcggcttcttcctcgtctccctcaccttcgtcttggtttccaagcccgacgccatcctcttcagcttgaacggcaagcttccggtggaacaggcgccgacgtccatcctgatccagcagaaggtcaacgagccctccggcgagtcccggaaaacctccaccgacgctctccgtggtgaccccaaagtggtcgacgacgaagttgatgcgaaaccaaaagggacaggaggaggcagcgaggaggaagaggggagagtgctgagcgagccggacccgaccagcggaatgatggagccgacccacaacaaggacggcaacggccataaatctcaccaggagacgttaggcggtggaggagacggggagagtaaagggaatgacgaggagggcgaacacgcggagcagaagcataaagtcaccctcccaacagtttccaattacacaattcatgatgctgctgaggacactgaaaatgccaagcaagaaggtatgaataatgtccagcagggtagcaagcccttgtgtgatttctctaatttcagagcaaatgtctgcgagatgcgtggtgacgttagaattcatccaactgccacttcggtcttgttcatggagcctgaaggttcgcagagggatgaggtgtggaagattaagccgtaccctcggaaaggggatgaattctgcctcagccatatcactgaggtaaccgtgaaatcgagcaaagtggcgcctgaatgcaccaaataccacgatgtgcctgctgtgatcttctcactgaccggctacacggggaacctgttccatgatttcactgatgtgctcgtccctcttttcacgactgcaagcgagttcaatggagaagttcagttccttataacagacatggcactttggtggacgatcaagtaccagacagttctccagaagttatccaagtatcctgtgattgatttcagcaaggatgaccaagtgcactgcttcaagcatgccattgtcgggctgcatgcctatatggagttcacaatcgactcaaccaaggcaccgcacaactattcgatggctgatttcaacagattcatgcgtggagcttactcgctgggcagggacagtgtgaccgtgctcggtgagtaccccaagatcaagccaaggttgctcatcatcaagaggcaccgtacaagaatgtttctcaacctggatgagatcatttccatggcagaggagcttggctttgaggtggtgattgacgaggccaatgtgagctccgatatctcccggtttgcgcggctggttaactccgtcgacgtgatgatgggtgtccatggtgctgggctcacaaactgtgtgttcctgccacagcatgcgacgctcattcagatagtgccatggggtggcctggactggatatcacgcaccgatttcggcaaccctgcagagctgatgggtctgaggtacaagcaatacagcatcggcgtcgacgagagcagcttgacagatcagtaccctagagaccacgagattttcaagaatcctatctcattccaccagcgcggattcgatttcatcaggcagactttcatggacaaacagaatgtgaagctggactgcaagaggttcaggcctattcttctggaggcactggataatctaaacccgtaggctttgagatgctcttgtacaatgttccatttttcttttcacggttcgttccttttacttttatgtagtaaatctgttgtttattctctctctatctctcatggctttcatgaggagatgcaaattgtctgaattatagaaaaattaagaactacttgtgtgatagtgtaaactgtataaattgccgtcgctccaagatggaacaatattcattctaatcatataaaggttccttgaattattcatcg

SEQ ID NO: 24864 - DNA, 2771 bp, Oryza sativa
  ref <308>: DATABASE ACCESSION NUMBER: AK100306
  ref <309>: DATABASE ENTRY DATE: 2002-08-28
gagcatccatcggttctctgctctgttcatccatagagtttcctcctcttctcctttagtgcaaggcttgaggatccatctagaagatagcaatgggggaaactactggagaacgtgccctgacccgtctccacagcatgagggagcgcatcggcgattccctctccgcgcacaccaatgagcttgtggctgtcttctcaaggcttgtgaaccaaggaaagggaatgctacagccccaccagatcattgctgagtacaacgccgcaatccctgagggcgagcgtgagaagctgaaggactctgccttagaggatgtcctgaggggagcacaggaggcgattgtcatccctccatggattgcccttgccattcgcccaaggcctggtgtctgggagtatctgaggatcaatgtaagccagcttggtgttgaggagctgagtgtccctgaatacttgcagttcaaggagcagcttgtggatggaagcacccagaacaactttgtgcttgagctggactttgagccattcaatgcctccttccctcgcccatcgttgtcgaagtctattggcaatggggtgcagttcttgaacaggcacctgtcgtcaaagctgttccatgacaaagagagcatgtaccccctgctcaactttcttcgtgcgcacaactacaaagggatgaccatgatgttgaacgacaggattcgcagtctcgatgctctccaaggtgcattgaggaaggcagaaaaacatcttgcaggcattacagctgacaccccatattcagagttccatcacaggttccaagagcttggtttggagaagggttggggtgactgcgctcagcgagtgcgtgagactattcaccttctcttggaccttcttgaggcccctgagccgtccgccttggagaagttccttggaacaatcccaatggtgttcaatgttgttatcctctccccgcatggttactttgcacaggctaatgtcttggggtaccctgataccggtgggcaggttgtctacattttggatcaagtccgtgctatggagaatgagatgctgctgaggatcaagcaacaaggtctaaacatcacaccaaggattctcattgtgaccaggttgctacctgatgcgcatggcaccacatgtggccagcgccttgagaaggtcctaggcactgagcacactcatatcctgcgtgtgccattccgaacagaaaatgggactgttcgcaaatggatctcgcgttttgaagtctggccttacctggaaacttacaccgatgatgtggcacacgagatttctggagagctgcaggccacccctgacctgatcattgggaactacagtgatggcaaccttgttgcatgtttgctggcacacaagttgggtgtcactcattgtacaatcgcccatgcacttgagaaaaccaagtaccccaactccgacctttactggaagaagtttgaggatcactatcacttctcctgccagttcacagctgacctgattgcaatgaaccatgctgacttcatcatcacaagtaccttccaggagattgctggaaacaaggaaactgtggggcagtatgagtctcacatggcattcacaatgcctggcctttatcgtgttgtccatggtatcgatgtctttgaccccaagttcaacatcgtctctcctggtgctgacatgtccatctacttcccattcaccgaatcacagaagaggctcacctctctccatttagagatagaggagctactcttcagtgatgttgaaaacactgagcacaagtttgttctgaaggacaagaagaagccaatcatcttctcgatggctaggctagaccatgtcaagaatttgactggtctggttgagttgtatggtcggaaccctcgcctgcaagagctagtaaaccttgtggttgtctgtggtgaccatggcaaggaatccaaggacaaagaagagcaggctgagttcaagaagatgtttaatctgatcgagcagtacaatttgaatggccacatccgctggatctccgctcagatgaaccgtgtccgcaatggtgagctctaccgctacatctgcgacatgaggggagcctttgtgcagcccgctctctatgaggcctttgggctaactgtgattgaggccatgacctgtggtcttccaacatttgcaactgcctatggtggtccagccgagatcatcgtgcacggcgtgtctggctaccacattgatccttaccagaacgacaaggcctcggcgctgctcgtggagttctttgagaagtgtcaggaagacccaaaccactggatcaagatctcgcagggtggacttcagcgcatcgaggagaagtacacatggaagctctactctgagaggctgatgactctctccggtgtctacggtttctggaagtatgtcaccaacctcgacaggcgtgagacacgccgctacctggagatgctgtacgccctcaagtaccgcaagatggctaccaccgttccattggccattgagggagaggcctccaccaaatgatctggccttacccggtgaaaagaatgggcaatgggtgctccattgttgcagtgctgatccaggggtgaagaaaaacagaaatcgaggaacgaatgcatccatttagtttctaagggtttagttgatttcagggccagttcttgtggggttttcaatggaagaaattgatgtaatgctctggccttttcatggatactatgaatgaaataaatgaataacaagattctc

SEQ ID NO: 24865 - DNA, 3443 bp, Oryza sativa
  ref <308>: DATABASE ACCESSION NUMBER: AK100307
  ref <309>: DATABASE ENTRY DATE: 2002-08-28
ggattctccggcgactccggcgatgatgccgctcctcctcctcctcctccccgtccgctccgcccctctccggcgcctcctcctatgccgctgctcctcctcctcctcccccgccgccgccgcctcggcctcgtcatccgcgtgccccgtccccgcctcctcagtcctcgccccgtaccaccgcgccttcgcccgccgcatggccctcgccggcgtccacccgcaccaccgcgtcgcggtgggggtctccggcgggccggactccatggcgctctgcgtgctcgcggcggcgtggaagaaggccggggaggggagggagcaggaggatgagggagagggcggcgtctcgggattcgtggacgggctcctgggggtcgtcgtcgaccatggcctgcgccctgagagcgccgacgaggcgcagctagtccgtgatcgggtgcgcggcatgggtgttgtttgtgagattgctacatgtgaatggccgaatgggcgaccaaagctggggcatattcaagaagctgcccgtgaaatgaggccgaactctttgttctgagactatctcgcaacagtggtgttttggggcttgctggtacagcctttgtatctcagttgtttgcgcctaatctaaaatatgatggagataacttcagtcgttatggtgttattcttgtccgtcccatgcttgaattttcaaaagatgacatgtataagatatgtcaaggaagtaatcatttgtgggttgaagatccaactaataatagtttgctgtacgttaggaatcgaatccgggcatctttgagaagtttatccatagaaggttcacaattgcacttaagctgttgcttttgagtgattttagaatcatcatgttgaatcctttgtcttcaactttacctcatttatatcataatatagatcattcacagatgatgattgatgaaaggtgatgtccataaacatttgacaaatgtataaagcttgattgagcatgcgtacgttttactcattataaatttcaatgaattttccatcactattaattatcaaatgccatgtttggtcacaggaacaacttgttctattgaccatccgcaattgggtaattctgttgaataataactgactattgactgtagatacaccatcttctggaatcagcataaatgtttgcttgtgtgcaccaaattgtgatttttcatgtttcttgtctaggttggtctgtacacaaggtctatttattttatagtaaataaaaagtgtgtcagactatcagtggcccagaattcatgggtatctagctcaagagattgtatttagttaaattcacttgtggaagtaggtcacagaatttgtagcaaatgacaacattttcactgtttcacatgttgccaattcgtggccgaagttatttgtggcaagtcctagctccaattggtatgtgtgaagctacatcagctctggccagcttgtctgcagttgtaaatttgcaaacgctatcaccttatgatgagcgatgaacgaatgcacattcagctgacaaattttgcttatctacaggtacctttcagtcagagcttcacaaactgatctatgcgtgccggttgacacgagcatttatagataatgcctgcagtatggttttaaagaagtctttaacaataatggaggctgccctgagtgtagctggttgttacctttgtgcagttccaaggtccaaaggtacaaaagtacttgtctgttgttctgttgatctgatggagtcatcttctgttcatatgtcctataagtgttcctatgtaaagcaaccaccaccagtatccgagatcaaccagatagtcactgaagcacgcatatactctgatcaatttcgacagaactgcccaaacacaccttttccgagctctaaattttcaactgatgtgctgaataaggcaaaggatctcaagctaataggtgattgtacattagaaaagctcaattatttgcaaacagatgaacaccaaaaattcattacaacaaaagagcatggacaagaacagtacttggagaaaacaagctttccttatttagaagttctaaatctctggcctggtgaaacatgccactttatgggcaggttcttgattacatggagaacctcggaggttgttgtgaatggaatgtgcttgcatgacagtcaaaagcatacttgccagtattgtatggtaaatcaggatggaagtcttgctattaggcatatgttcgataccgattggttgttccttgctgaagtttgtaagatccatcctttggaagagaataagaattattcaaatgctctctgtgacaagttggaggatgctaaactcgtgcagcactctagatatttgcaattgtcagcaatgaaatctcttcaaatcctgagatctattccagcacctgcaagacgaatgctaccagtgttgaccaactcgcaaggtgctgtattgagtataccgagtattggcttccgatgttgcccaagcctattaattgaagcagtattcagtccaagagtaccacttggtggaggatacacttcatatttgtaagtggttgatatctattgatgacaaaacatgaaacatcaagtgtataactgctgttgagatgtaagcagccgctggtgctgaatcgcttgcaacaaaccgtccaatcattgccaaatgcgaaacagccttagcttgccaacgtcgttgtgcagttaactgatgtttcgtgatccctggttcatacatatgatgatttgacaagcttgacaagaacgggatttttacacgacatttgcggatttgccagtttgcagggataaatcactacaacagttatatgccagaacaggcccgattctgcactggtttccatctcaacacctgtcgttggacatcagggtgatcatggctgaaatctcgtagcttcgctttgcagtgccaaccaggtgtcgctgaggcaatagcaacttttggcactaggcaagtggaaatgaaggtaccactagatcactgtgagagcaattttgtcagcgctggaggtggctcaagtgcctaatcgttaagaattttaaataggaggatagataaatatatcaagtacctgagcgctggaggtggctcaagtgagatttacctccccaagaatgcatcgcctagcagactcccggttggacatcagcctgtaatttgaagccaagaatcgtttcatgtgaattattcgtcagacattcttactagaaaagcaatgcttaactctacttacgaatacgataacagtgttcaagcagtgacagacaaaacactgtaaatgattgttcatgtcttggtatgtatgccttctcattctcttcacatccaatgggttcgtgctttgttcgcacggacaggacataccaccctccatatccaacagcgattcgctgtcagaatccg

SEQ ID NO: 24866 - DNA, 2726 bp, Oryza sativa
  ref <308>: DATABASE ACCESSION NUMBER: AK100308
  ref <309>: DATABASE ENTRY DATE: 2002-08-28
gaaggtagaatcagctttcgttgacccgctcggcgttagcactcgagagtccccgtccatcctattaatcctcgggcgtagcaccacctcacctagtctccaagctccatcgaagacgacgactcactgctagctggtagctgctgccggtggtgccgatcgactgccggacggcgggcagagacgccatgggagaggagaagagccagcagcggcggcggcagggccaccctctcctgaggggaggcggcgcggggaagcaggccgggcggcgttacacccacggcttctccgcctcccagatggtcgcgctcgccgccctgtgcggcgcgctggcgccctcgctcccgccggacacccgcgacgacgacgacgacgacgccagaggcggacgctatggcggcgccggtgcgtccgacgccaaggccgtcagggacttcctcctcgcctccgccgccgacccgcccgtccccgacgaggtggcggagctgatgacgaggatgtgcctccgggaggcgctggcgctggtgcgggcggtgctgtggctgctggggacgcggctggggacgctggcgctgtgcggggggcggtgcgtgtcgtgggggaggtggccgttcgtgctcacgttcgcggagatgccggtggagcggcgggaggaggcgctcgggcggtggagcagggtgaccgtgctcccgccgctgcgcgccttcttcctcgtcgtcaaggtcttctgcctctacgtcttctactcctggattgacgagagctcagagaacccgcactggcgagcgatcgggtacagcccgccgaccgacgaaccgccggcggaggagcacaccgaggcgacgaagcggccactcgacgacggcgtggtcgagaccatcaacctcacggacgcgtccctcccgtcgtccctcgcggagaaaggcctcgcggtgaccgatgacgcggcgcgcaacgtgtgccgggtggagtgcgacgtcgccatcgtcggctccggctgcggcgggggcgtggcggccgcggtgctcgccggggcccggccacaaggtggtggtcatcgagaagggcaactacttcacgtcgcgggactacacgtccttcgagggcccgtcgatcaaccagctctacgagtccggtgggttcgtcaccacgatgaacggcggcgggctgctcctggccggctccacggtcggcggcggctcggcggtgaactggtcggcctgcctcaagacgcccgagttcgtgcgcagggagtgggcggccgcgcacgggctcccgctgttcgccacccccgactacgccgccgccatggacaaggtgttcgagcggctcggcgtgacgtcggggtgtacggaggaagggctccagaacaaggtcctccgcaaggggtgcgagaagctgggctacaaggtcgacgcggtggcgaggaactcgtcggagggacactactgcggcagctgcggtttcggctgccgcaccggggacaagcgcggcacggacacgacgtggctggtcgacgcggtgggccgcggcgcggtgatcctgacggggtgcaaggcggagaagctggtgctggaacgcggcggggcgaggggcaggcggtgcgtcggcgtggtggccaggagcaccaacccggcgatcacgaagacgctggaggtgcgcgccaaggtgaccgtgtcggcggccggctcgctcctcacgcccgtgctgctgcagcggagcgggctcaccaacccgcacatcggcaagaacctccacctccacccgaccgccctggcgtggggctacttcccggacacgatgccggacctgaaggggaaggcgtacgagggcggcatcatcacgtcgatgcacaaggtggagacctccggcgccggcgcgccgcaccgtgccatcctcgagacgccgatgatggccgtggccgcgacggggacgcagatgccctggctgtccgggcgagactcgaaggagcggatgctccggttcgcccggacggtgcacatcttctccctggtcagggaccgcgggtcggggacggtgcacggcgagcggcgtgtcgcgtaccgcctcgacgcggcggacagggaggacatccgcgacggcttgcggcgcgcgctgcgggtcctcgtcgcggcgggcgcggcggaggtgggcacgcaccggagcgacgggcagcggctgcggtgcgaggggctgaccgaggaggcgctggaggagttcctcgacggcgtcaccgtggtgcgcgggccgcagtcgaggagcgagacgtggggcctcttctgctcggcgcaccacatgggcagctgccggatgggcgccacggcgggcgacggcgccgtcgacgcccgcggcgagagcgggaggcggagcggctgtacgtgtgcgacggcagcgtgctgcccaccgcggtgggcgtcaaccccatgatcaccatacagtccgtagcgtattgccttgcaaatggcatcgccgactccctgtccgctaaaacgacttaattagctcctatcgtatcttcgactacaaaattcatccattccagtccattccagaacatcacagcttgcaaattcgattagtacgttttagcgtatatgattgttacgaggaccagaataatgtgcatgattcttgtcgtgtgaagttatggattatctgtaattatctctataaaaaggaaaaaataaacaccgcaatgaaaatgcttcctgcatactttattc

SEQ ID NO: 24867 - DNA, 1869 bp, Oryza sativa
  ref <308>: DATABASE ACCESSION NUMBER: AK100309
  ref <309>: DATABASE ENTRY DATE: 2002-08-28
ggtccgctgcccatctctctctcacgctcgccgtcctcttgtgccttcttggcttgggtttgcctgcgcctgcgcgcgcttggcctagttgcatcgtctgcgttgcggctgctgcgatagcatgtaggccaaccgcgtcatcttatctctctctctctctctctccccccatcatttcatctgatctagtatctcatctcctcctcccctccttttccttctcccccaaccaactcactcttcatcttcaacaccttgctgttcgtcctcgtctcgtcgtgctgattgttcaagaacaggagaaagaaaggaagaagcagtttgattgatctgtttctgttggggggagctcggtgatccatgcatggatggcaaagaactcctctcaccgtccgaactgtcatactatgcgcaccagcagcatcagcatcagcatcagcagcatcagcagcaacaccggatgctcgggggcggaggaggcggcggcgggcatagcgcgtcgccgctcgccgggatgcacggcggcccgtcggtcatccgacccatgcccaacatggggatgagccccaccgcgatcctccagtccatcggcccgggcccgctcgccggcatgcagttccagatggacgccgcgccgccgccgccgccattgatgcacaacagcatggcctccgtctccgcctccgccggcgccggctcacccaccgtgccgccgtccgcgacgcccatggagccggtcaagaggaagcgaggccgcccgcgcaagtacggcccggacgggaccatgaaggtgtccaccgccgccgccgcgcagcaccagcagcagatgctgagcgcgccgccgaggatggggtccgtgtccggcgccgacatggttggcggcggctcagggatggacgactcggcgcagaagaagcggcgcgggcggccgccggggacagggaagaagcagcagctctcatcaccggttaagctttcagggggcaatgcgttcagtggctcagctggaacgagcttcacccctcacatcatcacggcatctccttcagaggacgttgcagggaagatcgtggcgttcgccaaccattcgtccagggcggtgtgcgtgctctcggccaccggctccgtctcccgggtggtcctccgccacccggccgacggcgccatgtcaagggttcacgcctcctcccactacaagaaccctgccatctacgaggggctgtacgagatcttgagcatgtcggggtgttacaacctgatgaacgaggggcagagcgacgggctgagcgtgacgctgtgcagccccgagaggcatatcattggaggcgttctcggcggagcattggtagctgccagcaccgttcaggtggtacttgggagtttcgtgcagggagggtcgaagcccaagtcgaagaaggccgggaaacagcagcagcaacaggcggcggcggcggccttcagctcggactcgctggccggaggagggcaggacgcgtcgccgagctccggccataaccaaaatctaacgccgccgccccctgtaacaacgacgggagggtggcctagctccgggatatttgacacgagaagttccaacattgatatcaactcatctagaggctagcttcatctctcaatttgtcgactcttccatatgtgctccagaaatttgtttttctgattcccaaagaattacccccaaaattgtactcctctctgtaatagcctgttcagtttttgagccgttaattcttatagattattattattcactaggcaacgttgcattcatgcatgcatgcatgctcagagttgtgtaatcccaacaggataatcttgcttttctttcagcgacatgtgctactgccc

SEQ ID NO: 24868 - DNA, 2467 bp, Oryza sativa
  ref <308>: DATABASE ACCESSION NUMBER: AK100310
  ref <309>: DATABASE ENTRY DATE: 2002-08-28
gacgggtggaaacctagccaagatccccatcgtcgccgccgccgccgtcgccgtcgccatcgccgccggcggccgccattggcagcagggaagaggatgatccggcgattcttgtacattgctgaccactgctttacaggcccctccctctcccacaggctacggcgagtcaacccatcacatctcttctaccccgatggccatccactagcaacgaaaccggagcgagcgacggtggaggtggaggacgctcgcctgcctccacccgccatggccttctgctccccgggcaccacggcgacggccatgggcatggagttcatgcgcaggaacgacggcagcatcgtcggcatcgaccacaccggccgcgccgtcctctacgaccccgccgcgcgcgccgtccgcacgctgcccgccctcgcggcgcccaagctcatgcccgtctcggccgccgtcggcgacgacctgtacgtcatggagacgacgcccctccccgacggcgccggctgcttcgaggcgctcgtacgcctcgaggataatcccgccgagtccgactccgacaagtgggaggtaggggacaactacctctggcaacccctgccgccgccgccgccgccgccgtccccgtgcgtgaacgcctacgccgccggcttcgaaggctcctcccgcggcatgatctgcgggtacgcggtggccggcgacggcgacggcggcacgcgcatcctggtatccaccacgaccaacggcacctactccttcgacaccgcgagctccgcgtggagcaaggccggcgactgggagctgcccttccgcggccgcgccgagcacgtccccgagcacggcctctggttcggcatctccgacatggatggcaccattctcggagcgtggaatctgtcctccgcgttccagcagccgcagccgccggtggcgagcctccaggtgaaggggttctcggtggagagccacagcgacgaccggaggaggagggagttggaggtgtacgcatcgcaggtcgtccacctgggcggcggcaagctgtgcgtcgccaagatgttcagtgttgatcgcagagaaaggggtgaaataaatttcgccatgctcaccggcgtggaggtggtacgcggccgtggcgggaagctccgcgtcgtcaagcacaagtcgcgccgttataacttcggccaagactacacccctgtttatctactctaacgagtagagtactcctacttagtactgtcctaataaaaacccttatttgattaatcctgctcttatgcaggatacatattcatcggttagttttaaaactctgcattgcatagctctgtaaactctgttagtagagatgaatgatttcaaggaagcaattctattgttaaggacctgaaaaaaaaacatttataacctgaaatacttatcatctgatcagatagcagtctaagtgccaaaaactaatactagtgacaacaaatggcagctgccataacagataagcctgaaagcaatatgtcagcttccttgatgcatatgtggccatgcgggttagctcgtctctctataattttcattcctttaacaggctgcataaatgcatgtagtattgacgatgagaaaaacacaatgcttaaatcatcattgggcaaaaaaactgttaacatacactccacccccttaacaaaaatcatattggtactaaaatgaaaatagtctctagtgaattatttttttttctctctattgattatggcactccaaaacatttagtcactgttgtcgatgtacttataacttgaagaaagtcatactgaaatttgtctggcataaatccttgatcaatgtagtcttttctttaaggacagttagtcagtgaacttcaagaaaggttatatactagataactttgggaaacactatggatcttagcaaggctctttgaaggtggggtttgttttcttttgctccattgtaacttacaagtttagctgtgcatcctactctaatatacttttcaatgagtatatcacatgcattatttcaatgaatgcctctgcataattctttcctcataattcagttacattgcgttagatccaagtacaacatgccaatattgcctggtactatctcctgtgagtctataatgattccttgtcttttcatctccatctcaagtcctcagtttattgttgaagtcacaaaacattgttaggaataaggttaaatttatatatatatttttttgaggagaggttaaatttttatattaagtatgcatatcaatatgacgtttcagttcatgtttgaacctattggtgtcagcatggtattgtaattagatactacatatccttttcaattggtcatttcgtgatgttggactgtgatatggacaccgtgtataactgaaactattgtatctaaggcacacaagcagaaaaataaatctacatagttggagattgtc

SEQ ID NO: 24869 - DNA, 3500 bp, Oryza sativa
  ref <308>: DATABASE ACCESSION NUMBER: AK100311
  ref <309>: DATABASE ENTRY DATE: 2002-08-28
ggaggcgaggaggaggaggaggagggcaaaagcttgcaggagaaggcatccgcatccgcatctgccgccgtcggtgggggcggagaccggagcatggcggaggcggaggagaagcgggtgggggtgggggaggcgcgggcgccgctcgccgtggaggcgctccgggggaagatcgtggagaaggtgaaggggaaccgcgtcactctcatcgtgggggacaccggatgcggaaagagttctatggttccacagttcctcctggaagaaaacatggaacccattctatgcacgcagccaaggaggtttgcagtagtagccattgctcaaatgattgccgaatctcgcaattgtcaggtaggagaagaggtcggatatcacataggacactcgaatgtgtccaatctcaattcaaaaaggtcaagaattgttttcaaaacagctggtgttgtattggagcaaatgcgtgacaagggcattgctgcattgaactataaggttattattctcgatgaaatacatgaaaggtcagtggaatctgaccttgtcctcgcctgtgtcaagcagtttatgatgaaaaagaatgacttgaggttgattttgatgtctgcgactgctgatatcacaagatataaggattacttcagagatcttggaaggggtgaaagggttgaggtgattgccattcctagcagtccacgcagtagcatttttcagagaaaagtcctataccttgagcagattgttgatattctcaagatggactcggaatcactatcaacaaaatactgctctggacccaacactgcagctgatgctggtctaaaaccagatgtgtatgaacttattcataggttattgttgcatatacaccaaaatgagccagacattgggaagagtattttggtgttccttcctacatactatgctttggagcagcaatggattcgtctgctatctgctagttcaatgttcaaagtacacattctccatcgcagcattgacaccgatgaagctcttcaaactatgaaggtctcaaagtcctgtcgtaaggttatactggcaacaaacattgcagaatcatcagtcactattccaggagttgcttatgttattgactcctgtagatcactgcaagtttattgggatccaatcaggaaaacagactcagctgagcttgtatgggtttccaaatctcaggctgaacagcggaaaggcaggacagggcgaacctgtgatggtcaaatttatcgcttggtaactgggccattttataacagtttaactgatcatgagtatcctgccattttaagattgtcattaagagagcaagtactcatgatttgttgtgcagagtccagagctatgaacgatcctcatgtcctgctgcaaaaagttcttgacccgccagattcggatgttgttgaagatgcattggaatctcttgttcaaattcgtgctttagataagccaacctctcctagagggcgccatgaaccaaccttttatggatgtttgcttaatagtttgccactctcatttgacgcttctgttctagcccttaaatttggtgatactggctccatctgtgaaggaattctgataagcatcatgctggacatccaacccctgcctatcgtccaaccttttggtcaccaacaattgtgcaaaatgtatagaaacaattactttgaggaggagggtatcgacctgcaaactggcaagaaggaagctgcacttgttggaaatctttgtgcatttcaattctggcagcgtatgtttaaggacaagtatcgtctggattgtctgataaatgtggtgaacactcatgaaccgaaggcatctaatggttttgttgctaaacctgaagatgagtggtgtgcatttcataaccttgtgccaacagcacttaactacatctctgaaatttatgatgatattatgggcacacttcaccgatttagacctagttttcttgtgaaaataaatcctccaatgtaccttcagccttccgaattccaccacatgtgtcttcgccatgaagtgctggaactagagaatgtgaattcacttccattagaagctgagaattctcacttggattcacatcgcaggtgtgctgcaaccccttatgtttctccagctgattttggaaccactactgttgttaaaacactgaagacacttatcaaggagatgaagacacaatctgcggcagacagggtaacttatagagaactagttcatggttatgttcaaccagcgttggaaaatgtgatgtgtgtgttctttcttaatggatcttgtaatcgaggtgatacatgccatttttctcattcttctcgtgctccaagaccaatatgcaagttcttcctcacattacagggttgtcgaaatggtaactcgtgttcattttcacatgactctggctctttggtttcttcatctatcacatctggaatctgctctcaggaaaacagagctacttcagtatgttgtaaaaggttgctgcctgctgctggtgatgggcatattcttgtcatgaatgataaaagtttacagttcgcttgtaaactttgtaactattatgaccccactaagattattgcctgtacacctggtcctcattcattcgagtctgattcagtgactaagggcctcaagattctacagaatttggctgatccctcttatctattcattggaggtgaacataaactatcagttccatggacaaaattgagtcgagtattttggtttgctgatattgattccaacgaatcaattagcgagcaagttgtcttgcagaagtttttccagcatattgccatcaagaccttgtcagaaaagatgtcagatttgcaggtcatcgtgatcatgaataacgcaaaatttgttcagttacaggtcgaaagattggcaagagagtgcttcttatttctgggtgaatcatttatgtttgatgaagcaactcttggatggttctcggatacccctaattacccgagagggatgcaagtatcagcaccagttgcttacatctttagcatgcatcctcctactggcattcagtttggtgattacgcatcagaactgcgcaaagttttatacagcaactagttagaccattataggttatttccacatgtgaatagctttggtcaagccattttgcgaactgtaattttttggtcagttcagcttttacagaagtgtaaggcttacttgagtgctatctgaattagaattcactagggaactttaactgaagggatgctgttttaaatgttggttccgaacttaaattgatgccaaatttcctgaactgaaagcttgttatgttaatgtgcaatcccttatcattccgtaacatcagtaacttaactttttttcatcctcaactgtatcatcaaacgtggcactgatgtggatatgtttctttgacctcatggatttggtttattgacctcatggtcatattctaatgagaaaagtttcgtctg

SEQ ID NO: 24870 - DNA, 3034 bp, Oryza sativa
  ref <308>: DATABASE ACCESSION NUMBER: AK100312
  ref <309>: DATABASE ENTRY DATE: 2002-08-28
ggggggaacggctggttgcgaagcgagaccgtctcacgataggcaaggtcgagctggagtccacctcccgtcccctccctacggcgtacggcaatcaccgccaccacccgcatcatgcggcgccagcattgaactccgcctctcctctcctctctctctctctctctctctctctctcctctcccctcgcgtctcgcggccttctccgccgccgcttcctcgtagcagcagcttgcagtagcctctctctctctctctctctctctctcctctcccctcgcgtctcgcggccttctccgccgccgcttcctcgtagcagcagcttgcagtagcctctccaccaccaccacctcctccgccgccgtgccagcgccctgcgcccctccgggagttgatactgcaatgcgacattgaagatttgatccctttctgctgccttgttggtctcgttttgcatgctggtgtttggtggaatccatggctttccgagaggacaaatatgtgagatttcatgactggagatcagaacattctgttggttccgaaaagacagttttagaaggaaggcataatgtgtttgactcgctaatggatagaactgtaggagccttttcattcctagggaattcctcacatcctgaaaccctcaacaaaccagcttctgaggaaaagaagtccaaaacaagagttcttgatcctcaagggccattcttgcagagatggaacaagatatttgttatatcatgccttattgcagtttctgtggacccgttattcttctatattccagtgattgatggtgacaatatctgcttatatctggacaaaaagttggaaatcatagcaagtgtcctgcgattttttacagatatattctatttactccatataatttttcagttcaggacaggctttattgctccttcctctagagtgtttggtcgaggtgtcttggttgaggacacctttgcaatagcaaagcggtatctatcaacatattttctgattgatttcttagctgttctgccccttcctcaggtgctcgtattggtagttctaccccgtctgcaaggctcctcagttatgacggcaaaaaatatattaatggttatagttatttgtcaatatgtacctcggttgattcgaataataccattgtaccttcaaatcaccagatcggctggtataattacagagacagcatgggctggtgctgcatttaaccttttaatttatatgcttgctagtcatgtccttggagctctttggtaccttctttccattcaacgagaagacacctgttggaaagatgcatgtagtagacatgatggctgtgattcgggatctttattttgtgggagtaatgcagctagaaataacagtttcttacaagatttttgcccgacaaatggaactgacaatgcagatccaactttcggaatttatcttccagctcttcaaaatgtttcacaatcaacgagtttctttgaaaaattgttttattgcttttggtggggtctgcaaaatctaaggtctgtagaaataaccttcgttttattttcccttgaagaacacatacttcaatattgtttctatatagttttttatttgttgcagttctcttggtcaaaatcttaagacaagcacgtatacatgggagaatctatttgctgttttcgtctcgacatcaggtctagttttgtttgcactccttattggtaatgtgcagacctatctacaatctgcctctgtgcgtatagaagaaatgagagtgaaacggcgtgacacagagcaatggatggcacatcgattacttcctgataacctcaaggagcgaatactgcgtcatgaacaatataggtggcaagaaacaagaggggttgatgaagagggccttctttcaaatcttcctaagaatcttaggagagagataaagaggcatctttgcctgtcgcttctcatgagggttccaatgtttgaaaacatggatgagaagctcttggatgccatgtgtgatcgtctaaagcccatgctgtacacagaaggcagctgcatcattcgcgaaggagacccagtgaatgaaatgctcttcatcatgagaggaaatcttgagagtatgacgacaaatggtggacagactggctttttcaactccaatattatcaaaggtggagatttttgtggtgaagagcttctcacatgggcacttgaccctacttcagcttcaaaccttcccagctcaaccaggactgtgaaaacgctgtctgaagtcgaagcttttgctttgagggctgatgacttgaagtttgtagccacccaattcaggagactccacagcaaacaactccagcatacatttagattctattcacagcaatggagaacctgggcagcttgttttatacaggcagcttggcatagatactgcagaaagaaactggaggatactttgtttgagaaggagaagaggttgcaagcggcaattgtcagtgatggttcgagttcgctcagtcttggtgcggcgctatatgcttcacgttttgctggtaatatgatgcggatcttacggagaaatgccactcgaaaggcccgtttgcaggaaagagtgcctgcaaggttattacagaagcctgcagaaccgaactttttcgctgaagatcagtaatgtccatactttgctacatgcagaaattgatgcttcagctggtaaaagttctctctcccctgctgatataccatttttcagtatatgattgaattctgtacatagatagaccatttggttccaagccttttggtttatataagataattcgatttaccgttggatcttcatctatacatgtaatatttgtgttgtacatggaatgcatgtattataagcattccacttccacattgtattcttgtactcctgcctctggggaatccttgaaatggaagaccttgtaaatgtaactgatcacgagggcgttgtatgtatgatagacttctttccccctgaatgcaatgtatgatgttattaaaccctccc

SEQ ID NO: 24871 - DNA, 2923 bp, Oryza sativa
  ref <308>: DATABASE ACCESSION NUMBER: AK100313
  ref <309>: DATABASE ENTRY DATE: 2002-08-28
gagggttttacctcctcccccccgcagcgccgccgccgccacacactcccccacatctccccttcccttccactcctcctcctcctcggatcgggaggcggagcgagcaatcccccaaggaatttgtatttgtagcgtgatttgcaaagctagtcaagatggtgaagttcacagtagaagagctccgccggatcatggacaagaagaataacatccgtaatatgtccgtcattgctcatgtggaccacggaaagtctacacttacggattctcttgtggcggctgctggtattattgcccaggaagttgcgggtgatgttcgcatgactgatacccgtgcagatgaagctgagcgtggtattacaatcaaatccactggtatctctcttttctatgagatgagtgatgaatcactcaagttgtacaagggtgagagagatggaaatgagtacctgatcaaccttattgattcacctgggcacgttgatttttcttcggaggtcactgctgctcttcgtattactgatggtgctttggtggttgttgactgtattgagggtgtctgtgtgcaaactgaaactgtgcttcgccaagcccttggtgagaggattaggcctgtccttactgtgaacaagatggacaggtgcttccttgagcttcaagttgaaggtgaggaggcctatcagaccttctcccgtgtcattgagaatgccaatgtcattatggcaacatatgaagacacactccttggtgatgtccaagtctaccctgagaagggaactgttgctttctctgctggtctgcatggctgggctttcacactctcgagctttgctaagatgtatgcttccaagtttggagttgatgaatttaagatgatggagaggctttggggtgagaacttctttgacccagccacaaagaaatggaccaacaagaacactggctcagctacctgcaaaagaggtttcgttcagttctgttatgagccgatcaagcaaatcatcaacacttgcatgaatgatcagaaggataagttgtggcctatgttgcagaagcttggtgtggtcatgaaggctgatgagaaggagcttatgggcaaggctctcatgaagcgtgttatgcaaacatggctgccagccagtaatgctcttcttgagatgatgatataccaccttccatctccgtccaaggcccagaggtaccgtgtggagaatttgtatgagggtcctcttgatgatgtctacgcaactgctatcagaaactgtgatccagaaggtcctcttatgctgtatgtttccaagatgattcccgcatcagacaaaggtaggttctttgcctttggtcgtgtcttctctgggagggttgcaactggcatgaaggtgcgtatcatgggtcccaactatgtccctggccagaagaaggatctgtatgtgaagagtgtccagcgtactgtcatctggatgggaaagaaacaagagtctgttgaggatgttccctgtggtaacactgttgctatggttggtttggatcagttcatcaccaagaatgccaccctgactaatgagaaggagtcagatgcctgcccaatcagagcaatgaagttctcagggtcccctgttgtgcgtgttgctgttcagtgcaaggttgcctctgatctgcccaagcttgttgagggtttgaagcgtctggcgaagtctgatcctatggtgctctgtactattgaggagtctggtgagcatatcattgctggtgctggagagcttcaccttgaaatttgcttgaaggatctgcaggaagatttcatgggtggtgctgaaatcattgtttccccacctgttgtttctttccgtgagactgtccttgagaagtcgtgccgtactgttatgagcaagtccccgaacaagcacaaccgtctctacatggaagctcgccccttggaggagggattggctgaggccattgatgacggtcgtattggcccacgtgatgatcccaaggtgcgctccaagatcctgtctgaggagttcggctgggacaaggatcttgcaaagaagatttggtgttttggacctgagacaactggccccaacatggtggttgatatgtgtaagggagttcagtatctgaatgaaatcaaggattccgttgtggctggtttccagtgggcatcaaaggagggtgctctggctgaggagaacatgcgtggtatctgctttgaggtgtgcgatgttgttctccatgctgatgctattcacagaggtggtggccaggtcattcccacggccaggagggtcatctatgcttctcagctcacagcaaagcccaggcttcttgagcccgtctacctggtggagatccaggcccctgagaatgcccttggtggtatctatggtgttctgaaccagaagagaggacatgtgttcgaggagatgcagaggcctggtacccctctgtacaacatcaaggcttacctccctgtcatcgagtcctttgggttctcaagccagcttagggctgcgacatctggccaggccttcccccagtgtgtgttcgaccattgggacatgatgacctctgatcctcttgaagctggctcgcaggcttcaaccctggtgcaggatatccgcaagaggaagggtctcaaggagcagatgactcccctctccgatttcgaggacaagctctaaatttttggccgccgcatgtgttgtgccgttacccttacatgttctagttggtctactgctaagagaactgctttcgttgtcgtatttcatttcccttttgtcgaatgcatgtgtttcacatcaacaatcctatgttcgcgtgctactgagaaactatttttactctgtcgtgatgtaacggatgtggaacctggatcatctttttgctgtctaagttatagtgttcacattct

SEQ ID NO: 24872 - DNA, 1795 bp, Oryza sativa
  ref <308>: DATABASE ACCESSION NUMBER: AK100314
  ref <309>: DATABASE ENTRY DATE: 2002-08-28
gattcactcctgcccttgcgagcttcgcacgcagcgatcgagagatagaacagcgagataatggtagtagcagccgttgcttgcttgcattggcttagctaagctcaagctagctcctactactcctacctgcttcagctttgcttcctgcgcatgagctagatgctccctcgcatccatctcctagctttccttccctttctctcgctgctgctgctgctgctgcatcctcctctcctgtgacctgtcacagcttggcctaggactagtagggagtagtgattcttgctcgctttgtttctctgaatccttgcagcttggcttggccttggccttggctgctttgaatagtacctgacggcctcgtggcgcgcaaaccttgtcccttttccccgcaaatccttgccgccttttggtcgctctctgctcctcctcgtccctcgcgccgtcaccacctgctctgtctcctctccttcttgcagctcgtcgtcgtcgtcgttgatctttggctatatattactccctcctgctgctgctgctgcacggacgcagtgaggaggaagagctcgtgacttgttttcatcaggagtacagttgtcagtagctgatcgaggtcgtcgtcgtcgccatcgatggcgtggaggagagggttcggccgggaggaggaggacgcggcggcggcgggggagagcggcctcgagctctgccttggcctccccgcctacttctcctcctcctcctcctccaagccatcggagggatcaaccgctgctcctgcttttgctctccgatccaatggaaccaatgcctccaagccaagcggggcagcggcggcggcgccggttgtggggtggccgccggtgcggtcgttccggcggaacctcgcctcgtcgtcgtcatcgtcgtccaagcaggcgccgccgccgccgtcgtcgtcgccgcagaacggcgacaaggcgagcaaagacggcggcgcggagaagggcatgttcgtgaagatcaacatggacggcgtcccgatcgggaggaaggtcgacctcgcggcgtacggcggctacgcccagctctccgccgccgtcgacaagctcttccgcggcctcctagccgctcagagcgctgccgctgacggcgaggccgacgcggccgccgccggagagatggtcggcggcggcgagtacacgctcgtctacgaggacgacgagggcgaccggatgctcgtcggcgacgttccctggcagatgttcatcgccaccgcgaagaggctgcgcgtgctcaagagctccgacctgccgccgccgtcgctgatgagggcggcagggagcaggaagagggcagcagctgacagctgaactaatcactgtcaatttcagctgctgctgccgatgatgatgaattgatcatggtgtggtgcttggattgagatccctctgcagtcaaatacacggtcctttgtcattgacaggtggacctagggattatcgggcctatatgttaatgataacgtcacatgactttaactgcagaggattttgatctgtggtgcttggctttatggccattttgatgtctttgggctgcataattatatgtatacttacgagagatcatgacggtattagtggtcatgattagtagtacgatcgagtagcatggaacagtgttgttaattactagtagctgggtgattaagctaatctatggcgcctttggtggtgtaattttggatgtaggcaggcatgtgtcaaattagttatgtgttttgttaattaagcgatctagttaatgcgtttaagct

SEQ ID NO: 24873 - DNA, 3029 bp, Oryza sativa
  ref <308>: DATABASE ACCESSION NUMBER: AK100315
  ref <309>: DATABASE ENTRY DATE: 2002-08-28
gacggtagccacacgggctatttgctcgcacgcctcagtccacctcccctgagctgtgctgctgcgctgcgctctcggactcctcccagatccccaatccccccacgctctccggccatcgcgggtggagcagggccgccgccgagggctgggggggagcgcgagtcccggggatccgagccatctgccggtgggcggcggcggcggcggcggagttggggttcgtcgtcttggtcttgggtcttcttcgtccctcgctgcgggtgggtagcgcagcgtcggggcagatccggctagccactgcgacgctgaattctggagatccccgcacatggagtcgcagcgagggcaatctcctgatcgtggatcagacgcatcaggaccaaaacagtctagtgtttcatcacatggtagacaaaggaattcatcatcttctatctgtaaagattttctccggaagtttgtggacaatgaactattgacatcaagcctagaggactggttctctgggcacagtgaagactgtggtttcaagaagccagcatttgatgttccttttgacctaagtgaactacaaaattttgactatgctatagaaggtgttactttccaacagctagtacggatgccaaatgctcttcatgcctcaacatcagatatttttgaagctactgcacatcttgctttggaagattttcttcatgcaagtattaagggtttgtgggaaactttctggggccctgatgaatcgatgcctttctctgttgcctgtatacacagcacaagctccaaattttatcctgctgagaaggctattagcagtgggagacttgatggcgtttgtgcaacggctgtattgctgaagagtttaaagcattcacaaggaaggtgggatcatattgttgtactggctttgttgagacctgatattggaatgttttcggggcagaatgaccaacagccatctccggctgttttgggggaggcactattctttgccttgcgtgttctactttctcgaagccttagtaggtcttccacagttcttcaaaattcagattgtgtttacgtccttcttgttgattcacagtttggaggagtggtaaatgtccaaggtgatctgaacaagcttgattttgatttgaacaatgtttatgactctgctgcagagtggataaaaaagcatgcacaaatcacagtttcttccatagaccgcgtatggaacaaacttggcaatgctaactggggcgacattgggactcttcaagttctccttgcaattttccattcaatgatccagttctgtggtgcaccaaagtattctcttgatgaactagctacagagcatagttcccgattacagagccgaagatcagaaagacatttggttggcaggcaagctaatacaaatggtttgtttcgattccagcagcaaagtcattctcctgaaattgttgaagtacaagaggagggagctgttaatgtaaaaccaaaggaaattttgaagcttgaggtaggatctgttgtattgatggaggatgctgattggcagaagggttttcaaatcaatgatattcttacagacagcgaacctcctatctatagtgctactcctgtagaagaacctaccaaaacccatctgttgtatgtaggctccagcccttctcatttggagccagcatgggaagatatgaattcttggtatcaagttcaaaggcagaccaaagtacttactttgatgaagcaaagaggcatttcaagtagatatgtcccacagatggttgcttctggacgtgtcgtccatccaggcccttgtaacaagcctaactctagtgggagttgtggccatccatggtgcagtactccaatacttgtcacctcgccagttggtgaaactatttcaaatctgattcgtaatgggctgtttggtgttgaggacgctctgagatgttgtcatgactgtttgtctgcgcttgctgctgcatcatctgcaggaatccgtcatggtgatatccggccagagaatgtgatccgtgtgagcaatggttcaaggcatccatattttgtacttattggatggggccatgctatcttagaagacagggatcggcctctaatgaatttattcttctcatctacatttgctctacaggaaggcaagttatgtgcagcatctgatgcagaaagcttaatttatctgttattcttttgttgtggtggagtttgcccagagcttgactcagttgaaggtgcacttcaatggagggagacatcctggtcaaggagagttatacagcagaagttgggtgatgtctcagcagtgctgaaagcttttgcagactatgttgacagcatttgtggaaccccatatccgatggactatgagatatggttgagaaggttacgaagaaccatcaatgaagatcatggcaaggagattgatacatcaagttagtactgcagctcatgttagtgcggaagtacgatatggaagatcaagaatggtcgttccataccctgtattgttgttgtagataatttattcgcctgtctcgtaaaaggtccataacttagtatccccctccatcttgctccatttcatctaaagggtatttccatagtcacaatctgctgctgatatcctcaacttggatttctgaaaatggtgtcgcctttgcacaagactgcagtagagatcttctgaggatatctgcaacatgatttattttggcgagtgctcctcttaagtctttgcttttcttcgggtctcgagtgtgtggtatagttgatcaatttttggtccttttgcttttttgaaattgttccagaatggatttgtgattagaggtggtgtggcagagtagcattttgttctgactaaattattttgcgggtgctatgttccaagtgcacctagttcttgtaaatgttgttcttgttcagctgtacaaacttcaatcatgctaggctgcaactgctgggtgttgatatgttcgatgaaatgtcaaaaaaaaaaaagttgttccccc

SEQ ID NO: 24874 - DNA, 1321 bp, Oryza sativa
  ref <308>: DATABASE ACCESSION NUMBER: AK100316
  ref <309>: DATABASE ENTRY DATE: 2002-08-28
ggatttttcgtttcctttcccagcgacgaaacttcctatcaaaaccgcggttttataccggttctagccgccaagaaccccaacccccgccacccggcgaacgcgccctgcgagaaaatttggtgttttggggcctttttgaggtgggaattctgagaattctgagggttcttgcctgttgctccgaggatgaggaaccttctcacggattcgtttgagctcagcaaagtggaccaagcccctgcaaatgttgatatcgagctagggttgcagggtggcatgtccagttctgcgcagcctggctttgaaggcttctttgaacaggtcagggagatcgagaagctacatgaaacattgacaaagttactgaaggaccttcagaactcaaatgaggagtcaaaaattgttaccaaggcatcagccatgaaagagattaaaaagcgcatggagaaggatgtcaatgaggtgacaaaaactgcacgtctggcaaaatcaaaagtagagaagttgaataaagacaatgctgcaaacagagaaaaaccaggcttcggtaagggttcgggagtggacagatcccggactacaaccactgtctcattgacaaagaggttgagagaacggatatctgagtttcagacattaagagaggcaatccagaaggaataccgggatgtagtggagcggcgcgttttcactgccactggcgagcgtgctgacgaagagacaattgacaagctgatagaaactggggacagtgagcaaatttttcagagagctattcaggaacaaggccgtggaagggtgcttgacactctccaagaaattcaggaacggcatgatgcagtgaaagagatagagcagaagcttcttgagctgcaacagattttcctcgacatgtccgtgttggttgaggctcaaggcgagatcctggacaatatagagtcacaggtttcaggtgcagctgaacatattcagactggaacaaacctcctccagaaagcaagatttctgcagaagaacacacggaaatggacctgcatagggattgtcatcctcctcataatcatcctcatcgtcgtcctctccttaaagccgtggtctaagtagaaaaacctgcatctcagaagcatcatgttcatgtcgattttggctggcaatgtttatcttttgtgcagttctacttctagttgtgtatatgccacggtgtggtagtgcgtcatgtacattctctgaaattttgggtgcgaacttattcagttctctgtacttcaaataatgaacatgcagcttgatcatacataattttgctcataaactttct

SEQ ID NO: 24875 - DNA, 3375 bp, Oryza sativa
  ref <308>: DATABASE ACCESSION NUMBER: AK100317
  ref <309>: DATABASE ENTRY DATE: 2002-08-28
gactccctccggagaagccgtcaacacgcaaaccctcccttcgaactccggcgatcaccggcggccacaccacagtccccctgccgccgctgccggcggtcttggtccggcggccatggacgacttcgtcctcgtcgacgacttcggcccgttcaagccgccggccgcctccgcctccaccacctccttctccgcctcccactacgacgacatgttcgactcctacttcaaccgctcggcggagcccgccgagccgtccccctcgtcctccgcgccgtcgccgcctccgcccgtgttcgacaagccggtgttcgacgacgccgacgccgacgccgccgatcccttcgacgcgattcccttgttcggagatgggggcgatggcggcgaaggggaggacttcctcgatagcctcgggaagggcgcgaagaagccagatgtgagcgagccggaggtggtggggtttgacgacgatttaatcccagctcttgggaacaccaaatcgaagacgcccgtgggtgaggaagaggtggagcaggaggcggaagcggtggggttcgtcgacgacgtaatccccgagtggttcggtgggagcgcgagcacgacgccgatgaagccgacaccgcaggcggagcccaaggcgacggggtttgaagacgatgtgattcccgggtttggtgaaagcacaagccatcacgattcaccatgggaggagcctagaactagaccggaaaacgaatcaatttcatccagcaaaacgagtgtgagcatgccaggagatgcttttgttactctaggtgctacatccaacttgggaaattcaaattttggattgtttactgatcatttggataacatgggcaagtcagagagcaaaaatatggacccctgttctactgccaatgggatgttagatagttctaatatttttgttggggttccaaaaccaatgtcctcgtcttcatttgcatctgagaaagagagtgtttttggtgatagtaaatccttggatggcatttacagcatgaaccattccattaaaatgcctaaggagaaaccagtccagcaagcttcagctgaaacaattagcagtatattgcctgagatgcatatccatgaagctcctggaaccactggtttcaataattcagatccactttctacaagtatgcaggaccagttgccagaggagaatcaatgttccaaaatgtccgacgacgtgtggttgactgtttcagatgttgttttagtgacacagcctacgagtgctccacctccttcacggcctccccctacgcttgccgccaagaaaggaccaacggaatccaacactagtaatgcatatccacatgatcataatcaaggttacaatccttttataagttcaacaaatacttctaaaacacccaaaattgatgaattagaagattttgtcatggcaaagccttctagcttggctaatggttgtctgcaagatctaaatcataatggaattgggattggacaagattcatctacatctgctgcaggtttcatggattgggctgagctaaaacactctaaaggggtgaaccaagggaactttgattctttgttcgctagcagtcagtaccaagaaaaagagaaagcagtgctctatgcttctggaatggaaagcagagatgaggaagaactattagagcatgagaaaaaacaaagagaaaaggaagaggaacagagaaaactagaaagggacagggaggaagagcttgagagggaaagagaaatgatgagaagaagggaacatgaggagcggaagaggcgtgaaaaagagagagaggcgaggcacattgtggagaaggccatgcgagaggcacgtgaaagggcagctgctgaggcacgcatgcaagctgagagggaggctcgtcaaagagcagagcgagctgctgtacagaaagcagcagcagaagcacgagagagagcagcagcagaagcacgggagagagctgcaaaggcggctgcagaagcgaaggaaagggtggctgaggaggctagggaaagggctgctaaagctgctgcagaagccagggaacgggcagctacagaagctagggaaaaggcagcagcagaagctcgggctaaagctgagcgagctgctgttgataaagttgcagcagaagcacgaagaagggctgaaagagcagcagttgagagggctgctgcagaagctcgacaaagggctgctaatgaagctagaaaaagggctgaagctgaagctcgagcaagagaaagtcagcagaaaacagctcaacctgatctcgactcattctttggtatgccttctagatcaagcagtgtaccgagatcacagactgcaacaacgaatccttttgatgtccaacctcaaggtggttcagattttggttctataaggaggacttcttctggttcagcttctccctttgcacaacctccatctactaatcttatggatgacctctcttctatatttggagcaccttcatcatctgctgtgtttcaagaagtggatggagagagtgaagagagaaggaaggcaagattggagcgtcaccagaggacaatggagcgtgcggcaaaagctcttgctgagaaaaatgagcgtgatttgcaagttcagtgggagcaggaagagagacatagaattggtgaaacacttgattttgagataaagaggtgggccgctgggaaagaaggcaatttgcgagccttgttgtcaacgttgcaatatgttctttggcctgaatgtgggtggcgacctgtatcattgactgatttgattacagccgcatctgtcaagaaagaatacaggaaagcaacattatgcatccatcctgataaggtgcagcaaaagggtgcaaatcttcaacagaaatacattgcagaaaaggtgttcgaccttctgaaggaagcatggaacaaattcaactcggaagaactcttctaacacttaatcgtttgtcaatccctgagccactgaggtactaggaaggaaacaaatgacatactggtaaagcttttattgttttctatcattataatagctctttttcttttttgcttattctttggtctgattctttggattcattctcatgtaaccatagtttgcttcctggaacttgtgtgttgtatgtatctgccaattttggtacccatggctgtgtaagtagatttatagagaaacaaccctgtaaatccggtgatgttaaacattccattttgggagagtagtatatatttttagagaaaatttatggtctttgagaaagtatcaggaggtactaaaatattacactaaaactttgtatgttctatgggtgatgtagtacttggtaaatctgtatcaaatttgctgtc

SEQ ID NO: 24876 - DNA, 668 bp, Oryza sativa
  ref <308>: DATABASE ACCESSION NUMBER: AK100318
  ref <309>: DATABASE ENTRY DATE: 2002-08-28
ggctccctccacgctccatccatctctccctccctgcgacctcccgtgatgtcatggatacgacaggtcggcgggggcggcgccagccccggcggattgagatggctcggatgaggcactagcagtacggcggcagaggtagggtcttgcgattgtgatgcaggagaaggcgaacgcaacatgtaggtgctgcttggctacgacggcggaggcacaagcctatggtctccagcgccagtggatctgttgcagggagcctgatgcacaagcttttgcaatggcggatctgatgaaggagccaacgattttgtgtctcccagcgctgaggtggttcgagaagctttgccattagaataaacccaaggtcaatctggataaatacacacatgactacaggccaccttggtggatgcaaacacatttctttgttctttctagttcttgcagattaattcctactccttacagattgtggagaagtattttttaacagattatggatgcaaaccatcttgtagattgtggagtagtattttttttgacgatttcttttttcagactagaggttcttaattttttgttaacatattcaatttaaaacttcattttttttgctggatacctgtgtaattgatgcgtgcagagaatccagttaaaccttttttttc

SEQ ID NO: 24877 - DNA, 3494 bp, Oryza sativa
  ref <308>: DATABASE ACCESSION NUMBER: AK100319
  ref <309>: DATABASE ENTRY DATE: 2002-08-28
gttgagtcaatacctgcctaaagttgagttaccccttccgcctcagcgtcagtggccatgtcggagaggaggcggtcgcaggaggaagaggccgtgagggagatgaggcggtcgcaggaggaggacgaggtggaggagcgagtgataagggagtcgtcggaggcggaggagaggaagcgggtcagggagaaggaggacgacgaccttgaggagttccagctgcagcttgtgcttgagatgagcgcgcgggacaatcctgaagagatggagattgaagttgccaagcagatcagcctgggcttctgcccgcctcagagctctactgcagaggccctcgcggcccgatacaggaatttcaacgcccttggctatgatgacagaatatcagatgggttttatgatctctatgtgactgggaatggcccggcttcaataaccatgccctctcttaaagatttgcgagcgcagtcactatcacatagggtcaactgggaagctgtattggtacacagaggtgaagatcctgagcttatgaaacttgaccagacggctctaatcatgagccttgaactccgtgaatctaaaccttcagaatttgttggaaatgatttggttcagaaacttgctggcctagtagccagacacatgggtggaactttttttgattctgagggcatgttggtgaaataccagaaaatgatgagatacctgagaaccagtattggaagtgtagttgttcctcttggccaattaaaaattggtctggcacgtcatcgtgcactgctatttaaggttttggccgataacattggtatcccctgtcgactcctgaaaggaaggcagtacactggatcggacgatggggctttgaatattgtgaaatttgatgatggaagggagttcattgttgatcttgtcgcagatcctggtacacttattccttcagatggtgctgttttgtctacagaatttgaagaaagttccttctcaaataatcatcattttaacaaagataatgacatcaggcagttgggatcttcaaatagtttatcgaattctgcatgtagttcttttgagtgtgagttacttgacagaagatctacatggatcaacgttggtccttctgatagtgatggagctacaacgagccagacaagtaaaaacaatcaacaaaatacactatcagattcattcgggattttatctgttagcacattcactagtgaaaataggcctattacaaatgaatcaagaagtacagacgacattgctgccgcaaagaacaaagaaagatcaagtgtaacaattaattcttcgtcaacttcaccttcaccttcttccccagaagtaggcagtactccagctgtccggaggatgaaagtaaaggatatttcggagtacatgattaatgctgccaaagagaatccacaactagctcagaagatccatgaggttttacttgaaaatggagttgtagcaccacctgacttgttttcagaagattccatggaagagccaaaggacctcatcgtgtatgacaccaccctttttcaaagcaaggatgaaatgaaaaagaggatgaatgaacttgggtcgagggaatatgctgatcgtggtcatggtccattattgcctcatcatcctggacatgaactcccatcaaaagttcctcaccgggcacctctagactcacttaagccagttgagggtttgggcattgaccacccccctgacatccaagataacacatcttttatttctcagtatgaaccttctgcacctccccaggaagcttcatcgcagcttacaaagcaattgcctgttacggctgctgctgttgcaactgctgcagtggttgcgtcttcaatggttgttgctgctgctaaatcaaacaatgatgtgaactttgacgtgcctgttgcagctgctgcaacagtcactgcagctgcagttgttgccacaactgctgctgttagcaagcaatatgaacacttggagcctggtaatcagctgcatagtttaccaagtccctccgaagggaatgaatcaatcgagaaaagtgcagatgagttttgggataaacagaattttgaaattgatcatggtcaagataatactttggatcaagaaaaagattcagctgaagttcgccaggatgctgaaagaacctcagataagtcaagcggaacagagagtgcaaaatctgaaatcactctggatgatgttgcggagtttgaaatccaatgggaagaaattactattggggaacgcattggtcttggatcatttggagaagtttatagaggagagtggcatggaacagaagttgctgtaaagaagtttctgcaacaagatatttcaagtgatgctctggaagaatttagaactgaggtgcgaataatcaagaggttgcggcatccgaatgttgttctcttcatgggtgctattactcgtgtacccaatctttctattgtcaccgaatttcttccaagaggtagcttatttcggttaattcatcgtcccaacaaccagttggatgaaagaaagcgcttaagaatggcacttgatgtggcacgtggtatgaattatctacataactgcacaccggtgatagtccatcgagatctgaagtctccaaacctactggttgacaagaattgggttgtgaaggtttgcgactttggtttatctaaaatgaagaacaagaccttcttgtcatcaagatcaacagctggaacagcggagtggatggcacctgaagtacttcgtaatgaaccatcagacgagaaatgcgatgtttttagctatggggtcatactgtgggaactttgtacattactgcaaccttgggaaggcatgaacgccatgcaagtcgtcggagctgttgggtttcagaatcgtcgccttgatattccagataacactgatcccgccattgcagaaataatagcaaaatgctggcagacggacccaaaattgcggccatcatttgcagatatcatggcctcattgaaaccactgctgaaaaacatgaccgctcaagcgccaaggcagagagtacaacaaaccgacgagtaagaaaaaagaggatgttaccagctgcccgaaggcctaagtatagcatttttttttgttttttgtatagtaacaccaattgtgtgttcgagattggaaagcgtgatgatgttagtgtgctgggtatccatctgtgaagaccagcgctgccaaacccgtccacgatggaggaaaattgaacagcggcaagaaactgtgcaaacgcgaatcaaatgtttagcacagttcttccccaaaaacaccagtctcaggaaatcacatggcgggcggaagttacacatgcttttttcataccatctctcttttcctttatctcgtgttctccaccaaatggtggtatttgtgtaatatggcaagaaaaagaaaaaaaaatgatttgctgtccatcaagaaaatgaaaaaggagaaaacggttgttc

SEQ ID NO: 24878 - DNA, 2438 bp, Oryza sativa
  ref <308>: DATABASE ACCESSION NUMBER: AK100320
  ref <309>: DATABASE ENTRY DATE: 2002-08-28
gaggccccaaccccaacacccccaacccgcccgaaagaaaatctcccgtatcgtctcctccgctccttgcgccatctcgcggcagatcaggggaggaggcgccgatctccatctggcgagcagagcggggagggggcgccgtcgtcctgctgcatcctgatgttactcgcgcttcaaaactctgaggtttgttaaatctgttggctaatcatggaagaacagcaagtaaagccctctgattcacatccaccacctgctactccggtggacagccaggattcaactgcacctcctgtcagaactcctgaccctgtttctcaggctacttcaaatgattctgccacccagtttgccagtacagtccatgtagccccttcacctgcacctgttccaaatgctgttccaatacaagatgctgcaggacgcgaggcacaatcctccatattttcaacatctggcttatcctcctgggcaaaaaacctgaaaataccacagccttcttcaggtcaagaatcaccaacggggaagaacacattttctcgcctcacgagtggccttgggttgcgcttgtctccaaaaggtcctcagcaagatgagagtgctgaaggcagcacaaccccaacaacagcacaatctggcgtttttggctcttttactaaaggcatcgtggattcctctaagaatgctgttaaggcagtgcaagtcaaggctcgccacatggtctcacagaataaaagacgatatcaggaaggcggctttgatttagatatgacatatattacagagaacatcattgctatgggtttccctgctggagatttgagctcagggctttttggatattttgagggcttctaccgcaaccacatggaggaagtcatcaggttctttgaaatgcaccacaagggaaagtataaggtgtacaacctttgctcggaaaggctatatgatgcatctctttttgagggaaaggttgcatgcttcccttttgatgatcacaattgccctccgatacaacttgtcatatcgttctgccatagtgcttactcttggttgaaggaagatatagaaaatgtagtggttgttcattgcaaagctggaaaggcgaggacaggattgatgatctccagtctgctactatacctgaagttctttccaactgcggaagagtccattgaatactacaatcagaaaagatgtgtagatggaaaagggcttattctcccaagtcagattagatatgtgaaatattttgagcgcatcttaacttacttcaatggtgaaaatcagcctccacgcaggtgcatgctcaggggatttcgccttcatagatgcccttattggattagaccatcaatcactgtgtctaatcacaatggtgttcttttcacaactaagaagcaccctagaacaaaggagctgatgccagaagatttctggtttagtgcaccaaagaaagggatcatggtttttgcgttgcctggagagcctggattaacagaggtagctggtgacttcaagattcagtttcatgatcgacagggggatttctactgctggttaaatacaacaatgatggagaacagggtgactttgaatccaactgatcttgatgattttgacaagaggaaattaccatcacctggattccaggttgaggttgtcctggtagactatgatggttcacaaccaccaaaaccaaaaccagctgccgcatctactgatcagaagtctgaagctgattcctcgactggaactgttgcaaaaggaaataatgcttcatctgcagaagtgtccaacaaggaatctgcaaggaatgataaggatgacgtcttctctgacagtgaagcagaagatggatcatccaagggcagaagggagaaggtctctaggaacgttgagggtactactaatgctgcaaaagcgtctgaaacaagctctgtgcaaaaggaggcgtctgctgctgcttccagaattgaaaaagtatcaataaccagcgaacaaggaagtgcaaggacacctgatgctgcacctctcaaaagtggagttagcagcaagagcagctccaccacagcaccaccaccacccccagcggctgctgactccagcatgagcgagttcaaggcaattgctgcagacgcttcggtcttctcgttcggagatgaagacgactatgaaagcgaataattcacacccttttgtgggcgcctggttcgccattgtatagtttggtgctttccagatcatgataggataccacctggaagcaacaggtagaaaagatgaaaagaattgctttgttctaccgttttatgtttcattgtagccctttttcaagctgtaatgttgtacaatggtgaactttgtaactccaaaaatgtcagaactttgttgatacttcgcttatttgtttacagagattctatacatggattctt

SEQ ID NO: 24879 - DNA, 3587 bp, Oryza sativa
  misc_feature (1028)..(1028): "n"=any one base of a, t, c, or g
  ref <308>: DATABASE ACCESSION NUMBER: AK100321
  ref <309>: DATABASE ENTRY DATE: 2002-08-28
gtctcgctcttcctcgggttccgcttctccaggctcctcttcttcctgctcttctccaccaccgcgctctactcctccacctcgtcgtcctcctcctccgccgtgctccgcgccacgacgacgacgacgaccaccaccacaaccaccacgaccaccaccaacaccttcaccctctccttccaagccaacccaaaccctcccccatctaacctctccaaccacactgccctggacgcggcgggggcggccgggcacacgcagagccacgtggtggtggggcggcatgggatacggatccggccatggccgcaccctgaccccgtcgaggtgatgcgggcgcaccggatcatggagcgcgtgcaggaggagcagcggaggtggtatggcgtcaaggagccgcgccatgtcctggtcgtgacgcccacctactcccgcgcgttccaggcgctccacctcaccggcctcctccactccctccgcaacgtgccctacccgctcacctggatcgtggtcgaggcaggcggcaccaccaacgccaccgcgtccctccttgcacgctccgaccttaccatcgttcacatccccttccctgaccgcatgcctcatgactgggctgaccgtcacgcaaccgagaatcgtatgcgcctccacgcactgcgggtgatccgggaaaggaagatggatggtgtgattgtgtttgcggatgacagcaatgttcatagcttggagctgtttgatgaggtgcagaaggtccagtggatgggtgcggtgtctgtgggtatactcgcacatactggaacagcagaccagccacgacttagtgaagaggacaagcagaatatgcctcttccagttcaaggccctgcctgcaactcttctgggcacctagccgggtggcacacatttaactcattgccttttgccgggaaaactgccactgttgttggagaggcagcaccggttctaccaaggggtttggagtgggctgaagagagagaagctcgaagctgtaattttaggtgacactnataggaccagaccggccaagcagctcagcctataacatagtaactgaattgcagccaatccacgtactaccgaccggttaccgatggagctgatgctgccgccatgggcgtccttcgtcggcgtagtgctcgccaccgtgctgttcctgaaagcggtgctcggccgtagcagccgcgtgtacaacctcccgccggggccgaagccgtggccggtcatcggcaacctcaacctggtgggcacgctcccgcaccgctccatccacaacctctccaagaagtacggtcccctgatgtacctcaggttcgggtcgttccccgtcgtcgtcggctcgtcggtggagatggccaagttcttcctcaagacccacgacgtggtgttcaccgaccggcccaagaccgccgccggcaagcacaccacctacaactacagcgacatcacgtggtcgccctacggcgcgtactggcgccaggcgcgcaagatgtgcctcaccgagctcttcagcgccaagcggctggagtcgtacgagtacatccgtggcgaggaggtgcgcgcgctgctgcgcgacctgcacggcgcggccggcggcgtcgtggtgctcaaggactacctgtcgacggtgagcctgaacgtgatcacgcgcatggtgctgggcaagaagtacctggacaaggatgcgggggggtcggtgacgacgccggaggagttcaagtggatgctcgacgagctgttcctgctcaacggcgtgctcaacatcggcgactccatcccgtggctcgactggctggacctgcaggggtacatcaagaggatgaagaagctcggcaagatgttcgaccggttcctggaacacgtcgtggacgagcacaacgagcgccgccgccgcgagggggagagcttcgtggccaaggacatggtggacgtgctgctgcagttcgctgacaatcccaaccttgaggtcaagctcaagagggaaggtgtcaaggcattcactcaggtgagtctttctgtcactgcatttctgcccccaaaaaatgttttcagatcaacttcaaatatctacacgcttcaataaactggaaaatcacatactaatactgtaattaataggaacaatcttgaatgggtgcagtcacaaactctcagaatgatagctgcaggctgcaactatgtactcgtagcattcttgttagtcaacttctgaaacttgaccgtgacataaattatttatttcttagtaggatattgggatactacgtatggtagggttgtcatttatcatagccaaaccacattattaattactagtttcaatcagaaaacggacttacataaaagatcggagttgcccaaatggacgtcactatccattagggaaatgaatgtgcttgccacagagctagcccacacaactatgaactgtctgaatatcttgtctgcccaaagagcttgcagattccgttgctgataagcatgggacgtcaatcattgcaagcagcactgaccccctcctgtgatctaaacagtgcagaataagtttataactgaacaaaaacaacattaaaaaacaattttcagactgcagatcaacactcttcattatgtcttaaatcttataacaatgcatcatatcactggagtgttacttagtccattgttgatcaccattacaacaccatctaagtagcaacaattcagcaattcacatcgatcgttacgtgcaggacctcatcgctggcggcacagagagctcggcggtgaccgtggagtgggcgctgtcggagctcctgaagaagccggaggtgttcgccaaggccaccgaggagctggaccgcgtcgtgggccgcggccgctgggtcacggagaaggacgtcccgagcctcacctacgtggacgccatcgtgaaggagaccatgcggctgcacccggtggcgcccatgctggtgccccgcctgtcccgcgaggacacgtccgtcgacggctacgacatccccgccggcacgcgggtgctcgtcagcgtgtggaccatcggccgcgaccccaagctgtgggacgcgccggaggagttcatgccggagaggttcatcggcaacaagatcgacgtgaaggggcaggacttcgagctgctgccgttcgggtcgggccggcggatgtgccccggctacagccttgggctgaaggtgatccagctgagcctcgccaatctgctgcacggcttcgcgtggaggctgcccgacggcgtgacgagggagcagctgagcatggaggagatcttcggcttgtcgacgccgcgcaagttcccgcttgaggctgtcgtcgagcccaagctgcccgctcacctctatgctgctgcctgatgtgatatgcctttgatgatgtgcgtgtgtacgttctgtgtctcttgactgtactgtaggcactgctcctgtcgcggtccaacattaagcttgcagtgtattgctagcgttgttacttattatgcatcctgtgctgcctttgtagagctgaatgtaatagggcaagtgtgagtcaataatatgcttgataataaggtgttatgc

SEQ ID NO: 24880 - DNA, 3026 bp, Oryza sativa
  ref <308>: DATABASE ACCESSION NUMBER: AK100322
  ref <309>: DATABASE ENTRY DATE: 2002-08-28
gtactcctcttctcctctctttctctctcctttcccctctctctctctctctatttagttcttttgcccccatgtcagctgcagtctgggggaatctgaggctgctgctcacctgggagactgaaaggaggcagaagcagcagcagcatcagcatcagcagcagagcagatagctgagctgcagagggggaggagagaagatagtagtggtagtagtagctgagctgtgtcaagattgcccttcaaattcatcatcttttgctcttgtgagaaaaggtgagtagtggtttctgggttgcgtctccctttttctgcaagatttctgagccaaaattctctcttttgctcgctttgttcccttttctttcttttctttttttcccttcttcctcctttctgctctgctggttggttggttctttctcctcccccagcctttttcagctatgagctctgattgatgatgacgatgatggcggctgtgcagctgaaaagcttcttcaccttgtggtagtggtaaaagctgtgggaaatttcatccataaagatcgccgtggcgctcgaattccgctgaattttgtttgtgctcgagctgatcggtggaggtgaaagatttttgcgtcgaagagatgataactttcgtggattccgcggcgaaggagcgggagcgggagagtgacaagtgcttggacccgcagctgtggcacgcctgcgccggcggcatggtccagatgccgccggtgagctccaaggtgtactacttcccgcaaggccacgccgagcacgcgcaggggcatggccccgtcgagttcccgggcgggcgcgtcccggcgctcgtgctctgccgcgtcgcgggcgtcaggttcatggccgatccggacaccgacgaggtgttcgccaagatccgcctcgtccccgtccgcgccaacgagcagggctacgccggtgacgccgacgacggcattggcgccgccgcggccgcggcggcgcaggaggagaagcccgcgtcgttcgccaagacgctcacgcagtccgacgccaacaacggcggggggttctccgtgccgcgctactgcgccgagaccatcttcccgcgtctcgactactccgccgatccccccgtccagaccgtcctcgccaaggacgtccatggcgtggtctggaagttccgccacatctaccgcggcacgccgaggcgccacctcctcaccacggggtggagcaccttcgtgaaccagaagaagctcgtcgccggcgactccatcgtgttcatgcgcaccgagaacggggatctctgcgtcggcatccgccgcgccaagaaagggggcgtgggaggcccggagttcctgccgccgccgccgccgccgccgccgacacctgccgccggcggcaattacggcgggttctccatgttcctgaggggcgacgacgacggcaacaagatggcggcggcggccaggggcaaggtcagagcccgtgtccggccagaggaggtcgtcgaggcggccaatctcgccgtgagcgggcaaccattcgaggtcgtctactacccgagggcgagcacgccggagttctgcgtgaaggccggggcggtcagagcggcgatgcggacgcagtggttcgccggcatgaggttcaagatggcattcgagacggaggactcatcaaggatcagctggttcatgggcactgtatcggccgtgcaggttgctgaccccattagatggcctaattcaccatggaggcttcttcaggtttcatgggatgaaccggacttgttacagaatgtgaagagggtgagcccatggttggttgagcttgtgtcaaacatgccggccatccaccttgctccattctcgcctccacggaagaagctttgcgtgccgttgtaccccgagcttcccatcgacggccaatttccgacaccgatgttccatggaaacccgctcgcccgtggggttggtcctatgtgctatttcccggatggcactcctgcaggcatacagggagccaggcatgctcaatttggtatatctttatcagatctccaccttaacaaactgcagtcgagtctatcgccccacggccttcaccagcttgatcacggcatgcagccgaggatcgccgctggtctaattatcggtcatccggctgctcgggatgatatctcatgcttgttgaccattggtagcccccagaacaacaagaaatcagatggcaagaaggcgccagcccagctgatgcttttcggaaaacccatactcacagagcagcagatatccttgggtgatgctgcttcggtggatgttaagaagagctcttctgatggtaatgctgaaaatacggtgaataagagtaactccgatgtttcaagcccgagaagcaatcagaatggcaccacagataatttgtcatgtggaggagttccattgtgccaagacaacaaggtacttgatgttgggctggaaacagggcactgcaaggtattcatgcagtcggaggatgtcgggcgcacacttgatctctctgttgttggttcatatgaggaattataccggcggcttgctgacatgttcggcatcgagaaagctgagctgatgagtcatgttttctaccgtgatgcggctggggcactcaagcacactggagatgaacctttcagcgagttcacgaagacggcgcgtaggctgaatatactaacagatacaagcggcgataacttagcgaggtagggtaaattaaagctattctcaattgtacagctggtggagcacggtggcaattttgaaggcaaaaattgccggtttcctagtactggtgcaatttcaaggaggcaattcagttttctttaattagagctcccagaatgggattgactgtaatccggtacccatatttatcggcagatttaccagactggatctatcctactgtcatgtaaaccgatcatattgcatttgatcgttggtgtgtactcggccatgaaccgttactaaacgaatgcgattacgggaatttttgcgcgc

SEQ ID NO: 24881 - DNA, 2978 bp, Oryza sativa
  ref <308>: DATABASE ACCESSION NUMBER: AK100323
  ref <309>: DATABASE ENTRY DATE: 2002-08-28
ggcgagatcatccctgcctgcctgtccctttcctgcatccatccatccatcttgatcttctcctagctcgattccacacatgtgaacgtacgtacgtttcagttaattgttcgatcgatcgatcgatcagctgctgctgctgctgctgcaacgaggaagaagaagaagaagaagatggtgaagttctcgagggagtacgaggcgagcatcataccggagtggaaggctgcgttcgtcgactacaagcggctcaagaagctcatcaagaggatcaaggtcacccgccgcgacgactccttcgccgccgccaacgccgcagccgcagccgaccaccttctcccgccgccgcccgcagagaaggaagccggtggctatgggttctccattcttgaccccgttcgcgccatcgccgcccgcttctccgctggacaacagccttctgcctcagaggatgaggagtgcccggacagaggggagctcgtgcgatccacggacaagcatgagagggagttcatggagagggcggacgaggagctggagaaggtgaacgcgttctacacggggcaggaggcggagctgctggcgcgcggcgacgcgctgctggagcagctccggatcctcgccgacgtcaagcgcatcctcgccgaccacgccgccgcccgccgcgcccgcggcctcgcccgaagccgctctatgccgccgccgccgccgtcctcctcgccgccgtcgtcggtgcacggctccagcggccgctacctcctctccggcctctcctcgccgcagtccatgtcagatgggagcctggagttgcagcaggcgcaggtgtcggagggcgcggcggtggcggacgaggtgatggcggcgctggagcggaacggcgtcagcttcgtggggctcgccgggaagaaggacggcaagaccaaggacggcagcggcaaagggcggggcggcggcggcggcggaggcggaggcgtgctgcagctgccagcgacggtgaggatcgacatcccggcgacgagccccgggcgggcggcgctcaaggtgtgggaggagctcgtgaacgtgctccgcaaggacggcgccgaccccgccgcggcgttcgtccaccggaagaagatccagcacgccgagaagaacatccgcgacgccttcatggcgctctaccgcggcctcgagctgctcaagaaattcagctctctcaatgtaaaggctttcaccaaaatattgaagaaatttgtcaaggtgtccgagcaacagcgagctacagacctgttttcagagaaggtgaagaggtcgccatttagcagctccgacaaggtacttcagctagcagatgaggtcgagtgcatcttcatgaagcatttcacaggcaatgacaggaaggtggcgatgaaataccttaagccacagcagcccagaaacactcacatgatcaccttcctcgtaggtttgttcacgggcacttttgtttcactgttcatcatatacgcgattttagcccatgttagtggtatttttacttccactgggaactcagcctacatggaaattgtgtaccatgttttcagcatgtttgctctcatcagcctccacatcttcctgtatgggtgcaacctcttcatgtggaagaacacaaggatcaatcacaacttcatattcgatttctcctcaaacaccgccttgacgcaccgggacgccttcctcatgtctgcatcgataatgtgcactgttgtcgctgcactggtcatcaatcttttcctcaagaacgccggtgtagcctatgccaatgctttgcctggagcactcctactactgtcaacaggtgtactattctgtccatttgacatattctaccgctcgacgcgatactgcttcatgcgtgtcatgcgcaatatcatattttcaccattctataaggttctgatggctgatttcttcatggctgaccaactaactagccagattccactattacggcacatggaatttacagcgtgctacttcatggctggaagctttagaactcacccatatgagacctgtactagtggccaacaatataagcatctggcctatgtgatctcctttctcccatacttctggagagccttgcagtgtttaagaaggtacttggaggaaggacatgatatcaaccaacttgctaatgctggaaaatatgtatcagcaatggtagcagctgctgttaggttcaaatatgctgcaacaccaacaccattctgggtgtggatggtcatcatttcatcctcaggtgccacaatttaccagctctactgggactttgtcaaggactggggcttcttaaacccaaaatcaaagaaccgatggcttcgtaacgagctcatcttgaagaataaatcaatctactacgtatccatgatgctcaatcttgcacttcgcctagcatggactgagagtgtaatgaagatccatattggtaaggttgagtcgcgcttactggatttctcgctcgcttcactagagataatcagacgaggccattggaacttctatagattggagaatgaacatttgaacaacgttggcaagttcagagcagtgaagactgtcccattaccattccgtgaacttgaaactgattgattaagcagtaggacatgccggcatgctgccaacatcaaggccagtaaggatcagagttccaggaatggagatgctgcttgccgctagatttggtacataagtggtaataaagtttgcagagaccattggtgcacaagaccatgatgttgctgattaggatggaataagcttaaatcagagcagctaatcgaggcagttcgtcaaaaaagaaggaataatcccttcttggtccgatgaagattgttgggcgtcatttcgctaacaagatcttaattttgtttatggttgtgttatgtatgtatctggagatggatgcccaccctccaaaaaaaatattccatgaattcatatgcacc

SEQ ID NO: 24882 - DNA, 2626 bp, Oryza sativa
  ref <308>: DATABASE ACCESSION NUMBER: AK100324
  ref <309>: DATABASE ENTRY DATE: 2002-08-28
ggaacgcaaaactaatcacctgtgtatgtaaaccgttgagtcatccccttcgcgtgcgtcacgttccaaatcaaacggagatcgggagaagagaccgaacagtctgaactctgaagctggtcaacaatgaggacgagataaacaagcttcctgcctactccgaccttccatcctcgcgttctccgtcgcttcgcctctctccccggctcccccaaaccccaaaccccagctcccgtctccgtctgcttccccggccgcccgagctcccccgtacggccgcaccccacccatccaccccgccgccgggatggagctgaagcccgggatgtcggccctcgtcacgggcggcggctccggcatcgggaaagcactttgcattgctcttgcacagaagggtctatttgtgacagttgttgatttctctgaagaaaatggaagagaagccgcttcattagttcaaaatgaaaataaaaagtttcatggagatcttaaagttccaagtgctatgtttattaaacgtgatgttactaatgcaggtgatctttctgctgcctttggaaaacatgtggacacatatggtggactagatatttgcatcaattgtgctggaattgccatcaagacactagtttatgatgatagatctgatggaactagcacatggaggcatgctgtaaatgtgaaccttgttgctgttattgatggtactcgcattgcaagtcaaattatgcgatctgggaagaagcctggtgtcataataaatattggttcagccgcaggcctttatcctatgaactttgatcccatatatagtggaacaaaagctggcgttgttatgtttacaagatcacttgctccattgaaacgccatggtatacgtgtcaatgtactctgccctgagtttgttcaaactaatatggcagagcaactaagtcgtcgaataatagatgtaactggtggatatataaagatggaagacattgttaatggtacatttgaacttataaaagatgaaagcaaggctggtgcttgcctttggataactaaacgaagagggatggagtactggccaacaccagaggaacaaagaaagtatatgctcaatcttcccaagtcaaaaaggatgttaacacaaaataccttttcgactgtccaaactcctgagttctatgagaagatagttgttcacacacttagccataattttcgcgatgctacaagacttgaacgtgtgcgcttgagattgccggttgaaccacacaatgctctggtcaaaataatatacgctggtgtaaatgctagtgatgttaacttcagtgctgggcgttatttcagtggtggtgctaaagaaactgctgcacgccttccgttggatgccggttttgaggctgtgggcatcgttgcatctgttggagattcagtgaaccatattaaagttggcagtcctgtagcccttatgatttttggggcctattctgaatttactcaggttccagccaagcatcttcttccggtgccaagaccagatccagaggtcgttgctatgctaacatcaggattgactgcttcaattgcccttgagaaggcaggccaaatggcatcagggcaagttgttctagttacagctgctgctggtggaacaggacaatttgctgtgcagctcgcaaaactagcaggcaacaaggttgttgccacatgtggtggcaaatgtaaagctgcacttctgtcttccttaggagttgatagagttatcaactaccaaaatgaaaagatcaaagatgttctgaaaaaagagtttccaagaggagcagatatcatatatgaatcggttggtggggaaatgtttgacttatgcttgaatgcacttgcagtccatggacgccttattgtaattggtatgatctcccagtatcaaggagagcatggatggaagccacggaactacactggactatgtgataagattcttgctaaaagtcaaactgtggctggttttttcctaatccagtatgctcacttgtggcaagatcatcttgacaaactttttgacctgtatgcctctggaaagctaaaggtttcccttgacccgaagaaattcgtgggtgtagcttctgcgcctgatgcggtagaatatcttcattctggcaagagtgttggcaaggttgttgtgtgcattgatccgtcatacagtcagacccttgctaagctatagtctgtggacatgagatacatcatatttcatcgtctagtcacgaggaagaacagtgcaaaaaagacaattacacaggctatcggcataccgtacaaccttgggcttcttgctccgttttgttgtctgtgtgcgtagctgaaacattcccatatttaccccagccgggagaaaccgaataactgcatatgttgtatagctcagttgtctgagtttgtgggaatagctcaattgaatgttatatataagatcgttccatgctcattgtcaaacttatcttggaaaacaatgctgtgtagaactagaatattttcttctgtggcagggagccctttgtgtatccgtggggatcatctaactatctaagcacacataaggatgtgcttgcaagttgcaatccaggcctgaaaattcttg

SEQ ID NO: 24883 - DNA, 939 bp, Oryza sativa
  ref <308>: DATABASE ACCESSION NUMBER: AK100325
  ref <309>: DATABASE ENTRY DATE: 2002-08-28
ggttctgaactactcagacaagctaggatagccacaatctcgcgtgtgttcagagtgttctagctaacacaggtggtgtcgttcgcctgcggcggcttcaccgtggcgtggggcaccaaccatgtcgtcgtggacgggagagccctgagcatgctcgtcggctcgtggtccgagctcgcgcggtcgggaacgctcgccgccggagcacggcccaaccacgaccgctccgtgttccggccgcgcgccacgccgtcgtacgacgcgtcgctcgacgaggcgttcacgccgctggacggcgacggcgagcgccagatcaacgtcctgacgagcgacgagagcttcgtcggcgtgcgcctgtactacatcgaggcggcggacatcgcccggctacgcgagcaggcgcgggcgacgcgggtacaggcggtgtccgcgtacctgtggaaggccctcgccgcggtggtgggctcgcgcgacgcgcgctgccgcatggtgtggtgggtggacggccgccggcgtctcactctctcctcctcgccggagctccgcgccgcgatgcgcagaacatgctctgctcagtatgtccaaatcatggtgctgcacttctcaaaggttgatcatagctcaggcaatggtaatatgatgcaatgatcctgctatcaagggtctatcttcgatggagaaatcagtctatcttcgatgaataaatcattctcacttgttggacagcatatttatatgtacttttgcttaatgccctattgttgatgtgacttttggatctgtaaaccgttatgtttattttgctttatcctctattaccttgtcagttctttggaactacagatatctttcgttaccatgtccttttgttaagacttgtgttcggactggtatgatattatcgattaatctatggtatttgagttattgttatgtagt

SEQ ID NO: 24884 - DNA, 2864 bp, Oryza sativa
  ref <308>: DATABASE ACCESSION NUMBER: AK100326
  ref <309>: DATABASE ENTRY DATE: 2002-08-28
gaatcacattcttctcttctcatcgacccctccgcctcctctcctctcctttccattttttccccatcgcgccctacttaaccacgcgacgccaaaaaaagaaaaagaggagagagcaaaacaaagcgaaggctccattcattcactccatctcctcgcgtcccctccccgctccccccgccgcaatccgcattcgctaggggttgggttgggagatggcgtcggcggcggcggcggcggcgacggcgagggggccgcggtacgcgccgccagatccgacgctgcccaagccgtggagggggctcatcgacggcaacaccgggtacctctacttctggaacccggagaccaaggccgtgcagtacgaccgccccacggcgccgccgccctcctcccccccggcgcagcagcctccggagaggcctaggaacagcgatcctgctgagtcgcaggcgcaggctggagcgagccgaacgcagaatgctgctcctgctgatgatagggcaaggaatgatcatttgaatgatcatttcgagcggcgcacggaagcggcgggaagtcatgcgcagaacgtgcctttcactgagcaaaatactaggagcaacccttcttcgcagccgtgctctgcagctggagtataccctgcacagaatgtattttcagaggctgccagtggagaccgcacctcaccagaagcgtatcgtgctaagcacgagatcactattgtcggaaatgaggctccagctccattcatgacatttcagtccacaggtttccctccagagattctaagggaggtaagtgcacacaatttacatgactatttaatgcattttcttgtatccttctcgaaagaaattaggaggtcattgtgcgttcatactacgtatgtgataactacgctggatgttcatctcagcaggctcttcaagtcaacaatctatgtcaaggtacagcaagcgggattctctgcaccaactcctatccaagctcaatcatggccaattgctcttaggaatcgtgatattgtagctgtggcgaagacaggttccggaaaaacactgggttatctcattccagggtttatccttcttaagcgccttcaacataattcaagggatggtccaacggtattagtgctttctccaacaagggaattggcaacacaaatccaagatgaagcgaaaaagtttgggagatcgtcaagaatatcgtctgtttgtttatatggaggtgctcctaaaggtcctcagctaagagatctagagcgtggtgcagacattgtggttgcaactcctggaagattgaatgacattttagaaatgcgaagagtgagcctacatcaagtatcttatcttgttcttgatgaggctgaccgcatgcttgatatgggttttgagccacaaataagaaaaattgtgaaacaagtacaacccaaacgacagactcttatgttcactgccacttggccaaaagaggtgaggaaaatagcctcagatttgctgtccaatccagtccaagttaacattgggaacactgatcaactggttgccaataagtcaatcactcagtatgtggatgttatcacacctccggagaaatcgaggcggcttgatcaaatcctaaggtcacaggaacctggatcgaaaatcataatattttgctccacaaagaggatgtgtgatcagctggctcgaaacctagcacggcagtatggtgcttctgctattcatggtgataaatcacaagccgagagggattctgtgttgagtgaatttcgaagtggcagatgccctattcttgttgctactgatgtggctgcccgaggcttggacataaaggatatcagagttgtggtcaactacgatttcccaacaggtgttgaggattacgtccatagaattgggagaacaggacgggctggagcgactggagttgcctatacattcttctgtgatcaggattcaaagtatgcttcagatctcgtgaagattttggagggtgcaaaccagtctgtttcgcaacagttgagagatatggtctcccgtggagggtatggtggaaggtcacggcgctgggcatcttcagatgactcttatggtggtcgaggatatgattcaggctatacttcaaggtcgactgacaactataacagtggttatggcagtcagtctgggaatggttctagctttcatagtagcttccataacagcaacagtggcaatcagtttggcgatacttctggcttccaaaccagctttcataacagcagcagcaacaatcaaaccagtgacaatccaagctttcatgccagcagcaacaacgatcaacctggtgatggtctcagctttcatgccaggttctatagctcttctcgaggcagcgatcagagcagaacaaacaatgctggctttcgtgatagaagtaggagtcctccaagcaatcgcaaccatgaagatcctgggtccaaggctgttggtgtctccaactggtaagtgctaactgcaagatgcaaacagcatcatgatggtgacgaacagagtagatgaagctgttctcttaccaaactatactatcgtgcgtgctccccctgaagcaaaagtgtgtcccagaacttaactaacataggataagactgtggatcttctgctgtgcagatgtagcgcacttgataatgtatgtctggtgttagtcgtttgtcagacctgggggctcggacttccttgctatctatacctgctaccgctatgatcatgtggaaacaaaccatctgaggcatgcattttggacgaaaacatgcactcttaatccttatatgacttgtagattatttaccccagcgtcgtttacattgaactatttcc

SEQ ID NO: 24885 - DNA, 1617 bp, Oryza sativa
  ref <308>: DATABASE ACCESSION NUMBER: AK100327
  ref <309>: DATABASE ENTRY DATE: 2002-08-28
gagtcgcttcgctagctatcgatcgatcggtcgatccaagctgcagacacaatattaattcaattcaattgaattcttcgatcatccatggcgacggcgcagcaggagagcatcagcagcggtggtgacggcaacaataataataataagcaggtggcggtggtggttgttgaggaggcgtcgacgccgtcgtcggccttcaagttcaacgtgcacgcgccggagttcgtgcctgccatgtcgccgacggccagtccgatgtcggcgcccgccggcagcagcagcttctactcccccttcgggctccacgtgcagcccgatcactggagcttcttccatgaccacgagcccgtcttcttcatgcccgacttcaagttcgccgccgccgccgccgccagcgcgcagcccaagcccacctccgccgccgacatgccccacaagatcgtcaagcaggtcgagtaccaattcagcgacattaacctcgtcgccaacgagttcttgctcaagatcatgaacaaagattctgaaggttacgtccccttatccgtgattgcttcttggaagaagatcaagtctcttggagcaaccaatcaaatgctggtcaaggctcttcgcacctccaccaagctgattgtgagtgatgacggcaagaaagtccggcggaggcagccattcacggagaagcacaaggaggagcttcagtcaaggatgatcatagctgagaatttgccagaggactcatcgagaaacagcctggagaaaatcttcggtgtcgttggaagtgtgaagaacataaagatgtgccaccctcaagagcctagcacggcaagagcttccaagtcagacactctagtcagtaacaagatgcatgcactggtggagtacgagagctcgcagcaagctgagaaagcagtggagaagctgaacgacgaacggaactggaggaaaggccttcgggtgcgcaccgtcctcaggcgatcgcccaagtcggtgatgaggctgaagcggacggagttcgacctcaactcggacgacgagcagtcaccgatgtcgtcggacttatcccccacggcgacggcgacggcggcggagttgtcggcggaggcggcgggtcacgatcagggcggggagcagcagatgatgaacagcagcaagaaaggaggagggtgggcgcgagggggccgagggaagctgcaggtggcggcgccgcacagcccgcagtcggcccccgccggcagtgtggggcacttcgagccggcgagccctcgtcacaagctgccggcgagcccccgccacaagtgcccctccagcccacgccagccgcctcctcacgcccacggccccaggatgcccgacggcacccgcggcttcaccatgggccgcggcaagcccctccttgtctagctccgatccagtcacatcacatctctacgtgtacgattgcatacatgccatggatacttcaggccctcgatcgatcttctctcctttcattttctcctcttctcttctcttcttcttcttcttctttctttattttttggattttcacaccccttaaataaagagcaacggactggctgtctgctatatcatattcaaatacttcaaggttat

SEQ ID NO: 24886 - DNA, 4416 bp, Oryza sativa
  ref <308>: DATABASE ACCESSION NUMBER: AK100328
  ref <309>: DATABASE ENTRY DATE: 2002-08-28
gaggttccttttcccctcctttctcttctcccctcctctcgtctcttccctctcctctccatatgttgagttgttgacctccggcggcccttgttgcagatcagggcggctgcgattcgcggcggcggaggcgcaaggaagccactccccatcccccagccccacacgcagcaggtggcagcgtcccgtcttccacttcttcttcattcatctcctgtgaatgtgaatgtgatcctgtcctgctgcttcttccatttccagttccaccccttctctcttgtgcatgcttttgttcgtgcaacacccaacacccaacagggaggggaggggggcgatcgacatggtgcgagcaccggcaggggcagatccaccaccattcctccaaacacgcatggacatggccgcctcctcctcctccttttccctctctcaatctcactctcagtctcagacgcaggcgcacaaggtggaggaggaggagcacgccgccgacccaccctccccatcccgtaacgcctcctccaagtacgacttcgtcaaggtcaaggtgtggcttggcgagaatgccgatcactactacgtcctctccaggttcctcctctgcaggatgctcaccgtcaccaagattcctaatcatgttgccattaagattgccctcgaactcaagaaattgcttgtcgacaacagcctgcttgatgtttctcagagtgacttagaagctaacctattcaagctgatggagaagcggggatacggcgaggattatattaatcggtataaaatgatgaccagattccatcatcaaagagtaccactagtagttttagtgtgtggaactgcttgtacgggaaaatcaacaattgctacgcaactagctggaaggttgaatctaccaaatgttttgcagacagacatggtgtatgagttgctacggacatcaacagatgcccctcttacttcggtgcccgtgtgggctcgggattttgattctcctgaagagcttatcacagagttctgcagagaatgcagagttgttcacaaaggtttggctggtgatttgaagaaggccatgaaagatgggaagccaattatcatcgagggaattcatttggatccaagcatttattttatggacgaggaaaagagagatgataattcaaaaatggagaaaaaggtagctgaatgtgaacagtcaccagcatctgtagagagcaagacagaaaggcaacaagaaaacgaactacatgagaagagaatggatgacagtcaggagtgcatgtctgaggagggaggaataagtgaagggctatcttgtgctaaaagccacgtaattagctcttctgattctgcatattctaaagagaaaaatcccagagctgaagacgaaggacataaggatttggacctacagaaaaacaacaccaccaagaaggacaaacctgctgctgaaccaatagtagtcccaattgtgttgaggatgtctgattttgatcacaaggcattgctagaggaatggacagccaccagggcttccagggataattgtcttcctcaggatcatcgaaagcttataaacaaccttaagcttattcaggactatctttgttcttttgagtcgcaggggttgaccgttgttgacatttcagcgaactcattccctcagacactagattggcttcacagctatcttcttcaggtacctgagaaaagggcatatcctaatgtgctttccttatagcgattgaatcatcgcgagctatttccattaaactatgcattgccaatctatataactttttttttacgaattattcagttgacatgcaccacaatataccaaaacattaaccaaatgataagttctaaaccattatttatctgtaacaggtcttttctcaaactgtcatatatgagtatatgatctgatcaaatttacttgatgaagcttcatgtttttttaaagaaaaatcttataatcttgatttgacaatatactatctagtggtgagttggtccttgattttgttattatttacttgacagtgcatcgaacgtggccttttggctgcatgttcagaaagtcccaagcaaggtgggagctaacggatacagatgagcgagagggaagcccgcattagtcttgcttaacatatactcactctgttccaaaataaaccaacattgtacggatgtgccacatcctaatacatcttggacacaagtactagtatgtgtcacatcgggtttattttgggacagagggagtatgtcacatatatgatgcttgtaaaattgtgcttttagtgggttgataatcaggaacttgtgcgttgccgccatccataaacgttggcagtggaaatgtaaccgagtagagaactccatagttcgataaaaaccttttagagctggaataggaaaaggaaaattaaaaaaaaaagctcaaaaaaggttgacaaccaaagttcagagcgatgtgcatgcgctaaggcccaaacgaaaaatgcaaatataggaggtgtttagatataggggtgtgaagttttggcgtgttacatcagatttatatagggtgtagcatgggtattcggacactaaaaaaaataattacagaatcagttagtaaactgtgagaagaatttattaagcttaattaattcgtcattagtaaatgtttattgtagtatcatattgtgtcaaatcatggagtaattaggcttaagagattcgtttcgcaaattagtcgtaatatgtgcaattagttactctcttcattccaaattgatcactatagttttttttgaggttatttctaaataatctatatatttctgttccttctatgcacacaagtatttataacctacatgcaatattttaatttactattggttaggaaatagtggggatggtgcatgctactattggctaggaaatagtggggatggtgcatgtatcgagtttgttgctagagtaaatatagcattagagttattagattttcttggttttggtgtatctataaaatatgtagatcaatttggaatagagggagtattttttaagcctatatttaatattttatgtatgtgttcaaacgtttaatgtagggtgaaaaattttaaggtgggatcattcacagatgatgctaacgatccatccacaaaagttctgtttctcccagagctagtacatctcgcagaattgagacgagtatgcttaattaattgagagaaaagacgagtataaagaggtcaatctcgggtcatccaacatagaagtatcatcaaactcgatcagcacatcaaggtcgtccaaagtaaaaaaaaaaaaaaaaaaaaaaagaatcaggtagtcgaaagccaaactggcgcaaaataaatgtggcgcaaagtggccccgatgaaagcggagacggttaaagccgacgaaatggccggcactcctgcggcgtcggcttcgctagctagccgttcccccatgtcgctctccgcgacatccggagcttagacttgcggcaatggcggcggccacgcatgtcgctgccctgctttgcgttgcctcgatcgctgccttcccttctccgccccgcaggtaactgaccaaagaagtgtgcagatctggtatatgtgctacagtgttaatttgggattgacctgtggcatcggctggtaaacacaatatcatttccctaccttgatttggtgagtctgtctactcctgattagatcttatcactgtgcttcctgttatttggggtatgaatatgattaggccttgatttgacagcgacagatacacaagttgccgcccaaatcatcaatgcaatgtagtgtgcttcacttggaaaagcttccattgtaccatatgctgtgtgttcttctacgacaaatcagaggagctatagagcaaataatccttctgaccatctcaaacacaggggtcaatcaatcatctaattaggcctctttgttgcaggggatacccaattattggttcctctgaaaatgtccacagggtaacagaacttaagctttaagaccgtcgcgagcacttggttaatgttccagtgttagttccaacctgaaaaggctcatcaactagccaaaatgtgccacaacagccaactattttggcaccacaaaaactacggcattgctacatttttggcacaaaagattggtgaagcgagggaaccatccaaacagacgggaaactgtcagcagaaagaagaattgggcaaagaggttctctacatgatagcgtttgagattaaaataaaaaggaaaaattgtatatagtttagtccacgcaaaaagatgtgaaaatgatctgaatgatagtcaacaaaacttaagctacttatcatattgccgaatcgacaaggccttgaatgaactcatgttttgctcactc

SEQ ID NO: 24887 - DNA, 2137 bp, Oryza sativa
  ref <308>: DATABASE ACCESSION NUMBER: AK100329
  ref <309>: DATABASE ENTRY DATE: 2002-08-28
gattcgtctccctcccccaatttcctcccattccaatcgaacgcctcgtctcctcacctcctcgtcttcctcgatctctcgtcgtcgtcgtcgtcgccatggatccccaccccaccccgttcgcagggaagcggcggtcggttgccgccgcgccggcgaagatagcggcgcccaagcccaagtccatcgcctccacgcgcacgaagacgacgaggaagtctcccccagcacctccaccgccacggccacggcgcgcgttcggcaccgttcgaagcagcaacgcgcatgatgcccccgagaagccgccgccgctgcagaaggctccaaaggtgtcgccgccgccgccgcagaaacctgataaggtgtcaccgccgccagctcagaagccctccaaggtgtcgccaccgccaccgccaccgcagaagtccgcgaaggtttctccgccgcctgcggcgaagcctccgaagctgtcgccgccaaatctggccaaggcgactaagccgtctcgtctggcagcaaagccccctaagaaagccgcgccgggaccggaactggatcccaagcccaggaagaaggcgcagcgggtgagcttccaggaggacgcggcgatgtcggtggcccctggaagcggagagaaggtgaaggtttccaccgatgacgcggctggtcacacgccgatggtggccgtgagagccctggagaagaaagtgagtgtcgtcgcgtccgcggagacgccgttctttagtgcgcagaactgcagcaattgcagtctcgacccgctcgaggagtccacctactggctcgcacatatccacctggccgagtcagttgggaagcacagggttgctgctgcgttctttcagcttgcattcgagtgccaagctcagccaattcacaggatccaaagtgagctaaggaattatacagtgcgccatgagagtgccagcactttaaccactttattcgatgagcttctccttgcccatggtggcatcccagtgaaccaacctaagtttgaaaccgatggttttgaggtggtggatacacctttaactacagatagtgatgacaagaggctcgatagtaccacaactcaagtggatgagagatgctcggaatgtgactgtggtggtgatatcgtcgatgtggcagttcccagtattgtgaaaccacttgaggaaggcatggaccaaccgagttttgagaggaagctgaacgacggttttgaatttgatgattgtgaagctgtcattgtggacaagctggtgggaggacattctgatctagagaagattgttgatgttaatggtcctagcgacagtgaaacaatgcagtcagcatgcagatcctccattgataggttaagcttgaaagggtctccagtagtaagcggattgtctcaaagacagctctcttcagacagtccattagataagttgtctccgtctgcacggagcttgtctgcaaagcgcttatcatctgttagcccgcttgacaaaaagtctccatttggtagcagctcgtcgaagaggctctcatccagttgcccttcttctaagaaatctttctccagtaaagccttgtcatccaagcggatgtcatctggtaatgcttctgctggagtcggtgatcttaacgaagtgattgcagatatggaatttgactgccctgcatcagatgatcagctggaactgaaagaacatggggattctgagatcaactagcttctggagagggacttactacagcggtacaactgcaatgggtgctaatataaatttagatgtaagatttgctcgtctgcgtatgttcggtagtttgaatttctgacttgatcacattgctagtttgcctttggtgtggactcgagcagacatgtgtttgctcacgcgtggtgttttattctcaccagtccaagaacatggttttcagcaaagatcatcgtgctcggatgatctttgtgttcttgacagttgacaggttctgtgtgcttgcttagcatgacaaatgagggttatggtattcttgtttgatttggcaataacttgtaccttcggtatttgaggtcaatgtaatatggatttctttatgattgccagtgaacactgtgaactgttgatgcccgtgcaaattttct

SEQ ID NO: 24888 - DNA, 3067 bp, Oryza sativa
  ref <308>: DATABASE ACCESSION NUMBER: AK100330
  ref <309>: DATABASE ENTRY DATE: 2002-08-28
aaaaccctccctctcctctcactccggccgcgattctcccgccgccccggcgatggtcccgatctaagcatgtccgacgccgacggcttcggttgcgagcaccgccgaccctccaagcgccgccgcgacgggcccgatcatgccctcctcccggtgtcccgagaggtgctgatgggccaccccgatgaccccgccgccgccgccgccgccgtgggggcggaatcctcctcggcctcgtcatacctcggggttgtggcggccgccgcgtccgcctccgcctccgcggcggggggtttctcctgcggggcccacttcttcgtgcgggccaccgactcgaggaccgtgtcgatgcacgcggcgtggggggacaccgtgggcgccgtgctcgcgcacctcgccgaccgggggtacggccgcgacctccgcctcgtctacgccgggaggcagctcgcgccggagaccgccctcgccgacctccgcctcccgccggactccacgctgcacctcctctcccgcctccgctccaccccctacccggacgcgtggcagctcgcttcctacatcgcctccaccgccgccgccgccaagtccgaccccgcccacaccagctccgccgccaacatcaacgagctcgtcaaggagttcatcctctgcgcgcaccgagccaacatgcggcagcgccatgatcgcgactcccccctcttcgatgcccaacccacgggggaccacgcggcgcagtacctcgagattttccgccaggcgggcgcccccttcgcgctggttcgcctctacgccgctaatccctcctccgcctcccaccatcacgcggagaacgccatcaaatgcttcctcaccatggatccttcggccttgccacccgacgtgctgccggtcatggcgccggtgctgcttgaattttgcgggttgctctctttttctgtgggcaagagggatgaactctatatatcatcccgttctatgcttgcaacagtgctcagcttgccttctgggcttcccccttgcatcaagtcaccttccaagctgatcgagcaggtccttccgtttgctgaagaaatagtgggagtggttatggacgaacttgcatcactggatatgactgtgtcatccaaaaaccttgaagacctctcaaatttctttaaagtgctgcgccagcaggcactccgttgggttcccaatggggggccattgcccaagaatctgtataacagtgagcgtgggcataatgacacgtgggtgtggaagttgcacgaaatgtcaatgaacttattgaacagggtggatgagtgcttgaagaggttggaaatggatctgtccttgtcatcggagaacagaggggtcaatataagtcaatctcgatgggttgcccggtcacatatgctggtcatgctgacacaactagattttatatcgatgatttatgaggatttggcacataacctacggcttgtgttgctggcacacagagatcctctcaatgccctcgtgcgctgttccaagaggaatgagcatctccactggcttgtgaagcataaagacctcctttgctttgaatcaagaaggaatttagtcttgatgatgctacctgagggaaaggatgaatacggggagcttcatgagatgttgattgatcggcaacacttattggacgagtcctttgaatacattatacaggccagacccagtgagcttcgcagtgggctatttatggagtttaagaatgaggaagcgacaggccctggagttctgagggaatggttctgcatggtgtgtcaagctcttttcagcccgcagcaagttctcttctcgccttgtcctagtgatcgacagaggttcttcttgaacggaacatctgctgtggatccactgcacctgaaatacttcatattttcaggacgaataattggattagcattgatgcatagagttcaagtagggatcacattggaccgcacattattcttgcatcttgctgggagaagtattaaattggaagatatttctgctgcagaccatgtcatgtatgcaagctgtaaaagaattttagagatggatgctgctgttgttgatggtcttgaactaacattttcccgagatgttcatgaattagggtctcgaaggactattgagctttgctcaggagggaaggatctccatgtaaatatcaggaacagagagctttatattgaccttcttattaagagtaccttcgtggattccatatcagttcagttaacccatttcgtgcgcggatttagtgacattctagttgatccggaactccagaaagtattttttgagtttttggatctagaagacttcgacggaatgctagggggaagcaacaaaactataaatctggaagattggaaattacatactcaatataacggctacaaagaaaaagatcgccagattatctggttctggaaggctgttgagagcttgtcaattgagcaacagaggcagctgctgttcttttggacttcagttaaatatttaccctcagatggttttggtgggctggcctcaaaactgtacatatataaggtatctgagtcagctgaccgtctcccatcgtcacatacctgcttttaccggctctgcctgcctgcttatccatccttgaaagtgacgagaaaccagctgcagaagatcacacaagagcatgtgagctgtagctttggcacatggtagatgccgcccttatggtaatccaatatggtaaattctgtacatacccaagttagtgtcgatttacctgcctcaattgaagctagaaattaaaagcaataggctatcttttgtttgttttgtacatatttaaagtgttctgggccatttaatctagttaggcataatcagaagagagcaggttcctttcattctccctcttttgaaccaggcttccatttttcatatactttctggagaagtgtggtgggagcatttgcatcgtgctatgctcacaagctctggaagccagttaaggcttaaaccatgtcataaaggtaattgcaacgtgtagtagccatgtggcttggtgtcc

SEQ ID NO: 24889 - DNA, 2650 bp, Oryza sativa
  ref <308>: DATABASE ACCESSION NUMBER: AK100331
  ref <309>: DATABASE ENTRY DATE: 2002-08-28
gaccttaattaatcgattaattaatcaattaatttaattacagcatctgcaactttcgccttcttcccgcagcatcgaagcggaggaggggaaaggaaggcgagagagagagagagagagaggagaggagaggagcgcgttgcgaaggctctcgaatcgagcgcggcaatgcgagagagcggttcttgagcccccgcgattcgattcttccggtgcaaagaatgtacaagatgatgtatcctagctggaatgacatttcagtgtacatatctgagtattggtctgttataattgctacagtcatttttgcatctgttactggtgtgacaatttattatactgtcaatcaattgaacaaaaacatcagcttgagtttgatgaaagctatcagagctagggcaaggaagtacaagaaattgaaagataaggtccctgcctcttcccacatttggagaaaagaacttggctctcgtagtaaaggtctgaaatgctgtgtatgcttgaagtctgtttcatctccgcagtatatggggggagttatccatcagtgtgatatttgtggtgccactgcacatcctagttgctcaggaaatgcgcacaaagattgcaaatgtgtttctatggttggttttgaacatgtcattcatcagtgggctgtacagtggattgacacatcggatcgctctgaggaggattctttctgctgctattgtgatgaatcttgcaatggagctttcctcgcaggttctccaatttggtactgtatgtggtgccaacggctagtgcatgttgattgtcacaacaacctatctatagaaactggtgatatctgtgacttgggccccttgaagcggctaatattgtcacctctttgtgttaaggagctccattggacaggtgcagcaggacttatcagttctataacacatggggctaatgaattggcttccaatgtccgagagaggatcaggagtcgcggtaaaaagtacagaaagggtaccatttctgttgattcagatagctctggtactattgacccgccatctgatattgaaggagattcacaagaaacaaacaatgcagctaaaaggagagaggatcatgccaatggtgaacttcctgaagtacatgaaagctctgaatcagagaatgataaacagctgttgacagaaaacaaaactagcataccgaacggccaacatgaggattcacacgtacacaataatcagaaatatgaaatcgtggatgtgccttctgattctaggccattgctagtgtttattaacaagagaagtggagcacagtgtggtgattcactgagacaacgtttgcagatccttcttaatcctatccaggtttttgagctgggtaaacagcaaggaccagaagttggtttgactttgtttaggaaggtaccccacttcagagttcttgtttgtggtggagatggcaccgttgcttgggtcctggatgccattgagaaacagaagtttgaagctccaccacctgtggccatccttccagctggtactggtaatgatcttgccagggttttgtcttggggtggtggtctcggaattgttgagaaacagggaggtctgttctctgttttaaaagatgtcgagcatgcagcagttactgttcttgatagatggaagatcacaataaaagacaaccaagggaagcttatgtcacaaccaaaatatatgaacaactactttggggttggctgtgatgcaaaggttgctttagatatccacaatctgagggaggaaaaccctgaacgtttttatagtcagtttatgaacaaggtgctttatgcaaaagagggagcaaagaatatgatggataacacatttgattattttccatgggatgtcaagcttgagatagatggatccaaaattaatattcctcagagctacatgggaggagttgacctgtggaagaacgaggatgatgtttctgacaatttccaccctcagtcaatgcatgacaagatgctagaagtagttagcttcactggaatgctgcatcttggaaggctgcaggtagggctttctcgcgcgcagaggttagctcaaggtcatcatataaagatcgagatcaaaactaaaatgcccattcaagtcgatggagagccttggtcgcaggatccatgcaccatagtagtttcacatcactgccaggctttcatgctgaagagagtctccgaagaacctatcggccatgcggcctccataatggccgacgttctggaaaacgccgagaataacggcatcatcacagcgtcgcagaagaggaccctcctccacgaaatagcttctaggcttttgtagggcatacttccacgttgattggaggcttctttctgagcccctgccaaactggacatgatcatttgtacatacaagcatgattgtttttccccactttgattgtgcttgtgtatagtttgtaaattttttgtagagctcgtgagatgagagcataggtgcttagagcactacctggacataactggaaagcagtggctttagagctgagaaatgtgatacccactgcaacccagttgcctggcattctggcacgcttgctaaagcagtgataccactacaccagtttattattattccagatttccagtgct

SEQ ID NO: 24890 - DNA, 5002 bp, Oryza sativa
  ref <308>: DATABASE ACCESSION NUMBER: AK100332
  ref <309>: DATABASE ENTRY DATE: 2002-08-28
gagatgggtcttggaaagactgtgtctgcctgtgcttttctatcatccctatgttgtgaatataagattaacttgccatgtcttgtcttggttcctctttctactatgcccaactggatggctgaatttgcatcatgggcacctcatttaaatgttgtggagtatcatggttctgcacgggcaagatctattattcgtcaatatgagtggcatgagggtgatgcaagccagatgggtaaaatcaagaaatctcataagttcaatgtattgctcactacttatgaaatggtgcttgttgatgctgcatatcttcggtctgtgtcatgggaggttcttatagtcgatgagggtcatcgtctgaagaattctagcagcaaacttttcagtttactcaatacattatcatttcagcatagagttttgctgactggaactccgttacagaataacattggtgaaatgtataacttattgaacttcttacaacctgcttctttcccttctctagcttcatttgaggagaaattcaatgaccttacaacaacagagaaagtggaggagctgaagaaccttgtagctccacatatgcttcgaagactgaaaaaggatgcaatgcaaaatatccctccaaagactgaacgaatggtgcctgttgaattgacatcaatccaggctgaatactaccgtgctatgcttacaaagaactaccaagtattgcgcaatattgggaaaggtggtgctcaccagtcattgttgaacatagtaatgcaacttcggaaagtctgcaatcatccgtatcttattcctggaactgaacctgaatcaggatcaccagagttcttgcatgaaatgcgaataaaggcctcagcaaagttaactttgttgcactctatgcttaaaatcctacacaaggatggtcatcgagttcttattttttctcagatgacaaagcttcttgacatccttgaagattacctgacttgggagtttggtccgaaaacatttgaaagagtggatggttcagtatctgtggcagaacgccaggcagcaattgctcgttttaatcaggacaagagtcgttttgtattcctgctatctacgcggtcatgtgggcttggaattaatttggcaactgcagatactgttatcatatatgattctgatttcaatccacatgctgatatacaggcaatgaacagagcacacagaattggacagtcaaacagacttttagtttacaggcttgtcgtgcgtgctagtgttgaggagcgtatcttgcaccttgcgaagaaaaaattgatgcttgatcaactttttgttaacaaatcagaatcacagaaggaagtggaagatatcattcgctggggaacagaggaactcttcaggaatagcgatgttgcagttaaagataataatgaagcttctggtgctaaaaatgatgtagcagaggttgagtttaagcataaaagaaaaactggtggactaggcgatgtttatgaagacagatgtgctgatggttctgctaaatttatttgggatgaaaatgctatcacaaagcttcttgacagatccaacgttccatcaacagtagctgaaagcactgatggggacttggacaatgatatgcttggcactgtaaagtcaatagattggaacgatgagctgaatgatgaccctggtgccaccgaggacatcccaaatattgataatgatggttgcgagcaggcatctgaagcaaagcaggatgcagctcgtgttgaagaaaatgaatgggataaactcttacgtgtcaggtgctgcactataccatatgggagcagtatcaaactgaggaggaagcatctcttggtcgaggtaagcgtttaaggaaggctgtttcttacagggaaacatttgcaaccattcctaatgaagctttaagcgaggactctgatgaggaggatgaaccaaagcgagaatacactgcagctggactggctttgaaggaaaaatatgaaaaactccgagctagacaaaaggaaaggattgctcagcgccatgtgattaagaattatgctgatgacagacttgaagaattcatgaaactatatgattccagtgcaaatcccttgagaattgtagaagatcccaatcctgtgcagccatctggggctaaacgtctcggtgaatcaactgcagaaatgaagcaatcctcgaagaaaaccaagagatatcctgaaattcctcaagagctttatgccaagcttactggcaatgctgcttcatcaaaacatcacccaaaggcagcagatatctccaattcaggaactccacatcaccttttacctgttcttggcctttgtgctccaaatgctgatcagatgaactcatataaagggtcagtttgtgggccaagcacaaaggagcaaaaaagagctagtggtgaactagccaacaaaccgctgttgactcctgctgttgatcattctagcgaacaaaaacatgatggccaaccaactccttgtaagcctatgtttcctggttcctccgaggagactttgcgaaggctgaataatatcattccagacagttacttccccttccaacctattcctcctatatccgggaaggggattggtgatcatgtagaaaatcctgtatcgtccattccttcatttcaagggaaactgggtcttcctaattttagtctggaagacagtattccacttaagcatttgaagtcagtaccggatctatttcccaacttgtctttgggcactagcaatgaatatcttcgtaattgtgtcccagaattgccaaatagttcatttctaccaagctttatggcagatattgctggaacttcaaagcagaagaacaagttcatggcagatatgtctggccttcttccaggtttggcaatcaacccagttcaacaaatccattcgtccatgcctgaaaatcataagaaggtcttggacaaattaatgatgcgtgctcagtactcctcaagcaagttcttgaagaatgcctcaaataaattcctgaagaagagtttaaaaccagactattggtcagaagatgaactcgatgctttgtggattggggttcgcaggcatggaagaggaaattgggaggccatgcttagagatccaaagctgaagtttttgagccaccgatctcatgaagagctggcctcaagatggattttggaggagcagaaaattatagaggaaccaatgcctacagccaccagaagctccaactctacatcatttcctggcatatcggatgcaatgatgtctcgggcacttaatggaagtagcttttccaaactgaggatggagccgccaaagttgcagtcccacctaactgacattcagttaggttgcaatgatataccaaccagattttctcatgttgagcccactaattacatgaatttaagtgagggtggtccatcactgacaccgtggcaggatttcaaaaatagatcaggacacagtggagattttcctggcccacttgacaagtgggagaaacctgatatggggttgatcccaccatttatgccgaatccttttatgaaggaaagcattgggtcactgcccataaacagacacagcagtaattccattcagcagaatgaagttggatcaagttctcatgagagcatacttcatggtttttcggacggacaggccaaattattccatgagatgcaacggcgtgtgaagttagggaaattacccattgagatgaatctgaatcacacaaagctgtcagatcctctagctgagaactctggtgattttgaaagttcaaaaccgaacaagctaccgcactggcttcaggaggctgtgcgtgcacctccatccaagccacctgaatgtgagctaccagcaactgtttcagctattgctcagtctgtgtgcctactacttggagagcaaaaaccagcaatacctccattcccgattccaggacctcgtctctctctccccaaggacccaaggagtgctccaaagaagaggagagttcacaaagttcagcaagcttcctccctggtagatcattccaaaactacagttgggcaaggtgaccacaactctactccgtcagcaccactatccatggaagccgcacctgcctctcctgcagttattaaaagcagtgataccccctcgctcaacttgaactcaccatcttcatcatcagctggcagtcgggggcagaatgcgtcaaccccttccacttttgaagaaccagaaagaaccatggaagtttcagaacctgcttctgtcgctgctgccacttgcccgtccaggccagagcctcctgagactggtactcacagaatcgagttctccgcggtagatgacatggatactggatcttgtagatcacctgtgagggatactcctgaccctgacaatcagaagagcgaattgtctggatcaggtaatacacctactgaactttctgtattaccgttggttgatgcacctgggacgagcagcgaacctgctgtagtgcccgtatccagcgacgaggagtcaacccaagagggtgtaccaggcaaagccgtaagcaccggcgaccaggagaaacggacgccccctgatgagagcgaaaattcaggtgcggcaaatccagtttcggcagctcagacagctgacgaagataaggtggacgagatgatcacagatgagcattagaacttttgagcaatgagctcaaatgcttatttttcttccatttagcgctgggattttccctttcccaatggtttccagtgtgtggaggtatcaggtacctgccttttgtgtttgtatgcttagcccagaatccagatagagtaaaaatccagggactagtagtttagccctctattccagcgggagcaaactctcgaaagcctctatatacatgaagtgtatattttcagacatggtaccttggacatggacaagtattcatttatttatgcgtgtatgatttagatagtccgtttaccaccctc

SEQ ID NO: 24891 - DNA, 2943 bp, Oryza sativa
  ref <308>: DATABASE ACCESSION NUMBER: AK100333
  ref <309>: DATABASE ENTRY DATE: 2002-08-28
ggctctcgcctcccgcatcgcatctccatcatctccccatcctcctctctactcgtgtcttccattcctccatccctcgcgcgcatctccgacgagctctctactccctcctccgccgccgacgatgattcacctccactccccgccgacggcgcccgccgcattcggcggcgccggctcggcggactggcggcggcggcggcggtggtcatggtcgtcgtcgtcccgcgctccggtggctaaaggtggccatcttcgtccgtgcgtttggcggcgcggcggcgacgacggcggcggcgaggatcatcacgccgacagcggcggcggcggcggaggaggagcggcgtggagggcgcgggccaccaccgccggcgtgtcgagctccagcagtacagccaaagggctgcaagccaacatcatcgaacatgagaccccccggatcacgaaatggcccaatgaatcacgcgacctcgacgatcaccaacaaaacaacgaggctgatgaggaggcagatgatgagctgcagccactggtcgagcaggtgaggtcgatgctgtcgtccatggaggacggcgcgatcaccgcgtcggcgtacgacacggcgtgggtggcgctggtgccgcggctggacggcgagggcggcacgcagttcccggccgccgtgcggtggatcgtcggcagccagctcgccgacgggtcgtggggcgacgaggcgctcttctccgcctacgaccgcgtcatcaacaccctcgcctgcgtcgtcgccctcaccagatggtccctccaccatgaccagtgcaagcaagggcttcagtttctgaatctgaacttgtggaggttagcagaggaggagccggatacgatgccgattgggtttgagattgcattcccttctcttgtggaggcagctaggggtttgggtattgatttcccatatgatcaccctgctctcaagggcatttatgcaaacagagaactcaagcttaagaggattccaaaggacatgatgcatatagtcccaacttcaattctgcatagccttgaagggatgcctgggctggattggcagaggcttctgaagctccaatgcagtgatggatccttcttgttctccccttcagctactgcttatgctctcatgcagaccggtgacaagaaatgcttcgcgtacatcgacaggatcattaagaaattcgacggtggcgttccgaacgtttacccggtcgatctttttgagcacatatgggttgtcgatcggttggagcgtcttgggatatcgcggtacttccaacgagagattgaacagaacatggactatgtcaacaggcactggactgaagatgggatttgctgggctaggaactccaatgtaaaagaagtggatgacaccgctatggctttccgtctactacgcctccatggatacaatgtatcaccaagtgtgttcaagaattttgagaaggatggggagttcttctgttttgtggggcaatcaactcaagcagtcactgggatgtataacctgaacagagcatctcagataagttttccaggagaagacattttgcagcgtgcaaggaatttctcatatgagttccttagagaaagagaagcccaggggacacttcatgataaatggatcatctccaaggacctaccaggagaggtacaatacacactagattttccttggtatgcgagcttgccacgcgtcgaggcaagaacatacataggtcaatatggtggaaatgatgacgtctggattggaaagacactctacaggatgccaattgtgaataacgctacatatctcgagttggcgaaacaggatttcaaccgttgtcaagctctacatcagcatgagttgcagggtctacaaaagtggttcattgagaatggcctggaagcttttgggatgacacctgaagatgttttgagagcttattttttggctgccgcgtgcattttcgaaccaaaccgtgcctctgagcgacttgcatgggctagagtgtcagtgctggccaacactatttctaggcatttttacagcgatatgtcaagcatgaaaaggatggagcgtttcatgtggagcagcctctatgaagaaaatggcaatgttttggggctagaaggatatgcaaaagatggaatccttgcgaggacactttgtcaacttatagatttgttgtctcaagagacaccgccagttcgagaaggtcaaaagtgtattcataatctcataagatgtgcttggattgaatggatgatgcaacaaatcaatatgaaggatggcagatatgacaaaggcagagttatgcatccagggtcatgcactgttcataataaagaaacatgtttacttattgctcaaattgttgaaatttgtgctggacgaattgaggaggcagcatctatgataaataacaccgaaggttcttggtttattcaacttgcttcctctatttgcgattctcttcatgccaagatgttactttcacaggataccaagaaaaatgagacaacaataaatcaaattgacaaggaaattgagttgggtatgcaagaacttgctcaatatcttcttccaagagttgatgatagaagaattaacaacaaaaccaagcagaccttcttgagcattgtgaaaagctgttactatgctgccaattgctcaccacatatgcttgaccaacacatttctgaagtgatttttgagcaagttatttgaaataaagtttaggcaaatagagcatttgtcagattgaatcgcatgtaaatatttctgtgcagaaaaaatatgtaaagaatgagagagaacaagcatataaacaatagtattattgttgaaagctaacaatttttacatcaagtgaatgatgtatctctgtatggttctacatgtgggacacattttctataaattatttattttgggtttgttct

SEQ ID NO: 24892 - DNA, 2910 bp, Oryza sativa
  ref <308>: DATABASE ACCESSION NUMBER: AK100334
  ref <309>: DATABASE ENTRY DATE: 2002-08-28
ttgaggcttgaggagccaagaggaagaggagagcaatgggggaagctgccggcgaccgcgtcctgagccgcctccacagcgtcagggagcgcatcggcgactccctctccgcccaccccaatgagctcgtcgccgtcttcaccaggctggttaacctcggaaagggaatgcttcaggcccaccagatcattgctgagtacaacaacgcaatctctgaggctgatcgtgagaagctgaaggacggtgcttttgaggatgtcctgaggagtgcacaggaggggattgttatctccccatgggttgcccttgccatccgcccgaggcccggtgtctgggagtatgtgagggtcaatgtgagcgagctcgctgttgagttgctgacagtccccgagtacttgcagttcaaggaacagcttgtggaagaaggcaccaacaacaactttgtgcttgagctggatttcgagccattcaatgcctccttccctcgtccttctctgtcgaagtccattggcaatggtgtgcagttcctcaacaggcatctgtcatcgaagctcttccatgacaaggagagcatgtacccactgctcaacttccttcgtgcacacaactacaagggcatgaccatgatgttgaatgacagaatccgcagtctcagtgctctccaaggtgctctgaggaaggctgaggagcatctttctggtctttcagcagacaccccttactcagaattccaccacaggttccaggaacttggtctggagaagggttggggtgactgtgccaagcgttcccaggagaccattcacctccttttggaccttcttgaggcccctgatccgtccaccctcgagaagttccttggaacaatcccaatggtgttcaatgttgtcattatgtccccacacggttacttcgcgcaagccaatgtcttgggttaccctgacactggagggcaggttgtctacattttggaccaagtccgtgctatggagaatgagatgcttctgaggatcaagcagcaaggtctcaatattacaccacgcatccttattgtcaccaggttgctccctgatgcaactggcaccacctgcggtcagcgtcttgagaaggtccttggcaccgagcacacccacatcctacgtgtgcctttcagaactgaaaatggaattgttcgcaagtggatctcacgttttgaagtctggccgtacctggaaacattcactgatgatgtcgcgcacgaaattgctggagagctccaggccaatcctgacttgatcatcggaaactacagtgacggaaaccttgttgcatgcttgcttgcacacaagatgggtgttacccattgtaccattgcccatgcgcttgagaaaaccaagtaccccaactctgacctctactggaagaagtttgaggatcactaccacttctcatgccagttcacaactgacttgattgcgatgaaccacgctgacttcatcatcaccagtaccttccaagagattgccggaaacaaggacactgttggtcagtatgagtctcacatggcattcaccatgcctggtctgtaccgtgttgtccacggtattgatgtttttgacccgaagtttaacattgtctcgcctggtgcggacatgtccatctacttcccttactctgagtctcgtaagaggctcacctccctccacccagagattgaggagttgctctacagcgaagttgacaacaacgagcacaagtttatgctgaaggacaggaacaagccaatcatcttctccatggctcgtcttgaccgtgtcaagaacttgactggtctggttgagctgtatggtcgcaaccctcgcctgcaagagctggttaaccttgtggttgtctgtggtgaccatggcaacccatctaaggacaaggaggagcaggctgagttcaagaagatgtttgaccttattgagcaatacaacttgaatggccacatccgctggatctccgcgcagatgaaccgtgtccgcaacggtgagctctaccgttacatctgcgacaccaagggtgcttttgtgcagcccgctttctacgaggcattcggtctcactgttgttgagtccatgacctgtggtctcccgacattcgcaaccgcctatggtggtccagctgagatcatcgtgaacggagtgtctggcttccacattgacccataccagggtgacaaggcctcggcgctgctcgttgagttctttgagaagtgccaggaagaccccagccactggaccaagatctcgcagggcggtcttcagcgtatcgaggagaaatacacctggaagctctactctgagaggctgatgaccctcaccggcgtctacggattctggaagtacgtctcgaacctggagaggcgtgaaacccgccgctaccttgagatgctgtatgccctcaagtaccgcaccatggctagcaccgtcccgttggccgtcgagggcgagccgtcgaacaagtgagctggccaacatctcaggctgagactctgaaagaggagagcattggagtttctttgctttgtttccattctctggtttcagagatgaaaagagaagagagatatttcaggatgctttgcattcctaggcactgctctttttccttaagaaagtaaggtcgattgaatttgggagttttctagtttgatttagttgggggtgagttcagtggaatgtggtgtgtggttggtgctctgtctcctcttgttattgggatgttacctatgaataatagaaacggccttggtgccgtttctgcaataatatattgtagcatccttgtttccaagaaaaaattgtcactgaaatgctcacttctccttggggttatcttactgtttatttatgtttcaccaatcgaaatccttactgtgcatctttgact

SEQ ID NO: 24893 - DNA, 1403 bp, Oryza sativa
  ref <308>: DATABASE ACCESSION NUMBER: AK100335
  ref <309>: DATABASE ENTRY DATE: 2002-08-28
ggagcttttctcctcttcaaattcccattccgttgatgagcctctaccttctcagtatcaatttagagcattccttggtgcaagatccatcatgctcgacgacgtcgacgacgagcctttcgccgatggcatctcgagcccgatagcgcagcacatctatgacttctgcgacgacggcaacggcggcgacctcttcgcggcggtgaacgcggcggcggcggcagggtcggacatgttcacggcctcctcggaggacgcgtccgcctcgtcgtcgtcgacggccaccgcgcccatcgccggcggcggcgacaccctgtcgccgccgctgccgtcgctggactccacgctctcggctctcctcgagcaagacgagccgcccggcgccggcggcggcggaagcatggtgatgtcgatgatgggaatggacgagatcggcgagtaccagcggatgatggaatgcggcggcgcgcttctcggcgccacccacgccgccgacggcgccgacatggccttcggcaacgccgccgccgcagagttgcagatgggcggaggcgggagtagcccagcgcggctgccggcgacggggacgacggagacgacgagcttggaggacacgagcttcaagaccgtccgcctctccaacgaggagaggaaggaaaagatccacaggtacatcaagaagaggaacgagaggaatttcagcaagaagatcaagtacgcttgcagaaaaaccctcgcggatagccggcctcgcgtccgtggtaggttcgccaagaacgacgactactgcgaggcatccaggtcgatcggctcgcagaatcacgaagagtatgaacaaattggcggcgtgaagggagaagacatgcttgattctgacgctctagcgcatatcagcgggatgagctcatacatgtacaatcacacagtggaatcctggatataaactcatacgacacagcactgagaaactctctcgaattgctttttctttttttttccaccctattttgtgcagatttaaccggtcctttacttcaaacctctgaataattttgtagaaatttgatgtatgttgatcagctggagttgctgtagggtcggtctgttgtcatatcaatctgcttttcacttgtttgtcattcttgcaggtgaatgaaatagatagagttaatttgcataatttgtatagatacaaatgtcgtgtgtacttaacgatgttagaaggcattttgaaatgcctagtatgttttgaggtggtcctggaaacggttgagaaaattggagcagggaaaatcaatatagatttaggcctttagcaatctgagggtgtaaaggaaaaggatatatttgcaaatgtttgacggtataatacctctatatgaatatattatactattgacttt

SEQ ID NO: 24894 - DNA, 3066 bp, Oryza sativa
  ref <308>: DATABASE ACCESSION NUMBER: AK100336
  ref <309>: DATABASE ENTRY DATE: 2002-08-28
gggagagagagagagagagagagagagaggcattagctcatggaggaggaggggaggaggagctccatttccccttttgttcccctgcgcattccaagaagagagcaatctttctctctcccctggtttgtctggaatgatggcggagagcaagcggttcgatacacagagcccaggctgccttgaaggcctgttcaacttccttgccctgaaccagcggttgcaaatgccgaaggcgattgcgtaccgaaagcacaatgaaggaagtagtaatacacttagagtaaaagttccaaagcccaaaaaccgctcggagaacgatgagtctgttccgaaggggactaattctccaaaggcaaaggtcggcacatttatatggaggacactaatgttcaagaagaaaacactcaagaaagatcaaaagaagagcgactcaccagccaactccccatcatcatcacgtttgacacgctctagatcaattcatcattcaaaatgctttgaatatgtggttccagatgagctggcttctcaataccataccatgattgaatcaagctccaatgaggtggattcatttcacagtgcaccaccgttggtgcaggagagtcctaaagttcccaattttcaagagtcatgcaaatcttctggtgccaaacatagtttcaatgcagaagcaccctgtgaaactgtacctcagagcagtaatgatgaaactgaagccgcctctaagcagaagagtcgtgatgctgcaacacatcactcgaaggagttcatggatttccttgaactgttcaatgcgcacagggagctatttctcaaaattcttcatgatccttcattattagtaccattggaaaaccaagatcaagaagcttcctccagcggtgcagtgccactgaacaaatcagattcgttcccaaggccaggaggatcatcagggaaacgtaaccctatatttgatcggaatgacagtgagaacaatagaaggtcagaaatccaaaagtcaccgtctaggttgaaatctgacattgaaactgctaaagttattggtacaagaatgcctgatggtgttgaaggctcatcggtttcactcacagaatcaaaaagcctgaggaaatctggaaccacttcaaatcgttttaaagttattcgtaaaaagattaaagctgctgtaaaggagaaccggaaagagcttgctcggattaccaaggatggagtttttcataaactgccatatggacaaaagatggctgggttcatgaagagtccctccacagacaagtatgtccaggaggagaaacaaatgcgaaaatcatactccattgcagaatcaatagacaagtattcaacactctatgaatcaatatcaagggaccccaagatttctccagaaagaccaagtacaatgtttgaaggtgatgcaaagttgaaagacaagaagccaccaccttctatgaaaagaatagcttctcttccagaaatgagattatattcacctcagcgagatgttttatctgaagtttcagattcccagattgtgcccaagactcacgatctggaatctggttgcttctcttcacaacaaactgatcccttcagcatctgtacagacggaagtttctaccctgacgatattacagaaagaacagcagatatttacagcgaacataattatggagaaagtgctttacttggctcactggaagaggatttgcgcagtatacttcgaagtccaagtttaccttctgtggctcaatctttctcccatcgccgcatcaatagtttaccttcttttgatcgttctttcttccaagatcgtgtcactaatgttaccgagcattctatagcagattcagagccgacgtttgaacatatgcagcttgaggatgatgactggttggtgaagccacctcatcctccaggaccatatgatgctagtttgaaggatgatgagtggttggttaggccacttaagtcctcaggtgttgacactattgatcatgaggatgaagagtggttggtcagtacatcgcagctgcccggtggcaatgctgctgatttcgaggatgaagagtggctggtcaagccagtgcagtcgtcgagtgccgatgctttggattcagagttccagtttatacatgaatttgctgaagatgcaggttccttgcacatttatgttaatgacaagaatgaagccgatttccattatgtcaaggacatactcaaaaaatccggattcagctgcggggaggccgactggtatgcttccaatcagccactcagcccagtgatatttgaggaagcagaattctcgtgccaggaaacatacaccgcgaatgatgacccccacagtgtcgtcaggcgcatgcttctgttcgatctcatcaacgaggtcctgatggatatctatgattcttccttggtcaccggcccatggcactcgcgcttcgactcgcgtaccaggccgatacccatggggtctcatgtcctaggggaggtgtgggggaaggtgagctacaacctgagcctgcaatggaagccggacctgacagtggaggacgttgtggcgcatgatgtcatgatgaaggacaggtggatgaaccttgtgtatgacgcggagtgtcttgcgctggacctggaggatatggtggtggatgaccttctggatgacattgttcttcagatagtgttgatttccattgacgcgtaatgatgaatgataccatgatcctgaagattttttcccttatcagataggtggctcactgttctagcactgtgttaataaatgagtgcacttcctgggcagatcattataccagaaatgcagacatgacaaatgtagtatagtgtagatattagcagtgcatagatattgctagacatagaaaaagtagaatagacaggaaatagcttagcagatcactgatgagtgtaatatttgacagcaaatctttcaggtatgcttaatttgtacttgtactatatacattcaatttgtaaaaaaaaacataataatatctctatagtcaatattgatatggactctttaactttccgggt

SEQ ID NO: 24895 - DNA, 2693 bp, Oryza sativa
  ref <308>: DATABASE ACCESSION NUMBER: AK100337
  ref <309>: DATABASE ENTRY DATE: 2002-08-28
gagcgaacgtgcgcgcgtgcgtgtgcaacggcggcccaaggcgcaaacgcgaacgcctcaatctttccacttcgttccacctctcctccgtgcaaaatccccagcgcgcacgcctcgtccccctacgtgccgcgggcgtggttgcacgtcgtacgtacgcaggcgtcctcgcgagggcgcgcacgcaggtgcgagctcgtggcgggtgacgaagcggtgaaggcaaggcatcgcggcggctgtttgatccggggcctctttttgctccccgtgatcaggtattcgggtgctatacttaggtctggcaaaagtcagccgggccgcgcgcggtttggccatggctgcggcgccgccgtccgtggcgtcgtcgtcgtcgtcgtccagccccgtcctgtcggccgcgcaccgccgccggctcaacgacgtcgagcgagacgcgttcgactacggcggcccgtgcgacgtcgacgtcgatcatgatgacgacgacggcggcggcggagtgcgccgcgggcacggcgccggcgtggcgggtgtcagggcgctgttctcgtcggccaggaggagcaagagggcgtccgtgattatcgatcaggcatggctgcggaacgtggtcgcgtgcctgctcggcctcaccgtcgtcgccgggctcgtgctgagctcgcaccgagtgagcggcgccggcggcgggaggctcgtgcagaggatggacctcggtgacggcgaagtgatgggctggacggaggagaacttgacggctgttgctcgccagtcacctgacacgccgatgaagatatggatgacgccagatagtgaaggttatggcaaatgcattgaacgcccgaagaaacatgacagaatgaacagtgcaacagctggttatataattgttaatgccaatggtggattgaaccagatgagactgggaataagcgacatggttgcagttgctaagctcatgaatgcaacactagtaatccctactctggatcacaaatcattttggactgatccaagtgatttcaaagatatatttgatgtggaacacttcaagaaaactttagagggtgacatttcgattgtggattccttgccactagcttataaaggattgaaactttatatgagagcacccacttcttgggccaaggtatggaccaatcactcaagtgggcatcaaagttatttagaaaaagacataatatactgcagtcgaagagttatgaactgctagttacttttctgcaggcttcttactacagagctttctcaaggacactgaagaaggccaaagttgtgaaattcacacatacagattcacgaattgttaacaatggtcttcccccatccatccaacgactccgttgtcgggcaaattatgaggcactaagattccacaaagaaattgaagagctgagtactgctctagtagatagactgaggaatggatccaatcattatatcgcacttcacttaaggtatgagaaggacatgctctcatttactggttgcagccacaacctaacacataaagaggcagatgagctgagagaaatgagactcaacgtgcggcactggaaagagaaggaaatcaacagtagggagaggagactccaaggacgctgccctatgactcctcgtgaagtagctcttttcctcaaagctatgggctatccttccagcacaaagatctatattgtagcaggtgaaatatatggtggacatagcatggattcattaaaggctgaatatccaaacatatatacacattatagtctggcaacggtagatgagttagagcctttcaagctataccaaaacagattagctgccttggactataatgtagccgtccaaagtgatgtttttgtgtatacgtatgatggaaatatggctaaagcagtacagggtcacagaagatttgaaggattccaaaaaaccatcaacccagacaggcagaagcttgtgggactcattgacaagcttgatgaaggtacactaacatggaatgagttccaaagtgaagtgaagatacatcatgaaaacagacttgggggtccatatcagaggttatctggtcgaagtcctaggcaagaggagtacttctacgcaaatccccttccaggctgcttgtgcaaaagaatgcaaaggattaaatgacgctgatttgttatgaagaggatgtgatattattgtcttcaaaagttccaaccacttccctgatgtagcatggatatacaaacacaaaatcttctaacaaagaattacactggtaatggacagggacagcccacagataattttcctagattaacagtgtatgcagccatcattcatagaaaaggaagcaggaggggcaggtccatttattatcgtctgagatctgcatctccagttgattatttattcaagtatacaggaaacggaagagtaaaaaagattttaaataccagcaaagcatagatgtgccagaagtgatgggatagcttgaaagaataccttttttagtgcatgtatgtagttcacacttcacacactccatatgtacagtctgtcctctttttatattttgtattcatcccaaaattgcagctttattcagataggcatgtatgatgtatatagagagagcaggatgtacccaagaagaaacaagtgatgaatggtaaattcttttttagtttatttcattc

SEQ ID NO: 24896 - DNA, 4497 bp, Oryza sativa
  ref <308>: DATABASE ACCESSION NUMBER: AK100338
  ref <309>: DATABASE ENTRY DATE: 2002-08-28
gttagatgaggaccagatgacgaaccaacaattaccatttaaaactccataaaatacaaaagggaagggatgatacgtactttgctgaagagatggcagctcctttgttgttatcaacaatcatttcggctctagtggtggtagcatcctctactcgtggtaccatggctaatggtgtattccaggtgcgccgcaaattccatatcgtggacggtgtgtacaaggggagcgacataggtgcattacaaatccatgatgggaaccgccatcgtcgccataaccttatggcttcggagctcccacttggtggcttcagcatcccatacggcactgggtatgctttaatcatctctgcctttggtcatgtctgtgtttgcttggttggttggtgtggttattagggataacaaatggatcttggcatagattatactacgcagatatagggatcgggacacccgccgtgaagtactatgtacaggtggacaccggtagtgaggcattttgggttaacagcatctcctgcaagcaatgccctctcacgagagcgacatattgagaaagctgacattttatgaccccaggagctcagtaagttcaaaagaggtgaaatgtgatgatacaatatgcacttcgcgaccaccatgcaacatgaccttacgttgtccgtacatcgcggcgtactctgatggtggcttaacaatgggcatccttttcactgatcttctgcactatcatcaactgtatgggaatgggcagactcagccaaccagcaccagtgtcacatttgggtgagttattaaagaaatagcactgctacacgtactaagtttttcttactaaatttttactgacaatcatcacaaccgtttgatttagctaaatggaagttataaaaaatctagatgcactcatagcatgacacatcaatgtattacaaccattttcgtacatgaaatttattgatttacaacagaagtgctcgattgtaaaatgccattgataagcaatagttcaacaatatgttttccatacgtgcaatactctttcatttttaccatcacatcatggttaacatcaaattatgtctctagtttttataaaatgaccaaaatatcattgagaacatagttatacccttgacagacttcttttgttttttacacagtgaccaaaacacctttgataactctgttacaccctcgacagactttcgtgagtgcctgttgctgtttatggtgaaatgaactttccattagaggacaacataggccccttaatggttagttcacagcgatggagaaaaggtagaaaaataacatgtatggtggcataacatataactcatatttataagatcgaaacacaataaccaaacctaccagagagtggtgaatggtacatacaccaaaaaccaaaatggaataaaaataatcctctaaccttacagagtccacgatgaagtctagttgactaacttgtgtgcaccggtctgaccactctagtcctgtcggtctgaccggtgtagagtcaccggtccaatcgccttgcttctcccttcgcctgacactgccggtccaaccatctaaaagttgcctgtgtcaccgctgtggcgccgccagtcagaccgcaaggatgctactagtctaactaccgaaacaaagaaaaacacaaatcaaacaattttttagaagtaaatcaactttattgcttctaattgtgctcacaaagtgtaacagtaacactcatctatcaactttcgactatactcaaaatttaggctaaacccttttttttttcaaaactgttatctcacaaaatggtaccaagaggcctcaacccctcttttttttataccttgaagtggctgcacaaagccacgaattcaacatggataagtaattctaatctcatagaaaacctacccgaacaagtatacaacttatccctttacaaatcaaactccaatcttttcaaatttggactccttccaaatttgactcatatttgttgatggcatttcatagagtcgagtggttgcatgttgatggcattttatagagtcgagcactttcatattgatggcacttacaatattccttttcatacaaaagacatttcattgcactagtacacagtaggcaaacactgccggtctaacggttactatagactagcagtgattaactatatataatgccggttcatgctggcttggatattttttccctaccaacccatgtgtatgggctatgatagacctagcatcactgtcggttcatcaaccggtagtggtaggtgaggccaccactgctggatgacctcttctagttcaaaaactgatagtgatgcatcaactacgaaccgatggtgattggagtttctgtagttgtattgtcttattaaatctgaagcattattttacagcatcacatggcaataattaaaccatacatatattttctgttcactattgtctgtaaggtgggtatgctgtattgattgtcttttattgtagatattcttttcaagaagtcgtactatataagtttgcccacttaggccctgcttgaaattgattattgactgtatttttttatggattatctactttgattatagggatagactaaatattttgagaaatatattcaacagatagcttagaacaagtggaccaataagtatacatgcaatagaggaatgttcaattttagaggcgttgagcaaatccatggctataatccagagaaggagcagaagagacatggcataagttaatgctcctgtgggggggctaccattggatgttgcaccacacaacacactagttctttttcatatgaatggtcctgtggggggctaccattggatgttgcatcacacaacacactagttctttttcaaatgaatggtattttattgcactagcacacatgagctaatcactatcacccatcactacgggttgccatgcatagttccaacaattattgactattaatgccatttcatgccagccgggttgggcatttaccaaatctatatgaattcactatgatagcctgagcatcgctgtcggttcagccaccggtattgatagccgagatcactagtgtcggctggcctctgctggtttagaaattggcgttgatgccggttatgggttttgtgtaaatatatttattttcttttcatgtaaatctctgatgaactcatcacatgacaataattggttatggcggtcataggtatattttgatattttttatgccttgttctccataaggtgggtaggctgtattaattgtgttttatcgtagctgtgctatctaagaatgtgtactatataagttggcccactaaggccatgtttgaaacaaattattactagattatttttgtggattgtctacttgagaaacaatcttaacaaatggcttggaaagtaatctatcctatgcagtagaagaatattttttagcaaacatatttttagggacgtggggcaaatccgtgataataattcgacgaaatggctcccctgtgcttctaggtgtggtttaacaacaaactggaagcttaaacaattcagaactagcgattgatggaattattggttttggcaattcaaatcagacattgctatcacaattggctgcagcagggaagacaaagaaaatattttctcattgccttgattccacaaatggtggtggaatttttgctataggagaagtggtggagccaaaagtaaaaacaacacctatagtaaagaataagtgagttaaccatgtacttctctgctattaattattatgtttcttttatggtcacaatttaatttggatctactttaaatacatataattttaccctggttatagcttcttctggtatacttgtttaagaagcatttatcaaccccctaaaatatgatgcatttatccacttaaacatgaactgtgtcaagtggtacatctctggtacaaacattgtgaaaaaaaattatgtgttattgttcttgagtgttctttttaggcgcaatgtttcaaagttttgaatgcacagagctatgtgaaaatttatgttggctgtcttcaacatggactgaagggtgctgttaggctggaatcgctagaaccttaaactataattttaaaaaaaacctatttatatactttagtacatgatcttggctctccaccagtccctgttggatgttgggtttatgacaagtagggatatatgcatataatatcaatttgtattgtagtgcacgtatgccttcttacatgttgtaaccttttgagaatacatgtctttctgcgtgtaacccaggctcgtgattccaacacaaagatcataaccaaccttgtttggttctattgttgtttccaccaaactaatgctatagtatccattttgaatctgtataataatcactagacccaaagcatggatttacaaatttgtgggaatatgtatagtttttat

SEQ ID NO: 24897 - DNA, 2160 bp, Oryza sativa
  ref <308>: DATABASE ACCESSION NUMBER: AK100339
  ref <309>: DATABASE ENTRY DATE: 2002-08-28
gacgtgtcaccctcttccctttggccctgttgcccccaattcgccttcgaccccttctccttctccttcaacatctaatcatcacggagaaaggataaggggtgggttcacaaattttttcaattgtgttcttatttattagaggtaattaagtaattattattagaggtacaaattaaggtctctgagagagaggggccggggtgggccctagctaggtaatggcagcctcgccggagtcgtctccgtcgtcggccaactccaccaccccgtcagcaccgtcgccgtcttcgtcgttgtcaaaatcaccctcacctccctccccatcatcgccgccgccaccagcatcgacgaacgcgccaccaaaatcagctggcggcgtttcatcttccacgcaagcgcaaccatcgtcggaatcatcgtcggagtctacgactacgccttcggcgccagcggagaggaagagcggcgggtcctctcgaggagagtccgggcggtatcgcggtgatgtgaccgccggcgtgtttgtggggttatttgtggtggcgatggttgcggtgttggcgggtgtggtggccatcgtggtgtgctgctgtataaagataacgaagaagaagaagcggccgccgccgccgaacatgcccttcttcaccgacgagaagggcaacgtgtactacgccacaggcggcctgcctcccatgtggcagcagcacggcagcagcaactacagcatcccacctccgccgccgcccggctggcacatgtcatcgtcggcggggggtttcagcggcgagatggggatggggtactcgtcgggaccgtacggtccggcgctgccgccgccgtcgccgaacgtggcgctgggtttctccaagagctccttctcgtacgaggagctggcggcggcgacgtcggggttctcggcggcgaacctgctggggcagggagggttcgggtacgtgtacaagggggtgctcgccgggaacgggaaggaggtggcggtgaagcagctcaagtccgggagcgggcagggggagcgggagttccaggcggaggtggacatcatcagccgcgtccaccaccgccacctcgtgtctctggtgggatactgcatcgccgccaaccagcgcatgctcgtctacgagttcgtccccaacggcaccctcgagcaccacctctatagaggcggcaatggcgatcgagttctagactggtcggcgcggcacaggatcgcgctggggtcggccaagggtctcgcctacctccacgaagactgccacccgcggatcatccaccgcgacatcaaggcggccaacatcctcctggacgccaactacgaggccatggtcgccgacttcggcctcgccaagctcaccaccgacaccaacacccacgtctccacccgcgtcatgggcaccttcggctacctggcccccgagtacgcctccaccggcaagctcaccgagaagtccgacgtcttctccttcggcgtcatgctgctggagctcctcaccgggcggcggcccgtcgacacctccaactacatggaggacagcctcgtggactgggcgaggccggtgctggcgcgcttgctggtcgccggcggcgaggaaggaggattaatccgggagctggtggactcgcggctgggcggggagtactcggcggtggaggtggagaggatggcggcgtgcgcggcggcgagcatccggcactcggcgcggcagcggcccaagatgagccagatcgtgagggcgctggagggggacgcctcgctctcgctggaccaccaccacgacgacgacttctccgcctcatcggagatctcgcggcatcggcaggtggccttcgacagcggcgactacaccgacgactactccaccacctccacctccacccactcctcccgcctcccacccaagcgctaatcatcactaattcttttatttatcgatttaaattataattagctggtttcacaaatcaccctacactcgtggagaaaccatctttactcccggttggatatccatttaatcccggttttccaaccgggagtaaggatccgggactaaccgggactaaagatgtatccttagccaccaaccaggactaaaaagaagggatcaaccgggactaaacagacaatagcggtagtgc

SEQ ID NO: 24898 - DNA, 2159 bp, Oryza sativa
  ref <308>: DATABASE ACCESSION NUMBER: AK100340
  ref <309>: DATABASE ENTRY DATE: 2002-08-28
accaccgcaagtcccgcaccttcctcctcgtcaccgtcctcttcggcgcctccctcgtcatcggcgacggcgtcctcacgccgcccatgtccgtgctgtcgtccttctctgggctgcaagtgcactcgaccgcgctgacgagcggggaggtggagatcctgtcgtgcacggtgctggtgtgcctgttcatggtgcagcactggggcacgcacagggtggcgttcctgttcgcgccggtggtcatcgtctggctcctcctcctcggggcgctcggcgtctacaacatcgtggtgtggaaccccagggtgctgcgcgccctctccccttactacctcgtcaggttcttccagcacaccggcaaggacggctggatctccctcgggggaattctcctctccatgacagggaccgaagccatgtatgcggatcttggccacttcacagctgcatccataagggttgcgttcgtggggctcatctacccgtgcttggtgctgcagtacatggggcaggcggccgtcctgtccaaatcaccccactgcgacatccacttcgtattcttcgagtccattccaacgggcatcttctggccggtgctggtgatcgcgacgctggcggcgatcgtgggcagccaggcggtgatatcggcgaccttctccatcgtgcggcagtgcacggcgctgggctgcttcccgcgcgtgaagatcgtgcacacgtcgcggcggatccacgggcagatctacagcccggagatcaactggatcctgatgctgctgtgcatcgccgtcaccatggggctccgcgacaccaccctcatcggcaacgcctacgggatggcgtgcgcgggggtgatgctggtcaccacgctgctcatggcgctcgtcatcgtcttcgtctggcagtacagctgcctggtggcggcgctcttcctggtggcgttcggcgtcgtcgaggcggtgtacctgtcggcggcgctgatgaaggtgccccagggcgggtggctgccgctggtgctgtcgctggtgttcgtcgccgtcatgtacgtgtggcactacggcacgcggcggaagcaccagttcgacgtgcagaacaaggtgtcgctcaggtggatccacgcgctcggccccagcctgggcatcgtgcgcgtcccggggatcggcatcatctactccgagctggccaccggcgtgccggccatcttctcgcacttcgtcaccaacctgccggcgttccaccaggtgctcgtcttcatctgcgtcaaggccgtgccggtgccgcacgtccgcgacgaggagcgccacctcgtcggccgcatcggcccgcgggagttccgcatgtaccgctgcgtcgttcggcacggctacaaggacgtgctcgccgaggacaccgacttcgagaacgacctcgtgctgcggatcgccgagttcgtgcagatggaggccgacttcgaccagcgctgcagcatcagcgacgatggggtcgtcgcctccgtggaggtggagggccgcatggccgtggtcccgcggcccagcgaccttgccaggacggggctcctcatgcgggagcccggcgaggaggagagcgtggtggcgcgcgccgccgcggccgccaagccggagtcgctcatccactcgatgcacacgatgcacgaggcggagtcgccggggttcgcgagccggcggcgcgtgcggttcgaggtggcgaaccagcacacggaccccagggtgaaggaggagctgagcgcgctggtggaggccaagcacgccggcgtcgcctacatcatgggccactcgtacatcaaggcgaggaagagctcgtcggtgttcaagaagttcgccgtcaacgtcgcctacgctttcctccgcaagaattgcagaggccccggcctcgtgctcaacatcccgcacatcagccttatcgaagtcggcatgatctactacgtctagtttagatataaactgcttattacccccaacattttttattttattttatacagtactaggtcgtttattaggcctgcagaacaattaatgcagggcgtgtcatcgacatgtatttagatttaataataacgagcttaataaaccacatatgctaatgctaggcactaggcaggtaaagtgccagtgactctgcaataaagttctttctccatg

SEQ ID NO: 24899 - DNA, 3376 bp, Oryza sativa
  ref <308>: DATABASE ACCESSION NUMBER: AK100341
  ref <309>: DATABASE ENTRY DATE: 2002-08-28
ggttatcttgatttttgcccctttatattcccttaaaattttactgttccagtttcagtgtcttggcaattcatctatctgtgttctttgggtctaatgcacaagtatgaaaattgaaggtgctatgcatctctagaactgtacccttgaaactccagcttatttagtccaggtcataatgagcacctgtgttgtatagtgatgtttactaagatgggttgtgttggaagagccctgtgtatggtgctatttctttattttgtaaagaaacagtgccaattattggtgagaagtgattaggatgtattgctatcttgtagcaactaaattctgctgactttactaattttagcggaaaatgtggtgttattcatgcctacctagtaacattcagtatttcagtaataccaatataagcagtctattgttattagttattgtggtatttgtatagaaactacagttaacagtgggttgtagatattcaccttcagggtgtaggactggcagtatgaatagaataataccaatgtttcacctgcattaaatattatttttgtgttagtttgttctacaaactttacctggcttagtattagatgattcatggttgcatggaggcactttttgcaagacaacagaccaatataaaagctttcatttgtatcttgttgatgatagcttttagccttttacgttctatttgcatgtttcgaacaagtacagaattttccaatacttgtgttgcataaagtgctgtttatagtgccaagtactgcagtaactcgttgtatttggttttcttatttccgtattctttttattgctgattgcattggatatatgttgatgtagtattcaagcaattcgtagagacttgaggcagttggcagctaaatatgcttctgacagaaaggatggaccaaaactgcaagctctgtcaaacgctgcaacaaattgtgcttcatttcctcttgtagatctccaaaagtcactaaaccaagttgctgttcctgttcatggtgtgtacgttgcaaagcctgcgaagccgaatagtccacgaaatattcttattaagctcttccgtgataaagatccagattcgaaattaaccaagcaagaaatccttgattgtgcagcgaatcatctaaagaaaggtctaaatgaaaaagactaccatcaggtgtggagggaatcagttattgtctttaagttttgtcctgttactgcataattctgcctagctggcctcattcaattattttggtgcattgcttttcttgggaggggtctgtcataccagttgtcagttaagtttttttttaaactgtcttcttggggttttcttgaggattttgttaggattacgcatttgtttgcttaaggtttcttagtggttctgtgtgggaggtcaaaagtgaatgtacaggtgctcactctatttagttcttaaaatcgttttttcttcattcttattggtgtcttatgttaggtacgaagaaagaattgccaattctatctttttacgagtggggatgatgtttacaatcttaggcacaaaacccactggaatattgtgtatagtttacacgcttgaaattttgagagagaactattcttagttgaagtgttttgcaaggagcaggttgaatatgatttctcccatcctccatagctttgggaatgggtggtctattgattagtggctcctaaatggcacctcatggtagtaggtggtagcaaattcaccaacttcatggtcccacatgtcagtgggtggtggcagattcaccattcaccaccaccacttgactcttttaaagtagtatagatactgtgaaaaacccagcttttgcaaaaaaataaaaagaagaaaagaagttacccaactacaggaaaaaatattttgttgcatagaatccattatatcatacaactagagcttgtctgtgtgcttaatgatgaaggcacagctccctcactcctacatggcaattctagtaccttttgaggacttttcattctttctttgagtaattgcacaaaaaactaaaatttgcctgtgagctgtcaccatatcttcaaataacagcaatttcctttcatttcttggggttaagtgaaaattctagcaaagacaagtcatgtccgatgttttgtaactatacgagcaattctcatgtagacaatcttttacgatacctaagtaaacctgtaaccgtaagagattgttcaagttctgttaagattgcagtggctacctcgaggattcattttctatctttattctggctgtaatttcatggtaccctgatatttaagccatacatttgaatttgtttatgtggtggaaatccattctttctaaagtagggacattgtttttttattaggctgtcactgaggtctgcatcttgactgaagatgggcacttggtgttgaaaaatggtgatgaaccctgacacttgctacgatgatgaaccttgtaaatgctcaaagtgtttcccattccttgaaattacaggtatgctttgacttttcttttatatattgaggagaatttagttcttagagaaaagcagcatatatgaaaaatgaaatggaggaattacattacctatttaccttatcaagtgaccatctctgtcaaaattgatgaccgttacatctaaacgtcctccctctattatcaggtgccatttgctggtagatgctaggttagtttttctattgactattttgagctgaatttctgttgattggtcaatgatgattcaaaacagaaatatttactatagcttttagggaatcgttttaatcactgtgtttgtcagctcactcgtgagttctgttaccacctattgaccttattataaaatttcatttgttattattgccaatctaataagcgatttactcctttattttgtttattccaacagtttttgaagttcttcagagttacggaaatcagtacataagcatctgagatttaggtttattgcaagttcacaacatctaggccagactccaggaatggttagcattgactgcatgtttccagattttcgttccctgggaactatataccgtcagaaggcttaacgttgagactgcatgtgacatgtagttgcagaatggatgcctgctgccgttgttagaatgatattttgttagtgttaattgggaatgtgtatccaatccaagttccttctgccctcctaatcaagggggcaatttgcagagctgccatattacgacttagcaaataggagtatattttctggaacacccgtcaattgtttttctctgaaatgattgtgttctacttttgaaaactgtttagtttgttgttgctaagtcatgtatacatgtc

SEQ ID NO: 24900 - DNA, 4432 bp, Oryza sativa
  ref <308>: DATABASE ACCESSION NUMBER: AK100342
  ref <309>: DATABASE ENTRY DATE: 2002-08-28
ggcacgcacatgctgcgcccccactccagtggaggagtactccactaggcggccactcctgttgacgccgagtataaacaaaacccaaaagcggcgagagcaaccaaagcccaagtttgtggggggcaatagctcccgtcgtctctcgccgtctcgtcacacgaggaggaagaggtcgatcgatcgatcgagatggggtcagaggcggcggcggcgaggccggtggtggtgacggtgaacggggagaggtacgaggcggtgggggtcgacccgtcgacgacgctgctcgagttcctccgcacgcggacccccgtccggggccccaagctcggctgcggcgaaggtggatgcggcgcatgcgtggtcgtcgtttccaagtacgacgccgtcgccgacgaggtgaccgagttctcggcgagctcctgcctgacgctgctcggcagcctgcaccactgcgcggtcaccaccagcgagggcatcggcaactccagggatggcttccacgccgtgcagcggcggctctccggcttccacgcctcgcagtgcggcttctgcaccccgggcatgtgcatgtccatctactccgcgctcgccaaggccgacaggtgctcgtcccgtccctcgccgccgccggggttctccaagctcaccgccgctgaggccgagaaggccgtctccggcaacctgtgccgctgcaccggctacaggcccatcgtcgacgcgtgcaagagcttcgccgccgacgtcgacctcgaggaccttggcctcaacgccttctggaagaaaggcgccgacgacgagcgcgctgacgtcggcaagctgcctgcatactctggtggcgccgccgtctgtacgttcccggagttcctcaagtcggagataaggtcatccatgggtcaagcgaatggtggcgctccggcggtggcggtcaccggagacggctggttccaccccaagagcgtcgaggagttccacaggttgtttgactctaacctgttcgacgaaaggtctgtgaagattgtggcatcgaacaccggctccggagtgtacaaggatcaagacctccatgacaagtacatcaacatctcgcagattctggaactctcagccatcaatagaagcagcaagggcgtcgagatcggagctgtcgtgtctatctccaaagccattgagatattgtcggatggaggcgcagtgttcagaaagattgccgatcacctgagcaaagtggcctcgtcgttcgtccagaacacggcgaccattggaggcaacatcatcatggcgcagaggctgtctttcccgtcggacatcgcaacggttcttctcgctgcaggatcaactgtcaccatccaggtggccgccaagaggatgtgcatcactctggaggagttcttgaagcagcctccatgtgattccaggacgttgttggtcagcatctctatcccggattggggttcagatgatggcatcacctttgagtcgtttcgtgcggctcctcgtccacttggcaatgctgtgtcatatgttaattctgcattcttggcaagaagttcagtggatggatcatcagggagccatctcattgaggatgtttgcttggcatttggcgccttcggggccgaacacgccatcagagctagggaggttgaggagttcttgaagggaaaattggttagtgcaccagtgatacttgaagcagttcggcttcttaaaggtgttgtttcaccagctgaaggcacaacacatcctgaatacagagtcagcttggccgtcagttatctgttcagattcctgacttcccttgctaatggcttggatgagcctgaaaatgctaatgttcccaatggttcatgtactaatggaaccgcaaacggtagcgctaattcctctccggagaagcactcaaatgttgacagctctgatttgccaataaaatcaaggcaagagatggttttctctgatgaatacaaacctgttggaaagccgatcgagaaaaccggagcagagctccaagcttctggagaggcagtgtatgttgatgacatccctgctccgaaggattgcctctatggagcatttatctatagcacacaccctcacgctcacataaaagatataaacttcagatcatctttggcttcacagaaggtcatcacagttatcactgcaaaggacattcctaccggtggagaaaatattggatcatgcttcccaatgcttggagatgaagcgctttttcgttcatcctgtttctgaatttgccggccagaatattggtgttgtgattgctgaaacacaaaagtatgcctatatggcggcgaagcaagctgtgatcgaatatagtaccgaaaatcttcagccaccaattctgacaatagaagatgctgtccagcataacagctacttcccagttcccccatttttagctcctacgccaattggtgacttcaaccaagctatgtctgaagctgatcacaagatcatagatggggaggtgaaacttgaatcccagtactatttctacatggagacacagacggccttagctatccctgatgaagataactgtataaccctctatgtgtcggcgcaactacctgagattactcaaaatactgttgcgaggtgccttggcattccatatcacaatgtccgtatcatcacgagaagagttggaggaggttttggtggaaaggcaatgaaagcaatacatgttgccgctgcatgtgctgtcgccgcattcaagctgcggcgtccggttcgaatgtacctcgatcgcaagacagacatgatcatggcgggagggcggcatccgatgaaggtaaagtactccgtcggtttcaagtccgacggcaagatcacgggtctgcactttgatcttggaatgaacggcggaatatcgccggattgcagcccggtgttgccagtcgccattgtcggggctctgaagaagtacaactggggcgctctctccttcgacatcaaggtctgcaagacgaacgtctcgtcgaagtcggcgatgcgggctcccggcgacgcgcagggctcgttcatcgccgaggccatcgtcgaacacatcgcgtccactctctcagtggacacgaacgccatcaggaggaagaacctccacgacttcgagagcctcaaggtgttttatgggaatagcgccggtgatccttcgacgtacagtctcgtcaccatcttcgacaagctggcctcgtcgccggagtaccagcagagggccgccatggtcgagcacttcaacgccggcaacaggtggaagaagcggggcatttcttgcgtgccgatcacctacgacgtgaggctccggccaactccggggaaggtgtccatcatgaacgacggctccatcgccgttgaggtcggcggcgtcgagatcgggcaggggctgtggacgaaagtgaagcagatgacagcgttcgcgctgggccagctctgcgatgatggcggcgagggcctcatcgacaaggtccgtgtcatccaggccgacaccctgagcatgatccagggaggcttcaccggtgggagcacgacctccgagactagctgcgaggctgttcggaagtcgtgcgccgccctcgtggagaggttgaagcccatcaaagagaaggctggcacgccaccatggaaatcccttattgcccaggcaagcatggcgagtgtgaagctgacagagcacgcgtactggacgcctgaccccacgttcactagctacttgaactatggagctgcaattagtgaggtggaagtcgatgtgctgacgggagaaaccaccatcctgaggagcgacctcgtgtacgactgtgggcagagcctgaatcctgctgtggacttgggccaggtggaaggcgcattcgtgcaagggatcggcttcttcacgaacgaggagtacacgaccaactccgatgggctggtcatcaacgacggcacgtggacgtacaagatccccaccgtggacaccatccccaagcagttcaacgtcgagctcatcaacagcgcccgcgatcacaagcgcgtcctctcctccaaagcgtccggtgagccgccgctgctgctggcgtcgtcggtgcactgcgcgatgagggaggcgatcagggcggccaggaaggagttcgccggcgccggaggctcgccgctgacgttccagatggacgtgccggcgacgatgccgatcgtcaaggagctctgcggccttgacgtcgtggagagatatctcgagagctttgctgccaaagcctagagatagaagggttctttggcttagctttgtataaacaccaacaataatctgcgcctggatttgtgttgatgtggtatatatgtacagaacaaaaggtgtttttttgggaaaaataaaatcatatggatggtattgttctatcatgtctcatggagtcatgctatccaaatg

SEQ ID NO: 24901 - DNA, 2581 bp, Oryza sativa
  ref <308>: DATABASE ACCESSION NUMBER: AK100343
  ref <309>: DATABASE ENTRY DATE: 2002-08-28
ggtgcactcggttcacgcacgccaaaatattgccgcacccaaagccgcctccgctcctccgcgtgcgccgccgccgactcgatcgaattcgatcgcttccgcctcctccaccacctcgacgcccgtctccgtcggcggcggcggcgagctcccaaatcctaggctagctcaggccccccaacatccaccacagaaaccacgggggtctcccttccctcaactccaccgcctctcatcggccgcgggagaaatcggtcgaatcccctccgcccgcgctgccgccgggaggtcttagctttaaaggtctagctggagtatcctgaatggatttgaatgcttcaccatcgcctgaggaagatgaccagtcttatgaagagcatgctgatttttcacagagtgaacatgctgagtctgctgttgagataatgcgaagggaacgcgaagagagacggagaaagttaaagagggagcaacatgatgatggaccaaggctgaatcgacaaccgattaggaatgatcatatgaatcaaaataaaatcattagacatggacgaattaaagagccacctcagggctggttggattgccctggatctggtgagccaatagataggattgtaccttctaaagttcccctggatgaaacattcaatgagtctgtgcctgctgggaaaagatattcttccaagcaagttgttaataaacaaagaaaagctggaagagatataggtttagtgattgacttgacaaataccactcggtactattcaccaactgaatggacaagacaaggtactaaatatgtcaagattgcctgcaagggaagagatgctgttccagacaatgaatctgttaacacatttgtgtatgaggtgatggcgtttcttgaccgtcaaaaacaatcaaggaatcccaagtatattcttgttcactgtacccatgggcataatcgtacaggttttatgattgttcattacctaatgcgcacacaactctctagcgttactgaggcactgaacatatttgctcaacggcgacctcctggaatatataaaaatgactatattcaagctatctattcattttaccatgaaattcctgaaaatatcgtatgccctccaacaccagaatggaagaggccctctgatcttgatttgaatggtgaagctaagcaagatgatgatgatgatggcaatgtagatcgtgcaccatcacctaatcacgaagatgataaagtcattactaatgatgatatcttaggggatgctgtaccttatgaccagcaagatttcctgcgcagtatatgttttaggttacttgaattagtgcccagtggtagagctaatgctcagtttcccggatctcatccagtttctcttaacagcgagaatctgcaaattctgagacagcgatattattatgctacgtggaaagctgatggaacgcgatacatgatgcttataacacgtgatggttgctttctaattgatcggaacttctgctttagaagagttcagatgcgttttccccttagaaattcgaatgaaggttttcaccactatacgttaattgacggagaaatgattgttgacactgtaccggatttgggattgaagaggagatacttggcatatgatctaatgtcaattaattcccaatctgtagtcaagttgcctttttctgagaggtggaaattacttgatgatgagataatacgcccacgctatcatgataaaggacgcagtccatcatacaaatatgacatggaactattttcggtaaggagaaaggatttctggcaactttctgcagtgaacaagatactgaaggagtttattccaaagctttgtcatgaatctgatgggcttatattacagggctgggatgatccttacgtgactcgtacccatgaaggtcttttgaagtggaaatatccagagatgaattcagtagactttctgttcgagattggcagtgagaatcgtcagttcattttcctctatgagagaggtagaaagaaacttatggacggtgcccgggtggtgttccctgatgaagttgacccgccttcaatatcagggaaaattgttgagtgctcttggaataaagaagaggactgttggtcctgcatgcgcattcgaacagataaatcaactcctaatgatatcaatacttacagaaaggtaatgaggagcatcactgataacattactgaagacaagctcctggaggaaatatatgagatcatgaaccttcctatgtatgctgataggaaagcaaaggctcacgcgcgaagtatggctcaacaacgaaggagatgattaggattggttatatgcattcgtcttacttcttagaattatagagagttgtaaccctacaaccaacagatggcaaaggctagctggcccaggctgtagcatgcatagataatgttactatatcttcatagcgagccttatgcaggccgagaatttttttttcaatatgatctttctgttggtcattcacatgtgtcatttcagaatgctgtaaatcttcaattaatcctgtattctgtatatccctctttttttgggct

SEQ ID NO: 24902 - DNA, 1146 bp, Oryza sativa
  ref <308>: DATABASE ACCESSION NUMBER: AK100344
  ref <309>: DATABASE ENTRY DATE: 2002-08-28
gctcctcccctctcccccgatccccttcctccacctccaccccccacccgccgatcgccccccgcgagctcgtcccgtcgcggcgggcgatcgctccacccacccatccacctccaccttcccgcgcgattccccgagaggcgaggcgaggcgaggccgctatagctccgctccgctccccgaccaccacgacgcggctggcggcggatcctccactccacccacccaccccgcttccgccgatcggatcgcgtgctccccccgaggtagaggtgatgataaatcatagttagtgacttagcttgcagcagttctttcttgcagctaagacaaataataattggcgttatggcatatagaaatacggtatgcactccccaagtaattgatctagaaactgaacaagggcactctcatattcattctgaaagttttaatcgcactgggaatgattcatctgaccaaggtgcacaacatgctgtcagaggggtaggaaatgctacaaacattggtctatctgatatgcgaagttactatgatgcgggcatgaaccatccacatcaacctgttcataacttgcctccaaatttaggagttgattcaggttttgtcttcccatccagtatgtacaacccctgcatgtcgacaacatctatgaaccaatatgtttctcacactcagagcttcggattgccatcaaaccaagttgttctaggaagcatggatgaaggtagcagaaatgaaaatgctggtgaaagtgctagaggactcattaaaaggaaaaatgctgcagttgcaggaagttaccactgtgctaatggatttgcaagttcaagctcttctcatgcatctctgaatcctacacataggccatgggatccttcttttgagtcaaatgttttgcctaacactgcatcatataacccatcagagtaccatagccagaccagttggccatctatggaaggatcttccattcccagtaatggctttaatttgatgggtgctcacccagaatcagcacagcatggtaattatgcatttccaactagtcacatcagccagtgctttcaacctactagcaatacatggatttcccagtctgcaaatggtattgctgatggaataccacagtgggaatatgtc

SEQ ID NO: 24903 - DNA, 2649 bp, Oryza sativa
  ref <308>: DATABASE ACCESSION NUMBER: AK100345
  ref <309>: DATABASE ENTRY DATE: 2002-08-28
gcgcgagctctgcacagcgagagagagagagagagagtagagagagaggagtgagagagccggtggcacccagctaacccactcggccgccaccaactgcggccatttccgacgacgccgacgccggggcgcgcccgtcggtgctcccaagtccgccttctctgcggatgagaagctgctccaccgcggcggcgacagtgtggtcggccaccgcctgagaccggagagccatagctgacggctcgggggaagattcaggtgggctcgcagagaacgaaagagagtccccatgggttctttggagacgacgaacacgcggtaccggccggccggagcagcggatgacacagctaagagaaggacccagaaaagcaaaagtttcaaagaggtcgaaaaatttgatgtctttgtcctagagaaaagctctggttgcaagttccggtccttacaacttctgctcttcgcgatcatgtctgctgcatttctgacactattgtacactccatctgtgtacgaccatcaaatgcagtctagttctcggtttgtcagtgggtggatatgggacaagaccattcctgatccacgatatgtatcttcgcttggtgttcagtgggaggatgtatataaaaccgtcgaaaatctgaatgatggtgaacggaagctcaaagttggactattaaattttaacagcactgaaattggctcatggacacaattgctcccggatagtgatttttcgatcattaggctagagcatgccaaggaaagcatcacctggcagactctttaccctgaatggattgatgaggaggaagaaacagagataccatcgtgtccatcgcttccagatcctatttttccaagagggacacactttgatgttgttgctgtgaaacttccctgtacccgagctggtggatggtcaagagacgttgcacgtctgcatttgcaactatctgctgcaaaagtggcagtgactgcttcaagaggcaatcgtggtatccatgtgctgtttgtgacggattgcttccctattccaaatctcttctcttgcaagaaccttgtgaaacatgaaggcaatgcttggatgtacaagcctgacttgaaggcactaagggagaagctcagacttccagttggatcctgtgaacttgctgttccactcaaagcaaaagcacgactttactcggtagacagacggagggaagcatatgctactattctgcattcagcaagtgaatatgtctgtggtgcaatcacagctgcccaaagcattcgccaagccggatcaactagggattttgttattcttgttgacgagaccataagtaaccaccaccggaagggcttggaagctgctgggtggaaggttagaataatccaaaggatccggaatccgaaagctgagcgtgatgcatataatgagtggaactacagcaaattccgtctatggcagctcacagattacgacaagattatatttattgatgctgatctcctcattctgagaaatgtcgattttctgttcgcaatgccagaaatcactgcaaccggcaacaatgcgacactgttcaactctggagtaatggttattgagccttcaaactgcacattccagttgttgatggaccacatcaatgagataacatcctacaatggtggtgaccaaggatacctgaatgagatattcacatggtggcatcgaattccgaagcacatgagcttcttaaaacatttctgggagggggatgaagaggaagtgaaagtgaagaagactcggttgtttggtgctgacccaccaatcctctatgtccttcactatttgggtctcaaaccatggctgtgcttccgggattacgactgtaactggaataacccgatactgcgggagtttgccagtgatgttgcacatgcccgttggtggaaggtacatgacaagatgccaaagaaacttcagcactattgtcttttgagatcaaggcaaaaggctgggttggagtgggatcggaggcaggctgagaaagcaaacttcaccgatggacattggcggaggaacataactgatcctaggctgaaaacttgctttgagaagttctgcttctgggagagcatgttatggcactggggtgaatccaagaactcaacgaaggaaaaccctgtgccggccacacctaccgcgagcctcacaagttcatgagatgtgtagatagccctataccagatacaaacttctaagctccatacatacatagcaacagcttgtaaaggtagctatgcttaggtttctcgacaaaactataccttgtgtttgctatcatggcttcggctccactctggctgctttgatagctcacaatttttttggttttttggccaataattcatcagtataggtaaattttctgttcatgaattgtttggtcagtctggggttggttgttgctcggctgcaatagcctagttcgatgtatggtggttgaactgtttcggtgataaaatctggagtgacgcaacatgagattgctgaccagcaaacactgcctcattttgacatgaaatacagtattgttttaaaattgagttggattaatacggtcacggctgacatccacagatggttggacgttggagcagctggggccattttgc

SEQ ID NO: 24904 - DNA, 2510 bp, Oryza sativa
  ref <308>: DATABASE ACCESSION NUMBER: AK100346
  ref <309>: DATABASE ENTRY DATE: 2002-08-28
gagcagcctctctatagtctcagctcttcttccaccaccacccagctcctcctcctcctcctcgtcgttgttcgccaccaccgctcggagagatggcgagccagaccgccgacgccacggggttcgtcgcgagcgacccgctgtcgtggggcaaggcggcgctggagatgacggggagccacctggacgaggtgaagcgcatggtggcgcagtcacgggaggccgtggtgaagatcgaggggtccagcctccgcgtcggccaggtggccgccgtctccgcggccaaggacgcctccggcgtggtggtcgagctggacgaggaggcccgcccccgcgtcaaggccagcagcgagtggatcctcaactgcatcgcccacggcggcgacatctacggcgtcaccaccggcttcggcggcacctcccaccgccgcaccaaggacggccaggccctccaagttgagctgctcaggcatctcaatgccggaatcttcggcaacggctccgatggcaactcgctgccgtcggaggtgtcgcgtgcggcgatgcttgtgcgcatcaacaccctgctccagggctactcgggcatccgcttcgagatcctcgaggcgatcaccaagctgatcaacaccggggtcagcccatgcctgccgctccgaggcaccatcacggcgtccggcgacctcgtgccgctgtcctacattgccggcctcatcaccgggcgccccaacgcgcaggcggtgaccgtcgatggcaagaaggtggacgccgccgaggcgttcaagatcgccggcatccagggcggcttcttcaggctggagcccaaggaaggtctcgccatcgtgaacggcacctccgtgggctcggccctcgctgccatggtgctctacgacgcgaacgtcctcgccgtcctgtccgaggtgctgtccgccgtgttctgcgaggtgatgaacggcaagcccgagtacaccgaccacctgacgcacaagctgaagcaccacccgggctcgatcgaggccgccgccatcatggagcacatcctcgccggcagcgcgttcatgccgcacgcgcagaaggtgaacgaggtggacccgctgctgaagccgaagcaggacaggtacgcgctccgcacgtcgccgcagtggctgggaccccagatcgaggtcatccgcgcggccaccaagtcgatcgagcgcgaggtcaactcggtgaacgacaacccggtcatcgacgtccaccgcggcaaggccctgcacggcggcaacttccagggcacgcccatcggcgtgtccatggacaacacccgcctcgccatcgccaacatcggcaagctcatgttcgcccagttctccgagctggtcaacgagttctacaacaacgggctcacgtcaaacctggccggcagccgcaacccgagcttggactacggcttcaagggcaccgagatcgccatggcctcctactgctcggagctccagttcctcgccaacccggtcaccaaccacgtccagagcgcggagcagcacaaccaggacgtcaactccctcggcctcgtctccgccaggaagaccgccgaggcggtggacatcctcaagctcatgtcctccacctacctggttgcgctctgccaggccgtcgacctgcgccacctggaggagaacctcaagagcgccgtcaagaactgcgtgacgacggtggccaagaaggtgctcaccacgggccccgccggcggcctccacagcgcgcgcttcagcgagaaggccctgctcaccgccatcgaccgcgaggccgtgtacagctacgccgacgacccgtgcagcgccaactacccgctgatgaccaagatccgcgccgtgctcgtcgagcacgccctcgccaacggccccgccgagaaggacgacggctcctccgtgttctccaagatcaccgcgttcgaggaggagctccgcgaggcgctgcccagggagatggaggcggcgcgcgtggcgttcgagaccggcaccgcgccgatcaccaacaggatcaaggagagcaggtcgttcccgctgtaccgcttcgtccgcgaggagctcggctgcgtgtacctcaccggagagaagctcaagtcccccggcgaggagtgcaacaaggtgttcctggccatcagcgagcgcaagctcatcgacccgatgctcgagtgcctcaaggagtggaacggcgagcccctgcccatctgctgatcgaaccagtccacccgcgaacgcgacaagatccaggaagagacgatacgtgcaccgaaataagaaagggaggaattcaggatcctgaaggcttctcgtacgctcatcagcagattacgttgtttctccgtccgtgttttttttttcctttttgagcttgctgtatttatccgtgttgtaatcgtgtgagattgctgctgcaatgccgtggcgcctgcagcgttcatggccttggctggcagctttctgattccgttgttgtattttgcaagtgaaatatactaatatagcgct

SEQ ID NO: 24905 - DNA, 2548 bp, Oryza sativa
  ref <308>: DATABASE ACCESSION NUMBER: AK100347
  ref <309>: DATABASE ENTRY DATE: 2002-08-28
ggctcgaacacacccttacttctgtccccttctctgagtctgctctgctcgtccccaagaacacgattcagcgacgcgcgcgcaacagtgccgccgcggccgccggcaggtttgacccatccaaagccaacccccaaaccgacgaatcaatcaagaacccccccgaatctaaaatctttctttaagagctctccctcccctggagcggcttctcccgcaagccgctgaatttttccaccaccaccggtcgtcgcggattcccgcgacagccagccagcgaggacgcgcgctttctttttcttctttgtttttccctcgtcctctccgtccggctgcagaaaagcttccatctctctgaagctgtccttgattcttgcggaggtagacaggcaggtgtagtcctttgtgtgcccgtgcgtatatgtgagcgagtgctaccgggcgcgtcgacgccggcgacgaacgaacgatcgattcgattcgactcgatggacaaggtgaaggcgtgggcgggggccaactacgcggagcccatggggtcggtggagcagtcgctgcgcgtcgcgtacgtggtcctctccttctgcgccgccttcttcctcggcggcatcaaagcggcggtcgtcggcccggtggcggcggcgctgatggtgctgggcaacgtcggcgtgatactcctcctcttcccggcgcacgtctggtggaccatttactccctcatcaagactgaacgcatcaacgccggcctgaaactagcggtgctcatcgcgctgccggtgctgttcggcctctggctggggctgggcatcttcgggagcgcgctggtcgccctcggctatggcttcttcacgccgtggatcgccaccttcgaggcgttcaggcaggagagcgagtccaagaagttcgtgcatggcgtcgtggacgggacgtgggggacgattaaaggcagctgcacggtggttagggactttgcggatttatgcttccactcgtatcctgtttatctgaaggagctgcgcgaaagctcgcagaattgcgagccccattccatcagggtgttggatgtgccctcatgtatagctgttggtctcttgggattaatcgttgacattccgctctacaccgtaattgcgctgataaagagcccctatatgctcttcaaaggttggcagaggctgcttcatgaccttataagccgcgaaggtccattccttgagacagtttgtgtgccgatcgctggcctggctatccttttctggcctctggtggttgttgggagtgtcctactagctatcgtctcgagcatttttgtgggtctctacggagcagtcgttgtctaccaggagaagtcgttccagaggggagtttcttatgtggttgccatggttgcggaatttgacgagtacaccaatgactggctttatctccgggaagggacagttcttccgaagccttcctaccgtaagagaaaatcgtccagttccacggagttttcagtcagaacgaatgcttctgttaaaggaggcgaccaacctagttccaatgaagctccagcaatgctggttccaactttggccccagcaaggtcagttagagaggccatacaggaagtcaaaatggtccagatatgggaaaatatgatgaagaattgtgaactgaggggcagggatcttctgaatttaaacgtcataacaactgttgatcttactgaatggttacgaacaaaggaaagtgggcatgaagcaataggactgggagtaccttcttattctctgctgtgtatgatcctccattcgatcaaggccggttctggagggctattgataggcaatggcatcgaaatcaatcaatataaccgcccccaagatcggttgatagactggttcttgcaccctgtgctggtgctgaaagatcaaatacaagcgctgaaaatgacggaggaagaagtgaggttcttggagaagctgacccttttcattggtaattctgagagggcaaatgggtgggataatggtgctgaaatcccccaagatcctgtaagggcaggacagatccaggccatcagtagaaggttggttggaattgtaaggagcatgtcaaagtttcctacgtacaggaggagacacaggcacgtcatgaaactgctcgtcacgtactccgtcgagaaggaagggtcgttcagatcatccgcgtcgaatcgatcagtacctatctttgagataacgcaattggaagtgtaattgaaagttgaaaccatattcagaaatcagagtcagataggtcccttcttcaaatggtcttctttcttcagtaaatatcgcacgccgttttgtcagtgcttgtgtttccccaaatctaggaggttttgtatagctttattttttttacaaggagagagatgcctcactccagaacttctcgctgtgagattcatttgccaaaactgcaggcatgaatgaatcatccattgtacatttgtattgtaaattctgtacatactccttgatcagatcagatacacatgcatgttggttcttttaccttttgc

SEQ ID NO: 24906 - DNA, 4012 bp, Oryza sativa
  ref <308>: DATABASE ACCESSION NUMBER: AK100348
  ref <309>: DATABASE ENTRY DATE: 2002-08-28
gagttatacacggttacacctgagtttcgaaccggcgaacaaatgccgccaactcctccgctcgccgccctccaccgcttcctcgcctcgccgtccccgccgccgctcccctcgctgctcaccctccacgcgctcgccgtcacatccggcctctccccgcgccccgacttcgccgccaagctcgtctccgcctactcctccgccggcctccccgccctcgccgcgctcgccttcgccgcctccccctgcccggacgccttcctctggaactccctgctccgctcccgccaccgcgcctccgacttcgcctccacgctctccgcgcaccgccgcatgcgcgcctcgggggcgcggccctcccgcttcaccgcgcccctcgtcgcctccgccgccgcggagctcggcgccctccctgtaggcgccgccgtccacgcctactccgtcaggttcggcctcctggagggcgatggttcagtcgcggtcgcgtcgtcgctggtctacatgtacgccaggtgcggcagcgtccgcgacgccgtgaggctgttcgacgaaatgcccgagagggacgtggtcgcgtggactgccgtgatctccgggtgcgtgtgtaacgggcagtgcggggaagggctgagctacttggtgcgaatggttcggtctgcaggtgatggcggtgcgaggccgaactcacggacgatggagagtgggttggaggcctgcggggtgctaggggagctctctgttgggacatgcttgcatgggtttggggtgaaggccggggttggacactgcccgtcggtggtttcatcgcttttttctatgtacactaagtgcgatagcactgaggatgcacggattttgttcccggagttgccggagaaagatttggtttcctggaccagcttgattggagcatactgtagggcaggccatgctgagaaggctgtggagttgttcctgggcatggaggagtctggtctgcaaccagacgaggttgttattagttgtttacttgcagggttgggtaatgatgctaaggtgcgtggagggaagacgtttcatgcagctatagtgaggagaaactttggagatagtgttctgattgggaatgctttgatctcgatgtatgcaaagtgcaaacaggttgatattgcagccacggttttcagaatgttgcatcaacgagacacagactcatggagttcaatggttgtagcatattgcaaagctggacttgatttgaaatgcttggagttgtatcgagaaatgcagttcagagacaaggatgagtttgaatatgacaccaacagtttgatttccattatttcttcttgttcaaggcttggtagactacgattaggtcaatcagcacattgctattcaatcaaacacttagccggtgaaaattcatcagttgcaaatgcactaattagcatgtatggaaggtgtggtaattttgacgttgcacggaaaatatttggtatggtcaaaacaaaggatgttgtcacatggagtgcattaatttccagctattctcacctggggcattcaaaggatgctttgttactgtatgatcagatgctcactgaaggtgttaaacccaactcagcaaccttggtctctgtcatttcatcttgtgcaaatttggctgcattggaacatggagagctcatacattctcatgtgaaagatgtggggctggagtgtgatttgtcaatttgcacagcacttgttgacatgtatatgaaatgcggacaacttggcatcgcaagaaaaatgttgattccatgctcgaaagggatgttgttacttggaatgtgatgatatcaggctatgggatgcatggtgaagcaatacaagcattaaaactttttagtatgatggaaagaggaaatgttaagcctaatagcctcacttttcttgccattctgtctgcttgctgccatgcaggacttgttgacaagggcagggagttgttcactagaatggaggaatactcccttgagcctaacctgaagcactatgcctgtatggtggatcttctagggaaatctgggcatcttcaagaagcagaagatgtggtttctgcaatgccaatagaacctgatggtggaatatggggaactttacttggtgcctgcaaaatgcatgacaattttgaaatgggtttacgggttgcaaagaaggcgtttgcttctgacccagaaaatgatgggtactacattttaatgtcaaattcgtatggtagtgctgagaagtggaatgaaatagagaaactaagagacatgatgaagaatcatggagtggaaaagagtataggttggagcacaattgatatttgtgggtaagtttaattggagctatgccttttcctaggtccttgtgagcagttgtgatctagttcatcttctctatgtcagaaatgtttgtcttacaggtttatgaaaaatcaactgacccaatggcagcattctctctttgaacaatctgaatttagaagttcagaggatatgtgcatttcttttgtctctggaatctggagtgagtcaatggtcaatggattgacagaatgggggaatgaggtagtagattcatcagaatttaggaacaaagcccaaagggtaaatatgaaattggagttggatgtaatgtatgcttcctgatgtgtcatggtttccaccataaaagagggttactctattgcgtgtagactggagaatattctcagtaatataatgtgcaaccatatcataaaaagagaaaattgtcatgattcagcttaaggtggctgccatgcttatgttcttacgtcatagcactgagccaggtgaactgggacatggcagttgcagcattatggcagtgaatttctgttttgtgctgatggttacatcatcttggtaattataactgtgcagaatactgcttgactatgggcataggaacattatgtgcagtattctaaaaggactattgtgttggcttttacagcaacaaaatactgaaattgtgtcctatggctcgtgattagaaatggacgtgctgtggtggagtaaagacctgtacagggaaatcttcatttgaagagttcttgtgataaaatattaagggagctggatagctggtgttttagcagcctatgctgctaggaacacacaggtgcaaagtgctcttgagaatcaaaacatattattattacgatctcgtctgctcacgttgagtttattttccaccaacaggttcatgatctttttgtagcgaggactttcacaggttcaacaaatccaattgcccactcccacattacttgcgatgacttccttttcttctgcaaccaatacaacttttccttttaatctttattatgctcaggttaaatgttttaactcatgcacatatacataacctttttctcatctgctcatacaaattttccattggctggtatgtatgtagcagcaatcattcattcttggattcctgaggagcaacctaacagaagacccaacttttatctagctgaacttcccatgtggaaggacatatctcgtaccagagctatgaggtagagtgggttatcataccaaaatctccacatgcttttggtgccacatacccacaacgatccgagctagtggcgctggtagcacttcactggagcaaatgatagtagccgcatatgcaggtgtgcaccctctcttcttttggatgtgcgcaccaactgtttttgcaatgcattcgcctggaatgggtgtgggaaataaaatttatggacctcatataatttgggattctttggtgtcttcatgtcatgtactcacgtccctttgcagtgtacatgacgtctaaaggattaggggcacccgtgtatacgagtgtaactctaaacgcagtctctctctctctctccctctctctctctctctctctcgtgtgtgtgtgtaacaaatcatgttcatttttttggggggtggggggtaactttctagtaatgcgaatataaacttgtttgttg

SEQ ID NO: 24907 - DNA, 4194 bp, Oryza sativa
  ref <308>: DATABASE ACCESSION NUMBER: AK100349
  ref <309>: DATABASE ENTRY DATE: 2002-08-28
gggctctctctcctccccctcggctcgcaaccgccatggagccatcgccggagattccgccgccgccacccgccttcgccgccggcggagaaggcgatccgcatgctcccaccacagccgccgcccgctcctcctcctcctcctctctatttcctctcttccccctctcggcgcccgaggaatcctccgcccccgcggcggggtcccagtggctctcaaaccctagcttctccttcgacgcctcctccctcaacatccccgccactgcctcctcatccgtaccgccgccgctaagcgcctcgtcggacgaagaggaggcgccacggcccgcacctgctaagtatgacctgctgccctactcaccgtcgcctccggcctccgacgaggagaggagggacagacggaaggataggaagaggaggaagcggaggcgggagaaggagcggtacaatagcgcggaagcctcgcgaaagccgggggttcgcgcttgggctgggtcggagacgaagttggctaaggattactacttcgacgccaagggcgaccaggataacttggcgtttggatcgatatacagaatggatattgcacgctacaagtctcaaaacatgccagaggcacgtggtctaaaacggcttttgtttcataacttgggtgtctcggtacatatgggtcatgagtcagatttagatggactgaatagcaaagcaagagctggaggtcgctactactcggcgaaatatgcagttgtagaaagaaataagggtttcaaacacctaaaagtattgaaaaaggataactctgcaattctcccagaagattttatccccctagggataccatctcttcctgaaaataacactactggggaacaggaacttgaagaatcttgggaagatgaaatacttcggaggacacgagaattcaacaagatgtctcgggagttccctcacaatgagaaaatttggttggactttgcccgattccaggataaagttgccagtactcaacctcagaaagcagcccgtttgcaaacaactgaaagaaaaattagtatattggaaaaagctgtagagcttaatccagataatgaagaattattgctttatcttctgaaggcatatggtgagagggatagcacccagaatctcctggataaatgggagcagatactcatgaaacacccggatagttgtaagttgtggaaacagtatctacttctgtgtcaaggggaattctccagattcaaagtatctgacctacggaagtcttacgcttatgcagtacaggctttatctgcagcttgtactaagctatgtaggcaggatacacaatatgatcgtctcgaacctaagtattcttccttaattcatcttgaactcggtctagtggatatatttgtgaatttgtgtcggttcgaatggcatactggacatcgggaattagcaactgcactatttcaggctcaaatagaatttagtttattctcccctccccttcatctgaccacaagcagtaagcaaagactctttgagcacttctggaacaatggtggtgctagaatcggagaagatggggctcttggatggtccagatggttggcaaaagatgaggagagtagacaaaatatagatatacaagaaaatacccaagaaactgaaaggggtggttggaatggttggtttgatccttctctaaggactaatagtgaaacaagcaaagtggaaccatcgacatctgatggaaatgatgcagaaaatccagatgatgaggacccatctgcacaagaagatgttgaatctttgctgaaaaagcttgggattgatggagatgctgattacaatagtgaagttaaagatccaaaaacgtggaatagatggtcatttatggagttatcaagggataatgaacaatggatgcctcttcatgaaaaacttggatcactttattctgatgatgctccaactggagaagacaatgatcagctttccagagtaattttgtttgaggatataactgagttcctgttctctctatcttctgaagaggctcgcttttctttgatatgccaattcattgatttctatggtggaaaaatttctagatggacatccaccaacagttcaagttggattgataggaatttgagcctagagatgattacaggtgacattcaggaagatcttagtacggtgtctaaccttatagacaagaaccaaacttcagttcataataaaatggtgtcattgttaggaactatgcatgaattttctcaaaggcctggcactgcgaaatttctgaaaaatgcaatattgcttttccttgatgtattccctcgtaatcatatcctggaggaagctgttcttgttaccccccaaattcatacagctcaagaaaaatatctggctactccagccaccgcatcccgggctttggccaaaaatctattgaagaaagacagacaggatcttttgctttgtggaatatatggacgaattgaggctatgaatggggactttgtcaaagcaaggcatatattcgacttggcactatcaacttctcaaggagcttcagaggatctcaggaagaaggttcctattctttatttttggtatgctgagatggagctagcaatatatgcttcaagaaacaattctgactctgtggatcgtgcaatccacgttctgtcctgcttaggggacaaggcgaagtatgcttcttttgatgggtctatatcacgacctcaggtgttaaaggctcgtcaaggatttaaagagcagattagaagcttgcgatcttcatttgcaagtgatggtatgaaagaagagtctgttgctctaatctgctcagcatctttgtttgagagtatgacatctggttttgcttctggtcttgaagttatagaagagaccttttatatgacaccttcagagaacaaccatagcttagaattcgaagaattgtggatgcactacatcaagcagcttcagaaaaatcttaatcagttgagtctctcaagggtttggccaaaaatatcgcaaggaatacaaacatatccgtacaacccaaaatcatatgcagccatgttaactctaggttgcctttacagtgtttccaataatctacgtctcacactcgacaaatttaatcaaagggatccttccataattggcttgctctttgctttgtcctttgaattgtgcaaagctggatcagacaatagaatacacaatctgtttgagagagctctgactgatgataagttacagaaatccgttctgttgtggcgctgttatctagcttatgaggcagagatagcttgcaatgcttctgcagctcggcgtgtgttcttcagagctatacatgcctgtccatggtctaaacgattatggcttgatggatttgaaaaactgagttcaattttgacactgaaagagttgtcagatctccaagaagtaatgcgtgacaaggaattgcacattcgaactgacatttatgagatactcctgcaagatgaaacagatacgtgatgcagctatccctgtttttgtccataattcgagatctccatattatctcaaggttccatcttgcaactgaagatcggttgcatgtgatcttttaactcataattgttggactctcaagatcggttgctcaggaacctttatgtcgcatggaatgtgatctggacacgatgtacatccaaagcatctttagattggcaatctcgtgacatattaatgtgatttattttctgttcctggagacatatgttcggcttgtgtctggtcactccaatccttgtatttggttggctcatgcttcttggaagggcacaactgcaggaagaggtcaatatgaagtaatgatggaggaaagcatagagcggcagcataaagttgaaattgtcttgccaaaatggaacatcaaaagctggcagagaatcgagttgataaataaaaaattactgcgtcttcaggttgggggtatttatgcagtaccctagcgtcaatcaaaagcctggagtatgtcttcatttatcatctttctgcgattaaacgatgcttgtcctttttaaaacggaaagaaggaaagcttagttctgaacataatatactaatattgtggtatatatgtgtacaatgcttgaagtgacacattttttttttgaaaaaaaaaagaaactaccgt

SEQ ID NO: 24908 - DNA, 1543 bp, Oryza sativa
  ref <308>: DATABASE ACCESSION NUMBER: AK100350
  ref <309>: DATABASE ENTRY DATE: 2002-08-28
gcttttgcccccctcctctcctccgcctcctccacacacgagcgcgtcccccgacgccgcgccgagatctagggttgggcgcgcgcgacgccccccccccgcggcgaggaggatgagcagcccccatggcggcctcgacgaccagatcgagcgcctcatgcagtgcaagcccctccccgagcccgaggtcagagcactttgcgagaaggcaaaagagatattgatggaggagagcaacgttcaacctgtaaagagtcctgttacaatatgtggtgatattcatgggcagtttcatgaccttgcagaactgttccgaatcggtggaaagtgcccagatacaaactacttgtttatgggagattacgtggatcgtggttattattctgttgaaactgtcacgcttttggtggctttaaaggttcgttatcctcagcgaattactattctcagaggaaaccacgaaagtcgacagatcactcaagtttatggattctatgacgagtgcttaaggaagtacgggaatgcaaatgtgtggaaaacttttacagatctcttcgattacttccccttgacagcattggttgagtcagaaatattttgcctgcatggtggattatcgccatccattgagacacttgataacatacgtaacttcgatcgtgtccaagaagttccccatgaagggcccatgtgtgatcttctgtggtctgatccagacgatcgatgtggttggggtatttctcctcgaggtgctggatacaccttcgggcaggatatatcagagcagttcaaccataccaataatttaagacttattgctagagctcaccagttggtcatggagggattcaattgggctcatgagcaaaaggttgttaccatatttagtgcacctaattattgctatcgctgtgggaacatggcatcaatcttggaagttgatgattgcagggagcatacattcatccagtttgagccagccccaagaaggggagagccagatgtaactcgtagaacacctgactatttcctgtgatgtaaaagtggtggactgtctctgcagcaaatgtttgatagctaggtgaagttccctggttgcagatatttttttcccctcgaatctcctgtgtgttattcttactacctttgcccgtggcgcttggctatcgcgagctgctttgctgcatcatgattcaagtgtatacctacagctgggaggattcatcgtgttctcacttatctctaattggctgatgcttggcttgggggctgcagtggtgactcgaagcatcaagtagcaaatttgtattatgaaaggaaaactattctctttgtattcattttgttcgcctttcttccccacaaatttcacctaattttcttttttcttttttcatgatccttgtagagatgaacaatgtagttgtatggctccctgttgagccggtaggtctttctgagtacatcttgatttgccgtacataattgcttgaaaaacaagtattagaattctttgtgaccaacacttgagctccgatttttc

SEQ ID NO: 24909 - DNA, 2891 bp, Oryza sativa
  ref <308>: DATABASE ACCESSION NUMBER: AK100351
  ref <309>: DATABASE ENTRY DATE: 2002-08-28
ggtttcagcgctttccagctttcctcctattttgtgtatggcttttgatgatcagaggaatatatggatctcgcaagttgtacattgcctatctgggcgagaagaaatatgatgaccctactcttgtcactgcctcacaccatgacatgctcaccagcgttcttggaagcaaggaagaggcgctggcctccattgcttacagctacaaacatggcttctcaggctttgcagcaatgctaacagaggagcaagcagataatcttgcagatttacctgaagtgatcagtgttaccccaaataagcaacatgaattgctgaccacaagaagttgggatttcctcggactgaactaccaaccacccaataaacttctgcagaggagcaaatatggagaagatgtaattattggaatgattgacactggtatctggcctgaatcaagaagcttcagtgatcatggatacggaccaataccatcacgatggaagggcgtgtgtcaactaggacaggcctgggggccaaccaactgcagcaggaaaatcattggtgcacggtactatgctgcaggtatagaaaaagctgactttaagaagaattacatgtctgcccgggacatgatcgggcatggaacgcatacagcatccatagcagctggtgcagtggtagatggagtcagcgtccatggcctagcaacaggagtagcccgtggaggtgcaccccgagcacgtcttgctgtgtataaggtcatatggaacacagggaatagcctacagcttgctagtgccggagtgctagcagctctagatgatgcaattcatgatggagttgatatcctgtccctctcaattcatgctgatgaggattcatttggtgcactccatgcagtccagaaggggattaccattgtttatgctgggggaaacgatggccctcgaccacaagttattttcaatacagctccttgggttattacagccgcagcaagcaagattgatcggtcttttccaactaccattaccctgggaaacaagcaaacattagtggtaaatagtagaaacacaatctcttggctccgttcgatactgcatataggatatgattattgcttgcacaggaaacaggaaagatgattagcatataattaattaactattataaacttaaaaagtggatttatttgattttttaaagaaacttctataaggaaaacttttgcacaaagcgcaccatttaacagtttggaaagcgtgtgcacgaaaatgaggaaaattttcagcccactagcagtatcgaacggagcgctcctagaggcacctttcctcgcctatcatctccaaacacttaccactcaaaatttatgtgcaaatctctatcatatttgcagggtcaatcattatattacaagttaaacaacgaatccaagagtgggttccaaccacttgtaaatggtggagagtatgtgcatttctgtttaacttattgattaactaaattcatggatagatggcagcttagattctgatgttgcatttccaaattggttgagcaaccattgtttctgtctgcagttgttcaaaaggggcattgaatggaacaacaatcaatggaagcattgttctgtgcatagaaataacttatggaccaatactaaattttgtcaatactgtcttcgaaaacgtttttagtggtggggcatctggtcttattttcggactgtataccacagatatgcttttgcgcactgaagattgccaaggcataccctgtgttttagtcgatattgatattgggtctcaagttgcaacatacattggtagtcaaaggtaggaaaaaattcatgtgaagaaccaggcttagtaattgtattttctgtggaactatatttatttagtctaaaataatatggtctttgtactaagcagcatgccggttgcaaagattgaaccagcacatagtattacaggaaaagaagtcctggctccaaaggtggcaatattctcatcaagaggcccatccactaggtaccctacagttcttaagccagacatagcagcaccaggggtcaacatcctagcagccaaagaagatggatatgcatttaactcggggacttcaatggcagccccacatgtagcaggtgtcatagcattgctaaaggctctgcatcctgattggtctcatgctgctctaaaatcagccattgttacctcagcatcaaccaaggatgaatatggcatgccaatattagcggaagctctacctcggaaagttgctgacccattcgactgtggaggggggaacataaatcctaatggagctgcagatcccggcctgatttacaacattgatccaatggactacaacaaattcttcgcttgcaagatcaaaaaacatgagatctgcaacattacaactttacctgcctatcacctcaacttgccttctatatcaattcctgaactaaggcatccaatcaaggtgcggcgagcagtcacaaatgtgggggaagtcgatgcagtttatcaatctgctatacagagccccctaggagtcaagatcgatgttgaacctccaaccctagtcttcaatgccacaaagaaagtgaacaccttcaaggtcagcatgagacccttgtggaaagtgcaaggggaatacacatttggaagcctaacttggtacaacgagcatcacacggtaaggatccccatcgcagtccggatcacaatccgagatttctatgcggatgttgcatagtaatccagaggattactcaatagtcaataataaagaacggtgatcatctacatatggtcaccttagatcggaaaactacttgtacttggcaaaattttcttgcactatctacaataaatccttcgattttatggttc

SEQ ID NO: 24910 - DNA, 2924 bp, Oryza sativa
  ref <308>: DATABASE ACCESSION NUMBER: AK100352
  ref <309>: DATABASE ENTRY DATE: 2002-08-28
gagaagcgcacgggtgattgatcttgcatccatggagtcgggctacggcttccgcttctccgacgacgacgtggtgggtcggtggctcagctacctgttcgtcgccggtcgccggcggcgctgccgtttcttggagctatgtttgattggattttggattttggatttgcaggagtcggcgagctcgctgacggtgggggagcggctgtgcgcggcgttcctgccgttcgtcgccattgccgaggccgtcttcttcgcgctcaccgactgcctcgccgacctcctcccgccgtccgccgccgcctcccgccaccgccgctccgccgcttcctcctacctcgccgccgtcgccaggaaatggaaccaccagcagcgtggcagggtcggcatcggctgcacctccctcaccctccgccagctcgcccgcctcgccgacgaatccagatgctgtaatctctaatttcacctcacccccctcccattgtttgtatcgccttcttcttcttctcgagtccaatttcgcaatgtggtccgatctgatctggtgtttggtgtcgatcgcatcgggtcaagtctccgtgaacgaggtggaggcgctgttcgagctctacaagaagatcagctgctccatcatcgacgacggactcatccacaaggtttgtgttcctgtcaatttgtcattttggatcaggttgatgtgacaaaaatttctttcgatacgttctttcgtggcaagaattctcggtgattatcgaataaactaatagttttttttttgagaggttatgctctgcacttcgatgtctgttcttgtcttggtctctgaaaattgggttcgtcaggcgaaaagaatgatcgattgattagtagtcggccttaagaaggcaatgttgcaatttgacccagtaaaaaaattgcaactaggtgtactagatcgaccgatccagaggtgttgcactgcacgcaatggattagtgggtcacccatggagcattattgtattttggtttcacaacccatagaattttttttgcctctagtttactttttgtcacagcttgcatgtcgggtggctcccatgtgcaatttgaccatagaatagttcctgtttctcagattgtttggttggcatgttcgttctcatggtacactatgtgagcaactgtaacgctgattggtaaggggaaggcatggcatggctgttttttcgttaagaaaacactgtagtatctttgcaatacaaacattcgaagtcaacagaaaccatttaatttgtattttcaggagcatcgtgatttattggagtgaatgttttttttaataaaaacttgagaaagacaaataaaatctgaaatgctctctatgctggatttgtcatacgtaacagttcctatgctgaattgttctttaggaagagctccagctggcattgtttaagactccaagcggccagaatctttttcttgatagggtgagtgtttacttcatttgctctctttagtactataaattttatttgaccatttaccactttgtgcactatgttttccattgatctccttttaattgttagtttatttccatggcatgttactttcagagggtataagtataaccactgaaagaaattctctctgatacaggtttttgatttatttgatgaaaagaaaaatggtgtaatagagtttgatgagtttattcatgctcttagcgtcttccatccattggcaccattggaagacaagataaattgtaagtacacttctttcagacactaccttcttaaattcatgtatcgaggtatatttacaataaggcctccctttggattgttttagttgcatttaggttgtatgacttgagacaaactgggtttattgagcgtgaggaggttagttcatcaaggcactctgtattaatttgcaacaagtatgttatttgtgttctagtacaaatctggtagtgacggcatggtctgttttgcaggttatgcaaatggttatcgctattttgtcggaatctgatatgaaattgtcagaagaacttctcgaggccattattgataaggtgatcaatcatttcctcggctctgtcctatgtgaacatgccctttttgctgcatggatttaagttttgctacaatttttctgtatttcagacatttgaagatgctgatgctgatagggatggaaaaataaaccaacaagaatggaaggaattcgtattgcggcatcctaatctattgaagaacatgacactgccttatctaaggtattaaatatgagcttgagagctttatgaactggactattaagttctgtcaaatatatactgttgcgcagagaaatctcgtctggaaactactgctaaattgtttgaaaaaaataccagtcaggacttcattaaattcctcgttatttactttgttatttttttgtccatcttatactacagggacatcacgacagttttccctagttttgtcttcaacaccgcggttgaagattgaacataatctaggaatcacttgaaggttgaactgcgcaagatccccggatgatggtgacaggttgcctgctgatcctgccaactttgtgctgcatgtttcttggccagctctcaggaatggaaacagatatgagaattcatcatgagccctcgctgaagaaccacaattggtgattgttaatcaagatcaatgctttgagactcaatttttctgcaaaccgaggctcatctatgacagcaaattggtcaacttttagcagacaatcaagttcgtgtacatacatcctctcggtagttcaggattaaggagcatagtagtgagcaactgtatatatgattggttgtaggactcgggaaattcaacgtttttgtatccggtcagtttgggaattatcattccagtttatctttttacg

SEQ ID NO: 24911 - DNA, 2942 bp, Oryza sativa
  ref <308>: DATABASE ACCESSION NUMBER: AK100353
  ref <309>: DATABASE ENTRY DATE: 2002-08-28
ggcggcgcgagagaggccggctcgccgccgcgccgctccccgcggcggcgtccagccgagttagcaccatgtgagtatcccccccccccaccaccaccaccagtccccacgtctcctccctccacagcgccgcaccaccgtcacgcggtgatcgcggtgggggccatcgctgattgctggaggcgccgcggtcccggattttcccaaagacctccttcgcaaatttatggatcatgcttcttggaatgatgatattaagccatgggtatgggacttcccacatgcccttagctctcaacttcatctcagaagagtgtaccctatccaagaactctatgtatgttacatccgtgtggaataaggaggaaggcatatatctaagttgagacagcagtgtgttgacctcctgtaaacatatatacatacagaattcaaccactcaaacttgacctcattttacttggtttataaacatctttagtgacataagggtaatggttggctcacctgttccatgacatcagcctcgtcagggttgaagttctttgtcatctcaaggcagaagagcacttttccatctgattcaaactggctagaacgcactgggtcctgcggattgaaggacgacctccagttgttcaggatgcctgtcctatttatgatgacaaagccctcgatgtagtcaaatgtcttctctgctgaaatgagcatttcctggtcttcggtgaagcttgtgaaatccaagttcaagaggaatcctggctcttgtgatgacgccaaactgacctaggccaccaagggcagcatggaagagatcagagttttgttcagctcgttgacattgctgatctgtgggccatgccggaaggtctgcccactgactcctgcattcgacagtgtgcctccaaccgtgagatggagatagtccgtccacgactttggtgctaaaccatacttcagagtctcatgcaaaacatttatccagagttctcctcctgaagcatcgacatagggtgatacgccagggttcaccctcattgtgttactctggagggattccatactgatgatgattccctcagcagcctgggactgcccatacagcgagtgcccatgtccacgggctgccactgtgagcgtggagtgctcacccatcaagaacacatgcctgatggttgtggcaatgtcagccactgagccaggatgaagcaccgcaaccggcgggaagctggacaggttgccaaagtcctgtgcagcagcagacacatcgtggaagctgaaatggccatcaagggtgagttcctccagggatgatggcacatcttgtttaggcacatgcatggtggtgacaccaccaagggcaagtaacaggagcagcttcagatactgcaagagtgatggcctcatggctcttctacgtgtcaagaatgaacaatattctgtggcaatgttttgagaggaagacaaaatgtgcaggaggacagttgttcactgccaagagcagagggatgggagtggagatggagggagagaaggagatttaaaggaaaaccttgaagggtatgtatgtggactggtgcaggaagtggcgtggtcaaaccggtattgggcactgtttggtagactagaaacccatgtgaggatgtgctgcttacaaaatttggaagaatacatgtttcttttggaggaagctatgttgcggtggttgatggctctatttgagatgctaatgttctttcttccttggcttctgtttcaagcatggtgcagcatctgtcagtaagtgattggatgcagggaaaaaatgatgcattcgtttagtaaactcagtctatcacagtacatatctttcactacagcttgttcagaggaacagtgacatagaagagatcaagcaggtgcagtgaacagagatgggttttgagcgtgtatctggtgtggatctcagaaggattgagattctgatgaagtcatatgtagggaaaaagaagtgatatcaggtattcaagtggcaaacctggttgctcctgagcaggcctgcttgatccctcaaattcgatttctcatgcaaaaattcatgttggtctttgcgaggatgagccaaagtgctatctctgtgctttcatatttacaagtggcaagcctcctctcaagcatatctgattaagtttcttcccatatttctttttcggatgttggggcctgttttccaactgcatgaagatcaatttcttgcagaacatataaacagaaatgtagctgatgccatgcctgcataccacccatgagtggcatacctaatatcaatatcaaggaatgacttcctgtagtgctcttcttccttgagagcacacgcaataagctatcaaaagagtatacatcttttccaagaaaacgaaagggaatgacagagaattgccactctctaacccaagaaatatcacacaagcctcaatagaaccacaggtgtacgggacaagcatgtgccaccggaactccattcgcttgcgtacttgcacgggtagacgggtgatcaagtttctgggcaacgttacgcgtgactactcctattcatctttgccttcaccaacgtgtcaacggagaacactgaagacaacgaggtgaacggaaacgacaacaacactggagacaaggaggtaaacgggaacgacgtcgacggagaacactggagaggaggtgaacgggaacgacaacactggagacgtgaacggaaacgacaacaccaacagagacaatactgcctcaaactccagcggcggagtgccattcttatgatgctccaatttatcaactgcactaattcataccctaatttatcaattgcactagtttatatcctatatgcgtttatatcctatatgcgtcatgtttattgtcttaatattttagattaaaatatgtcaaattatgactaaatttcc

SEQ ID NO: 24912 - DNA, 2630 bp, Oryza sativa
  ref <308>: DATABASE ACCESSION NUMBER: AK100354
  ref <309>: DATABASE ENTRY DATE: 2002-08-28
gagagctcgcctcgccctcgccgattaccagttcaccacgcccgcgcgcacacggagaccgaggccgcgaaaaccctagcgccttcgtctacctccagctcgtcgcgcgcggcggatggtgatgagctcgcgctccctcagggctcgcgactagggttctcttctcactccatcgctagcggcggctcagattgggaggtattccggtgtttttttggtgctaaattttgccccccgtattggtgttttgcaggtgacgcgacgctgcgattgaggtcggcgccggtggccgtggatcgcggcgcgatggagctggagggggatccgaggctggtcggcgttgcgttgggggagtacttgacggatggggaggaggtgatggtggtgggaggggcgggggaggtggccgtggcggcccgtgtggtgaaggtggatggggggaaggttgtggtggccatggatgaggatgccgctgcaggaggtggcgtcggagtcggagtggtgagcgatttgctgtacgcgacgggatcggcggcagtgggtgaaggatacgggggtgagtgtactgacaacatgcaggagctgctggatggaggtggtgcagaggagaggatgttgggagtggaactcggtggctttcgtggtgaggcagggtggacgcttatgccggtaggagatgctgctatagagacttcagaggaaatgtctgatcctgtcacactgcaatactctgaaacagggctcacaggggatgatcagcgtgccaaataccgcctccctcctcttgacggatatggttttcgagcatctggtcttgtgtggagtaaattgaaaggtcatccttggtggcctggtgagatatttgatacttcagatgcatctgagttggcactgaaacaccagaagaagaagggcagtcatttggtagcatatttcggtagcaatacttttgcatggtgtgatgaatcccagttgaagcctttcatgtcaaactattctcaaatggcgaatcagagcaattctgatgccttcattagttcagttaaccttgctcttgaagaaatctcaaggcggatattgtcagggatgtgttgcttttgtcttccagaagatctctctgacaattgcatgtcttacatggttgagaattctgggctcagggatggagttacttgctctaaagttacacggtcagagatcttggaatgtttcaatgcagaaaattttctaagttatctcaggtcattggctctgttccctggtcaaggaggtgagctgctggatttagtgatagcatgctctcaacttacatctttctttcaatctaagggatgccatgaacttgcatcatttggaagtggcagtgagttggttgatgatggcatggactcttcttccaccaagaatgtcttgttgccagaagctgtcacctatgaacagaaacctagtgaaggtaagcccaaaagacgtaggataaaaacttgtgttaaaaaacctcagaatgatttagagttgacagaggaaaatcccatatccagtttgaacaatgagtgcacttttgttgattgcatgggcttgaacatcattgggaaagttaaagggaagagaagtgaaaagaggagaaaatatgtgccttctcctgaggtacatacaactgatcatgggcaggacgactcctggtctggattctgtttaaacaatgatccaactgataccctcggggaagcaagtgccaaaatgaggccaagacgtaagcagagatcatcgaaagaaacatgtgcaccttcatcagatctctcttcccatgtaccacctctgcaacttggattgcttggtcctaagaaacagatacaactgatagaaagataaattatccatgccgatgaacagagaattgatgagatcatgccctccgcacttgttttgagttttggcagatcagctgctcttccctcaaaattggatcttattaggttgttcagtcgctatggacctctgaaagaaaatgagactgaagttcaccagaacacgaatactgttaaagttgccttcaagagacgttttgatgctgcaaacgctttcagtgttgttggcaagtatagctattttggaccttcgctttgtagttttcggcttgtaaatttgccattttccctatccaagttaagccctgaagatcctggcacggaggttcctgcttgtagggagtctggagtggatattgtgcatgttggcatcatcagcaaagttgataaagctcaaaatctgtagagaaagcatcagcgtttgatatggtcgatccagcagggcgagctaacaaaattgtaggtgagggcacggctgaagaatcagatgagaaaatcagttagcttttcttccattaaaacttgtttatattcaggtttgtctgctagatgaaagtgttgtctcatccgggtgatgcattttgtatagaaaacgggaatccgacactagtattaaaatgttagtcttcagtaactagagcatgtatatagtcatgctttttctgtacaaacttaaggtaaaccactgtccgtttatggcaattagatatccttctgaccatattaagattaaatcaagtaggggaacccttggttgtttacact

SEQ ID NO: 24913 - DNA, 1369 bp, Oryza sativa
  ref <308>: DATABASE ACCESSION NUMBER: AK100355
  ref <309>: DATABASE ENTRY DATE: 2002-08-28
gttcctcccctctcccgattccccaattcggaggccaagcctgcaccggcaagcggcggcggcggcggcgacgaggcgagagggttcccttccgcggagccggcggagatggaggccacggcgaagtacaaccggggcaacccggcggtgaagcggatccttcaggaggtcaaggagatgcagtccaacccgtccccggacttcatggccatgcccctcgaggaggacatcttcgagtggcaatttgcgatcctggggccacgagacagtgagtttgagggaggaatctaccatggaaggatccagctgccatcggactatccgtttaagccaccatcattcatgctgctcacgccaagtggaagatttgagattcaaaagaagatttgtttgagcatatccaattaccaccctgagcactggcaaccatcatggagtgtgcgcacagctcttgtagctttgattgcattcatgccaacaccaggtggtggggcattgggttcgttggacttcaaaaaggaagatagacgggcactagctatcaaatcacgtgaaacaccaccaaagtttggctctgcagaacgccaaaaagtaattgatgagatccatgagcaaatgctcagtagggctccccctgttcctcagctgctgacaaatgaaactaatgaggagactaaccaattgcctgcatctgatgcttctgatgagcatgcacacaaggcagttggaggcgtgaacacggctgggtccaactcagactctgttaataatgaccttccaaggcctgattctgagtcagaaattgtacaacacattgttgaaggtcggacagaaggggttagcaaccattcaagggccaacttgagcagagaaaacattccaagagttgctccaacgccacagaatcctgttgttgcaatccagaagccaaagcatgacagattattgaccttggctgcatttggactcactcttgctattatggcccttgtgatcaagaagttcttcaaaatcaatggtctggccggttacattgagggcaagttttaggtaggtttgtgcatagatttgataagagctatactaccccattcggtgtctgagcggctgctatgcttaccataagttataaacccctaagaattgtaaatggctgtttagttatagacgaagttgaattggtccattggtactacccgtaccttattgtatatgcagtacacctgatgaaaatcgttctaaggtcttacatgatgtgcacaattgtatatgcggtactcatgaaaatcattacaagatattacatgatgtgcgcaactgcacgtatgttgtgcaatggccagcgatccgtttgttcttgacgggcacg

SEQ ID NO: 24914 - DNA, 1185 bp, Oryza sativa
  ref <308>: DATABASE ACCESSION NUMBER: AK100356
  ref <309>: DATABASE ENTRY DATE: 2002-08-28
gattctccttcgacaagccggccaccgtccatcgctgcttcgcttgctcccacccgaagcaacgcgaacgcgacgcgctcccctccccgccacctcgcggcggtgagaccaggcctccgcgaccctcgccggccgtccctgagcgccgcccgcaccggcaactcggtttcgaggctgatctcggcagattgctctagtacaatgagctggagatttcctctttttggcaactcgcagcagcagcaacctgatccaaatttccaggacaaccctacgcaaccttggtaccctcagtctgtagttggttcatcttcacatccatccacaccaagctcttccaatgttggtccacatcaaagagcttctgataattcccagtcttcatcgcgtgctcaaccatctccagctgaggctgcagggataattgctcggttaaaggacaaaagtgttgatgagttgcagaggctgttgaaagacaaagaggcatataatgctttcttcaattcactcgatcaagttaaaacccagaacaacttacgcgatgagcttagaaaggagacagtgcaacttgcaagagaaaatttggaaaaagagcaacggatcttggagctcaggaatcagtgcaccattataagaactacagaactagctgctgctcaagataggttggctgagttggaaaggcaaaaggatgagattatgaggtcatattctcctgctgcactgctcgacaagctccaaaaatcgatggcaaagttggacgaggagtcggaggagctgcaccagaagttcctggagaaggacattgacctcccaacctttgttcagaagtacaaaaagctccgcgccgcctaccacaagcaggcgttgctccatctcgccggcaagacctcacttcgctgaaatccatcggccgtctgtaggacgaacaccctgttgtatgagtttcccatttctccatcattctattctgtcgtggtgtctgtccacttggctgtttatcagtgccgcttaatattgtagggcttgtgaaaacgtcagggtttgattgcatttgtagatatacgattgtattcgcatcatggaattttatgtatgatcatttggctggtgccaacgccagtgaagcattttgacctgtcagagacacggaaacaaatataaatcttgtgttcaaatctgacc

SEQ ID NO: 24915 - DNA, 2696 bp, Oryza sativa
  ref <308>: DATABASE ACCESSION NUMBER: AK100357
  ref <309>: DATABASE ENTRY DATE: 2002-08-28
ggcttttctctcgccttttatttcttcttcttcttcccttctccgtcgccgaccacctcgcctccgcctcgccgccgccgccgcctccgctccaaaccctagaccaatccacccccacgccgggtggaggccctcgtagaagcggcggcatccacgcacacaccacgccggcgagccccggctctcgacgcggcggttcccggtgacggagattccgagccgcgttcgtgggactggagagcggggggggggggggggggaagtggtaatggacgacgtcgacagcgtcgtcgggagcggggacaaggccggcgaggcgccgggcgacgacgggagctccacgccgctccccgagacggtccaagttgccaattcacctacttacaaacttgatagaaagctgggaaagggaggatttgggcaagtatatgttggtcggcgtatttcctctcctggtgttaccgacaggacacctggagcaaatgctttggaggtggcaataaaatttgaacatcgaaccagcaaaggctgcaattatggagctccctatgagtggcaagtttacaacactctaagcggcattcatggtgtaccaagagtacattataaagggaggcagggggattactatatcatgattatggacatgttgggtccaagcctgtgggatgtttggaataataattcccactcaatgtctgttgaaatggttgcttgtattgctatagaagcaatctccatattggagaagatgcattcgaaagggtatgttcatggtgatgtaaaacctgagaattttttgcttggaaccccaggaaccctggaagagaaaaaactttttcttgttgaccttggattagctactaggtggaaagacactggttcgggggagcatgttgagtatgatcagaggcctgatatctttaggggaactgttcgctatgctagtgtgcatgctcacttaggaagaactggaagcagaagagatgatcttgaatcccttgcctatacacttgtttttcttttacggggtcgccttccttggcaaggataccagggagagaataaaggtttccttgtttgcaagaaaaaaatggcgacctctcgagaatctttgtgctgcttctgtccacaacctttccggcaatttattgagtatgtagtgaacttaaagtttgatgaagaaccaaactatgcaaagtgcatttctctttttgatggcattgttggtccaaacccagacataaggccaatcaacactgatggtgctcagaagcttatatatcaggttggtcaaaaaagaggtcgcctaacgatggacgaagatgatgatgagcagccaaaaaagaagattagaatgggcatgcctgcaactcaatggattagtgtttataatgccagacggcctatgaagcaaaggtatcactacaatgttgcagatggtcggttagcacagcatattacaaaaggaaatgaagatgggttgtttattagttcagtggcttcttgttcaaatctgtgggctttaataatggatgctggcactggatttacttctcaagtatatgagctttctcaacattttcttcacaaggaatggataatggatcagtgggagagaaacttctatatcacttcattagcaggtgcaaacaatggcagttctctggtggtcatgtcaagagggacgcaatatgcccaacaatcctacaaagtaagcgactcatttcccttcaagtggataaacaagaagtggaaggagggtttctatgtcactgctatggccactgcaggaagccggtgggcagtggtcatgtcccggaatgctggctttacagatcaggttgtggagcttgacttcctgtatccaagtgagggaatacatcggcgttgggacaatggttttcgcataactgcaacagcagctacatgggaccaggcggcatttatcttgagcattcccagaagaaagcctgctgatgaaacacaggaaaccctgaggacatctgctttccccagccagcatgtgaaggagaaatggtcgaagaatctttacctagcttccatttgctatggaagaacggtgtcatgaggtccacattctgtttggctgcttctttgtagagtttattcatatcaaccgctggagatatgatttagaatgcgaattttgaagggcaatgatatttttaattgcttacctatagttaactgaattgatagatggccaagcctcctgcgtgtgttctgtataggtgccccagcctggaagttgcataatgtatactgtgctgtcctgttgttgtacccccttgtccatagattgctaaagtcgccatgttgtaagttagcgagttgtaccatgtttagaagtcgtgcatatagtttaaatttatatttaacctggaggtaggcgacaaaattgtacaaagctaactcgagtctgcggtcctgttatttctctgttttggctttttcgtgtttgtgaaccccctatagtgcttagagtttggagttcttttttttctttttgagctccaaagttcggagttctcatctgtaaattaaatctgcaatgcatgcatctagtgactggtgaatctattatcattcactcttgcagtccatcacttatgtgtaattctgtttggttaatttcagattgcatgaagctaagcacagtacatttcgtcacc

SEQ ID NO: 24916 - DNA, 2681 bp, Oryza sativa
  ref <308>: DATABASE ACCESSION NUMBER: AK100358
  ref <309>: DATABASE ENTRY DATE: 2002-08-28
gatttcccctctccccacctccgcgtctcctcaccatggcttccgccttctcccccgccaccgccgcgcccgccgcgtcgccggccctcttctccgcctccacctcccggcctctctccctcaccgccgccgccgctgccgtctcagcccgtatcccgtcacggagagggttccgccgcggccgcttcaccgtctgcaatgtagccgccccctccgccacccagcaggaggctaaggcggcgggcgcgaaggagagccaacggccggtgtatccgttcgcggcgatcgtggggcaggacgagatggagctgtgcctgctgctcaacgtcatcgaccctaagatcggcggtgtcatgatcatgggagaccgtggcaccggcaaatccaccaccgtccgctcgctcgtcgacctgctcccggatatccgcgtcgttgttggcgaccctttcaattccgaccctgacgatcccgaggtcatgggccctgaggtccgggaacgcgtgctggagggtgagaagcttcctgttgtcacggccaagatcaccatggtagatcttccctcccccaacaactcggccaaattcaaagcaaagccgccattactgctcctcttccattccactggggacgtacgagctccgcgcatcccttccattccattactgaccttggctgctgcggctgcagtgcagagggggtttggtggtgcggttgatttgagcaataaattctctaggggggagggaggtatcggtcatggctgccgctgctgcaaggaggggctcatcgctgctctctcgctgcctgctgtccaggcccgccgccgccgcctcgcctgctgtcccctctgcgctccgcagggcagatgggacacaaggattgttgccgggaatccttcagaggttcagcactgcagcagtagcagaggagcccatatcacccccagtccaagtgaactacactcagctcctcattgatggaaaattcgttgattcagcatctggcaaaactttcccaactctggaccctcgtaccggggagctgattgcccatgtggctgaaggcgatgcggaggatattaaccgtgcggttcatgcggcccgcaaggctttcgatgaagggccatggccaaagatgactgcctatgagagatcccggattctgttgcggtttgctgacttgattgagaagcacaacgatgaaattgctgcattggagacatgggacaacggcaagccgtatgcgcaagctgccaacattgaagtgccaatggtggcacggctgatgcggtactatgctggttgggctgacaagatccatgggcttgtcgtgccggctgacggcccacaccatgtacaggtgctgcacgagcccattggtgtcgcaggtcagatcatcccatggaactttccgcttctgatgtttgcgtggaaagttggccctgctttggcttgtggaaacactgttgtgctcaagacggctgagcaaactcctctgtctgctctatttgcttctaagctgttgcatgaggctggactcccagacggtgttgttaacgtggtatctggttttggacctactgctggtgctgctcttgctagtcacatggatgtcgataagattgcattcactggatcgaccgatactggaaaagtcgtccttgagttggctgcaaggagcaaccttaagtcagtgacactggagctaggaggcaagtctcctttcatcatcatggatgatgctgatgttgaccatgctgttgagcttgcgcattttgcactgttctttaaccagggacaatgttgctgtgctgggtctcgtacatttgtgcatgagcgtatctatgatgagttcgtggagaaggccaaggctcgtgctctcaagcgtgtggttggtgatccattcaagaatggtgttgaacagggccctcagattgatgacgagcaattcaacaagatcttgcgctacatcaagtatggtgttgacagtggagccaaccttgtgactggtggcgacagattaggtgacaaaggttactacatccagccaacaattttctcggatgtacaggataacatgaggattgctcaagaagagatatttggccctgtgcagtccattctgaagttcaatgatctgaacgaggtcatcaagagggcaaatgcaagccagtacgggctggctgctggggtcttcaccaacaacctgaacacggccaacaccctgacccgcgcgctcagggtcgggaccgtgtgggtgaactgcttcgacgtcttcgacgccgcgatcccgttcggcggatacaagcagagcggcatcgggagggagaagggcatcgacagcctgaagaactacctgcaggtcaaggccgtcgtcacgccgatcaagaacgccgcgtggttgtaaacacatagatgtttggacatttcagaactggggaagaaataggtataatcttatggacggatgcgaaaatggcgataaattatggcgataagattatgatgatgatgatgaagaagaagaagaggaggaggaagaacagctgaaataagcttgtcctagcatggggctggcattgtctctaataaaccttgtggttggtgctcatgttactgatggagtatattgtagaagcagatttatgttcattatgaaatatatatcgcttgtttgggatg

SEQ ID NO: 24917 - DNA, 2772 bp, Oryza sativa
  ref <308>: DATABASE ACCESSION NUMBER: AK100359
  ref <309>: DATABASE ENTRY DATE: 2002-08-28
gaggaagttttacgaagcgccaactctcgtgtgtctctgctcattttcagattatctacagtgtcgcgtgcgttgtattcgtccggtgttcgttctcgcccgctcgctgattcgttgggatttcctgacaattggtatcagagcaaggtttagggcttggacgcatgatcgtgctcttgaagttgcactcatgcctcgccgtcgctcgtcgtccctgacgaagcgcactctaggaggttccggcagccacgcctcgggcagcggcgggaacgaccgcgggttggtgattcaccgcgtggtcaaggaggcgggaggcgcggcgaactaccccgtgctcacgaagacaaactacaacgagtggtctttactgatgaagatcaagctgcaagctcgatgcttgactgcttgtggggcaccattgatccgggaggggtcgcagtggagctccatgaagatcgaatggcgttggacgccatttgcagcgccgtccccgtcgagatgatctcgacgctagcaaccaaggagacgacgaaggcagcgtggaactgcatcaagaccatgcgcgtaggcaagccgagtgcacagaagctgcgctccgagtacgaggctctcgcgttccgcgacggggtgtcggtcgaggacatcgccatgcggctcaacaccatcgtgacgcagctgtccacgttgggcgaccctgagccggacgacaaggttgtcgagaagtacctttgtgtcgctcggcctaggttctcacaactcgctctttccatgaaacattgctcgacatctccactttgtccctggaggaggtcactggacgcctcaaggcggctgaggactctggccagtcgtcgtcctcgtccttaccaggtggcagcggcaagctctatctcaccgaagaagagtggcttgaacgtcacaagaaaaaggaacaggaggcgaagaagggcaatggcggaggcaacacccgtggcaagcgccgcggcgggcaagggtgcaatggtagtggtggtggcgacaacgctagcccggtgcgcaagaaggacaagtgccgtaattgtggcaaacttggccactgggccaaatattgcaggagcaaaccaaagcaggagcaagcgcacgtggcccaggaggaggatgagcccacgctcatgctcatgacgggcggctgcattgatgtggtggaggagacgggcgcgccgtgcgcgacaccgtcgccgcccgcattgcggcctcgcccagacgtcatcgagtttgtggagcagaaggtgatcgccgcgctggacgacgccaccgaccacgacaacaagcgctagatcctcgacaccgacgcgtcgaaccacatgaccggctcaacaccaacgtcaccggcaatgtccgactcggggatggctcgctcgtccacatcggagggcgcggcaccatcctattcgcctgcaagaatggatgcaattggaaagcaaatatgcaattggaaagggaaatatgcaatgtgatacaagttacctcagtggggggagcgtcgctccccccaagcttggctttcgctcagggtccttgataaggattgaacccctgaaagcgaaagtatgcctgaaggtcatcatgctgttgctgcattatgttgttgatgttggtaaactgagcattagcagattgttgccattcttgcgtttgagctatgtgttttgcgaggtcatgctggatctcccccgtctgcacatcaagggtgttcatcctcctagtgatttcacccaagtcccaacgagtggaactcaagcgccattcacatggggatggaggcataccacttgatataggaggttgattgtccccagtggatgtcatgaggcgcatgccaccggtcctcactggcgcttgaccgggttgagaccccgatgatatggcgtggagcttgggtccatccaggtgcatccccagttggtgcccaacctgcctcatacatctatacgggtgtcgaggatgatgaacttccttgttcgttccttgtcatgttgcgcgtctccctgtatgttccacatgcacgagattcttctatggtctgcaggggaatggttagttcatggcagttgtacaaatgataccccgcatttggcaacgagatttcatttgtacaaccggggaaaaagtatatcaaagatccatctgctccatgtttcaaaatatgcccttgcactagataggcctcatcaatacgcggatgagcggctgagataaaagcaatttggtcgctaacgacccctagcccttttgctatccaagtaatcagacaagtgcactcaacaggagcagagaactttatactttctaaccattgtcttatcatacattacacaggagaaattttgatctttctaaccatggcaaacatgataattaattcatctcccctaatgggtctcagatcacttctaggaaacaaagtcatagcaatccatttgtgcatgagcctaagtgtaggattatggatatcattcgttctaggtttcttgcaaattggagcactagaaatatcttcccaaaacctatttttctcgaacccagaaattcctttctggagatcaattttacaggaatcgtaaaaaccaagaagtgtactcaagcccttccatgtgagtgttgtcacatcctgatttttgtttcaggatttataaattatttaataaattattattagaagttatattaaatgttcattaatttacaagtgaagttaaatgtgggaaataaaattttcctaaatgtaaagcg

SEQ ID NO: 24918 - DNA, 2645 bp, Oryza sativa
  ref <308>: DATABASE ACCESSION NUMBER: AK100360
  ref <309>: DATABASE ENTRY DATE: 2002-08-28
ggagaatttttccattttttatgtgttttgttaggaacgagagagaaagagggagagaagtaacttaatcaaactctcaatgtgaaatctctctgttgtaaatccaagttcagtttttcttactatttgtcacacttgttcctacctgaaatgggtggaacccataatgttttctcgaaagggaaaaacagattaatactagattctttgttcttgcttttggaatgtgccttcacaccaagctgaaatttgcgtactcatgcctcctccccaagatatttggaagaaactctgtcaaaattggtctcaatttgatccactcattcaagaaggcatcttatgtgcttatgggctgcctttgctccaaaggcgcaaaagatgataccgatgccacttctgagaacaaaacaccatcgaggaattctgctgcagcaagtgctaagacagcaaccggtacaaatgatggcaactcagctgtgattgatggacagctgaaagaaaatgcaagtaaattgcaattgggtgatggagagaaggcgatcgtagctctagatgttaggaccggtagtggtaacaatgcagaactgaaggggctctcaggtgagcatgtagctgctgggtggcctgcttggctcgcaaatgtggcaccaaaagcagtagaaggctgggtgcctcggcgagccgattcatttgagaaattagacaagattggacagggaacttatagtattgtatacaaagctcgggatcttgaaacaggaaacattgttgcactaaaaaaggtgcggtttgtcaacatggaccctgagagcgtgcgctttatggctagagaaatcaaaatccttaggacactggatcatccaaatgtcataaagcttcaagggattgtaacatctcgcgtatcgcaaagcctgtatcttgtcttcgaatacatggaacatgacctttctggtctcattgcaactcctggcctcaagctctctgagccacaggtggttgttatgcttctcttacatggattttttagaaaattcatcttacattgatatcgtttaagaaaattggatgaactaaaatgattaaacatgaatatcagataaagtgcttcgttcagcagctgcttcatggccttgatcattgccacaaaaatggagttcttcatagagacatcaaaggctcaaaccttttgattgataacaatggagtgctgaaagttgccgactttggactggcaatatcttatgatcccaagaatccacaaccgctgacaagccgtgttgtgacattgtggtacagaccaccagaacttttgctcggtgcaacagaatatggtgtggctgttgatatgtggagcacagggtgcattgtggcagaactctttgctggaaaaccaatcatgccaggaagaactgaggtggagcaaattcacaagatttttaagctctgtgggtcacccatggatgattattgcaagaaatcaaaagtgccagagacagcaatgttcaagcctcagcatcagtataggcggtgtgttgctgagactttcaaagtttttcctacttcagctgttgttctcatagactccttgctttcattagacccaggagctcgaggaacagctgcctcagctcttcaaagtgattttttcacaaaagagccatttgcatgcgacccatcaagcctgccaaaacttccaccaagcaaggagtatgatgttagactgaggcaagaggaagccaggaggcaaaaaaccgcagctcttgccggacaaggagctgaatctgtcaggccagaaaatgacaatcgtgtaacgaatcgtactattagtggtgttaatggtgaattgaagcaacaaacacacaccagctcaaagagcaacagcgaggtgttcaaccaagaggacagtgttccagggtttagggtggaaccacgggaacgtccaactgcggtgcagctccctgggtacagttccacatggaacaacatggagggcgacaatgaccagccaacagtacctggccgcgcttgctgctcagtgcgcgtcgcgaatccttgtggcataaggaagaaggggtcatcacactcgctcataccacagtttggtgcgaccgatttgaggagcactgttgaagctactgatcataacgactcaccagacaggcatgatgagaacaagaacccagaagtcaaggacggcatgaaccatgggaggaagtacagaaggatccaccactcagggccattgatgccgccaggagggaacgttgaggacatgctcaaggagcacgagaggcagatccaagaagccgttcgcaaggcgcgtgtcagcaagccaggcaggtagcttaagtagttggaaggtgccttggaattctgagaagatggaccagagttcagaggttgcaacctcctatcttctcctgcaatttcaggctgctgcaaaagcccatacgtagagttttagcttgtaacaatgtgttatcaggtaggatataatcaccatgtaagattgaagaacatgactggatttatagaaattttcccctcatagcagtacctgaaattaagagtttttgtgaggttttcaacagttggattgtgattttttccttatttaatttggagccctgctctcctggagcatg

SEQ ID NO: 24919 - DNA, 1652 bp, Oryza sativa
  ref <308>: DATABASE ACCESSION NUMBER: AK100361
  ref <309>: DATABASE ENTRY DATE: 2002-08-28
gagtaatagctaaggttagctgaaacgtacgtgttgccgtgcatgcagctcgcctgtgtgtctctggtgcccccgtcgccctcgctgcccccgacacgtctccccctctccacgcgtcgccgtcgtcttcctcctcccctcgccgtggtggctatatacaccgccgcggcgatcaccttgcctccttctgtctgtcgatctgtccgtcgtcgacgacgtctcgatcgatcggtggtggtggtggtggtggccatgagtctcgtttgagaggtgagccgccggccgggccattgatgagagcggcggcgtcgtccgggcgacgcgatgtccgttgtggcggctgcggcggcggcggtggcggtggcgccgccgtcgtcgccgtacgggatgtgcggcggtggtggtgggggtggtggggcgaggaagaggaaggacgtggtgcagcagctggaggatctggctggtggggtagtgggggatgatggcggcggcggcggcggcggcggcgacgtcgtgcacgggctgttcgtgctggagacggtcgaggagaaggcggaggaggaggaggaggagcggtcctccattggcgccgactccgaggatgaacaggatgatggtgaggaggaggtggagagcaaggcgtcgtcggcggcggtggcggccgagacgtgtcggaggaagacgaagacgaagtgcggcggcggcggcggtggcgcgctcgcctgcctcgacgccctcgacgacgcgctcccaatcaagagggggctgtccaacttcttctccggcaagtcgaggtcgttcgccaacctgcaggacgtggccgccgccggcgcaaccacggcgagcctcgccaagccggagaacccattcaacaagcgccgccgcatcctccgctgctcctccatccgccgcgtctcctccacctccctcaccgcgctcccgcccttcctgccgccgcaccaccatccaccgccgcccgacgacggcggcggcggcggcggcaatggctgaggacaacgacgaggaggaggaggaggaggatgaaatgatgaaaagaatcaaattcagtgaggacaaattaattaagcagagatggataatatggatggatcccttttgtaatagtttgggatctcatctcatcaaatcaaccatcaaaaataccttatattagtgcttaggtttcttgatttcttcttctcttatattagctgcatgccaatcctacctatgaacaaactcactgttaattagttgcataattgcattgaccaagagatgagagcatcatatcatgcaccaaatacacttatggagaactcctattgaacaatgtttaattcttggtgcatatatatgccatgtatgtatcctactaattcctaactagctagtgcctttgatctcattgggctaaccttcaattttgttcaatagcaataaccttctgtcaatatagctgcaggaggcatgcagagatgaattaatcaagacccaattagtcatcccaatctgttctttgcacttatctcatctgcataatgcatatgcaattgtttcatgtatataagtactcctagttagggaccaacaaccacacttgtaaccaccttgtgtgcatccatccatgaatgaacaatactatcatcacc

SEQ ID NO: 24920 - DNA, 4063 bp, Oryza sativa
  ref <308>: DATABASE ACCESSION NUMBER: AK100362
  ref <309>: DATABASE ENTRY DATE: 2002-08-28
gtccaccactgctttccctcctcctcatcctcatcttcatctctagacctcatcttctccagccaccaccgcctcccttcccaccggtggtggcagcgggaagacagcggctcggttgagcccggcggggagggcacgatttggtatgggaggagcagcggcgactccatccggcggtggatccgccgcctcctagtcccagctctctctcccccgatcctcctcctccccttcctccaccgccaccacccacccctctccctctctcagatctggtgcgcggggagcggtggaggctacggcggcggcggcggcgagatcggtagcagtgatggtggagaggacggatccgatggcggtggttctcgtcaaccagttcaaggacgacgacagcagcggctgctgcaacgatggataggctctgggcggctcctccactctcctcccctctctcatatccagtggctcggggtggtggggcgtggccgacgcatccggcggcggagctcgggtatcgatccggcatgtttttttttctccaaaatcaatttttcttggtggtcgggaaacggattttcaattttcttgttttcgctcgaatatctttttcgctggcggtcaacgtaacttaaccgcttgtgaaaacaagctttaaagtttcgctagtgaagattgttattttcacttgccatttgtttgcgggcggcctgacagtgccaccagcgaaaaactcttttgctagtagtgattgctagatggtcagtagagaacttgtggagcatatgactatcaactaacagtacacttcagcagaaagaggatggttctagctctccgatggtttaatattgaaacgtacagcccacccaccaccaccccagtcgtccccagctaagcgctcccttgcttgcctcagtagacgagctgccaactagtagcactccagcaagcagcgggtcagcggagtccggagggcgcacgtgcgccgcagcgaggtatcagcatggccaggcggcggctggctggccggccgggttcggcaagcggctaagcaggtaattaagggactgcagatactgcttgtgatcatcccgttaaaatttcgtctttcttgtcttgggccaggtttaattcctaattttttcttcaaactttcaacttttccatcacatcaaaacttttctacacacacaaactttcaacttaattttccgtcacatcgttccaatttcaatcaaacttctaattttagcgtgaactaaacacacccttggttgtgactctgggagtcgatacataggccttaatgctcgtagtttgtggattttggggtaaactggcgtggaactttacttggataccacctgggagttgatgtgattttagtgtttagtacagtttagagtttattacctaccggtttcttggtgcctggcgcacactgagcatgcaaatgcagtgagagccagtatcatctaagacggctggacctgaaatattttaccatgtatatatcaaactcgacttgatcaggtgtttagcggaggaaggatcgatgtccggcgccggacagagccgtggtcatcgccttggattacacattgattcggattggccagaggtcttgttgatcaatgactatgcggtgttcatggggtacctgtcgatggttgtcaccgggacggggttcctggtgctcacgtggtccaccgtcatcctcctcggtggattcgtctccatgctatccaacaaggacttctggagtctcacggtgatcacgctcgttcaaacaaggtgagctatctatagccatctccaccagacttatatttatttcgcgttcccaacattaaccagttcagccaagcatttggagtttcgcattgctagctagctactagtttactgtcagatctagtgttgcgaaccgaatatgctgcaaaacgttgcaattccagagtggctttatatactacattgatatgaaaatattcaagtcccatatttgcaaaatcaactatttttaaaatcgaattattttctccccttttcaagaagcatgtattttgtatatttctctccccatttgataataatttcatcaagaattttaaaagagaatataaccaataaagcacaaatgtcatgatttcatgattgtgacatgtaataatcacttcttttttaatttttattttaattttctgaaatttttttgagagctttgaagtgtacctaaagcaatgcaattcatggtcatatgttgcaagacaaatgagataaattcatcaactagttaacaagcatgcattagagtataaacatgaatcaaaggtattacaattaagctcaaatctctactattataaaaattgaagatgtttttgccggtggcttggtaagtcgtcatgtccgaattagcctcgcacataattactgccaatttaattatttatgtgccccacatgtatgagctttaaacattagattttccataagaaaatttgcttgttcggatcagtgcctttggccgattgcgtttcatcctgtgcattgtcacgaaccaaccaccaccgcgaggttgtcatcttgctgatacggtctgttcggcaacacggtttgggacctgctgtcgtgcacctatatcaacaccaaccagcagcagtcaggtgtgttgccgtgcgccgaggcaagcagcacgacgtaccattgttgattattctctacacgcacacaccgtatcgagaagaattcctactgtgttcatcagaaactcaatccaatattgtctactgtgtatacgtgttccaaaaagattaaagaaaagatcaggatcgatatcaaagccgagatctattactacccacatatcgaaaatccacgcgtgcagcaagacgatcagcaacagcagccgatcgatgacggttgccaagagaaatacgaaaacctaatcagagaaatattcaatcaagctactgcgcacatatatctttacctcttaaattatatttctatctctactattataaaaattgtagatgttttcgtcagtattttagtacgtcatccgcgtatgagtcggtttttaagtccgtttgattttggaaatacaaatccgtatttgagtcagtttttaagttcgttcgcttttggaaatacagaagaaatcgtataagaaatctctttaaaaactcacatactactaacttgagacgttcggacacctaattacagctcatgattttctaacacaatatatatccaagcgaatttgacacagtgaatttcatcttaactcgatataatataataagattaaaataatcttcacccgttgcaacacacgggcattttttctagtcaataataaagataatgatttcaaacgatttataatgcaacatattcacaagtacataggttgaaaaaaaatccctatatatatatatatacctattgcatcatcactctttctcaaaataacttcttcacaaaaataaccaagagaattttcaacaagtattagagctttttgtgctcattttgacattgataataaaatatctcaatttatttcgagtacgtccgtgtcgttaagaatgttctaaggatttggtacccattattttccttactgtaaatacggctttatcgtcaatactgtttccaaggattctgtattcattttttttctctcatcataagcaactttttattctcctgtgacatttggaataaacaataagcaatttgaggaataacaatccaataagtataaatataagcattaatcatccaaactcagcacttgctttaacattgcatatttacttaaatcaagtaaaagaattagtgtcatgcatcatctcacttaaaagtaatatccaagccacatgaaaagactaaaatgcatacaagctaacatatcaacaaatatacatcaattattttactagcatgcacaagaatatactagaggtatataccaaagctcttctttttctcatttttttctttattttcagatttagagcaatgcatggatatagacatgaatgcaccg

SEQ ID NO: 24921 - DNA, 1308 bp, Oryza sativa
  ref <308>: DATABASE ACCESSION NUMBER: AK100363
  ref <309>: DATABASE ENTRY DATE: 2002-08-28
gaacgtgacaaatgcgacatggttcatgcttgctcgattgattgattgcaatagacaaaaactcttcttgtctcttcacctcgccaccggggccgccatacaattacctccataaatcttggatagaatgttaggagtaactaactctgcactgtgccattgctgtgtgtcagtgtgtgtatatatatccagctgccagctgcagagtgaagcataaacatcagtagacgacggcgatggcgcccaagcgacttgtctgcttcttggccgtggccgccgcgctagccaccacctgccacgggtggggcgccggcgccggcgatgtcgtgtcgtcgtcggcggcggcgctctcgttcgtggacaggctgaggcagatgatgatcccggcggccgtgggcgacggcgattactgcgacagctggcgcgtcggcgtggaggcgaacaacgtgcgggggtggacggcgacgccgcgcaagtgcgacaactacgtcgagaactacatgcgcggccaccactaccgccgcgacagcaaggtcgtcgtcgacgaggccgccgcctacgccgaggccgccgtcctctccggcgaccccgccgccgacgccaacgccacctgggtgttcgacgtcgacgagaccgccctctcccacgtcaagttctacaagaagcacggcttcgggtaccacagaaccgacgagccggcgttcatggagtggctgatcgccggcagagcgtcggcgttgccgaacacggtgacgctgtacaagaagctgctcctcctcggcgtcaagatcgtcttcctgtcggacaggccggacacgccggagctgaggaacgccaccgccaccaatctcatcaaggaaggcttcgactgctgggacgagctcatattaaggtcggagaactcgacggcgacgggatcggtggtggagtacaagtcgggggagaggaagaagctggaggaggagaaggggatggtgatcatcggcaacatcggcgaccagtggagcgacctgctgggctcgccggagggccgccggaccttcaagctgcccaaccctgcctactacatcgacaactacaagcgcgccggcgccgccgtccgcgccgccgtagccattacagcctcctcctcgtcgtcgtcgtcgtgaagcaaacgatgcctagctagctatagtactcaactttgaattgcatttttttttcagacacataagttcagttaataatcggtcgtgtacgtacctgccgtgctgtgcactgttgtatctttttggtgagacgattgaaatatctttgggtttatctttt

SEQ ID NO: 24922 - DNA, 2212 bp, Oryza sativa
  ref <308>: DATABASE ACCESSION NUMBER: AK100364
  ref <309>: DATABASE ENTRY DATE: 2002-08-28
gaccgcgccacccatccatcgccagccatgcacaccctcgctctgacgaccctgtcacgttgagctacgctcggaggaggacgccacgacggcgaccgggaagaagatgaacccgctccctcccccggccagccggctgtgggaggcgagcatccgcaagctcaagtactccaccatcctccgcggctccgtcgtcccctccggcgccgccttcgatggtgcggcggcggcggccaccggaggtgaccccgtcacgctcaccccaagcctctccgtcagctcctccacctccaacaccatctaccagtacgaagacggcgacgacgacatcgactccgtcctcgacgacgtcgacaccgacgacgacgacgtcgacgaggcgtccctcggcgagcccagccactccgaccagctgctgcccagcggagacttctaccagggcgacctgcgcggcgacctcccccacggcgccggcaagtatctctggacggacggcagcatgtacgaggggtcgtggcgcggcggccgcgcggccgggcgcggcaagttctcgtggtcgtcgggcgccatctacgagggcgacctcgccggcgggtacatgcacggccaaggaacctacatcggcgagctcggggacacgttcgccgggctgtgggcgaacaacctccggcacggccgcggcacgcaggcgtacgtcaacggcgacgtgtacgacggccactggcgcgacgggctgcaggatgggcacggccggtacatctggcgcggcggccacgagtacatcgggacgtggaaggccggcgagatgcacggccgcgggacggtgatatgggcggacggcgaccggtacgacggcgcgtgggaggacgccaagcccaaggggcagggcacgttccggtggtccgacggcgggatgtacatcggcctgtggtgccaggagtccggcgagacgcagggcaagggcgtgtactacccgccgtccggtggcccggcggtgccgttgccccgggaacccaaggaggtgatcacgaagctgctcgaggagctggagatgtccgaggggaagacggtgtcgctgctgccgtcgcagaaggtgctgacatggcccggggtggagcccgtgacgaagaagccggtgtggcggccgccggaggtcgccgctgaccaagggatgtggcggccgccggaggtcggagctgaccaagggaggaggtcgagcaggaggaacagcatgtcgtccgacattgacagcctggttgagggggaggacggcggcgaggagactcgcaacgacaggtcatgggtgcggacaccgtcgtgtatgcgcgcgcccacgctgccgaagccggggaagaagcagggggagaccatctccaagggccacaagaactacgaactgatgctcaacttgcagctgggtatcagacatgctgtaggaaggcagtcagctcctgcttcattggatcttaaatcatcagcatttgatccgaaagagaaggtgtggacaagatttcctcctgaaggatcaaagcatactcctcctcaccagtcatgtgatttccggtggaaggactactgtccattggttttcaggactttgcgcaagctctttgatgttgacccaggagactacatgctctccatttgcggggatgatgcactgctggagttttcatctcccggtaaaagtggaagtttcttttatttcaccaatgatgacaagtacatgatcaaaacaatgaagaaagcagaagttaaagtacttctgaggatgcttccagcctattataaacatgttcgatcttttgataatactctagtaacaaaattttttggcctgcattgtgttaaaattacaggagctattcagaaaaaggttcggtttgttataatggggaatcttttctgctccaactattcaatccacagacgctttgatttgaaaggatcatcacatggtcgcacaacggacaaacccctcgatcaaattgatgagactaccactttgaaggaccttgatctaatttcattttccggttagagggatcatggtatgaagatttctgcaggcaagtggacaaagattgtgagtttctggagcaagagagaattatggattacagtcttctggttggcgttcacttcaaagaccgatgcaaagacagcagcagtcctgacaacgagacaactcaaactgctcttgaagatgagg

SEQ ID NO: 24923 - DNA, 2430 bp, Oryza sativa
  ref <308>: DATABASE ACCESSION NUMBER: AK100365
  ref <309>: DATABASE ENTRY DATE: 2002-08-28
gtttctctcttctcccgcaattttataatctcgctcgatccaatctgctccccttcttcttctactctccccatctcggctctcgccatcgccatcctcctctcccttcccggagaagacgcctccctccgccgatcaccacccggtagggcgaggagggagccaaatccaaatcagcagccatggcgcagatgctgctccatgggacgctgcacgccaccatcttcgaggcggcgtcgctctccaacccgcaccgcgccagcggaagcgcccccaagttcatccgcaagtttgtggaggggattgaggacactgtgggtgtcggcaaaggcgccaccaaggtgtattctaccattgatctggagaaagctcgtgtagggcgaactaggatgataaccaatgagcccatcaaccctcgctggtatgagtcgttccacatctattgcgctcatatagcttccaatgtgatcttcactgtcaagattgataaccctattggggcaacgaatattgggagggcttacctgcctgtccaagagcttctcaatggagaggagattgacagatggctcgatatctgtgataataaccgcgagcctgttggtgagagcaagatccatgtgaagcttcagtacttcgatgtttccaaggatcgcaattgggcgaggggtgtccgcagtaccaagtatccaggtgttccttacaccttcttctctcagaggcaagggtgcaaagttaccttgtaccaagatgctcatgtcccagacaacttcattccaaagattccgcttgccgatggcaagaattatgaaccccacagatgctgggaggatatctttgatgctataagcaatgctcaacatttgatttacatcactggctggtctgtatacactgagatcaccttggttagggactccaatcgtccaaaacctggaggggatgtcacccttggggagttgctcaagaagaaggccagtgaaggtgttcgggtcctcatgcttgtgtgggatgacaggacttcagttggtttgctaaagagggatggcttgatggcaacacatgatgaggaaactgaaaattacttccatggctctgacgtgaactgtgttctatgccctcgcaaccctgatgactcaggcagcattgttcaggatctgtcgatctcaactatgtttacacaccatcagaagatagtagttgttgaccatgagttgccaaaccagggctcccaacaaaggaggatagtcagtttcgttggtggccttgatctctgtgatggaaggtatgacactcagtaccattctttgtttaggacactcgacagtacccatcatgatgacttccaccagccaaactttgccactgcatcaatcaaaaagggtggacctagagagccatggcatgatattcactcacggctggaagggccaatcgcatgggatgttctttacaatttcgagcagagatggagaaagcagggtggtaaggatctccttctgcagctcagggatctgtctgacactattattccaccttctcctgttatgtttccagaggacagagaaacatggaatgttcagctatttagatccattgatggtggtgctgcttttgggttccctgatacccctgaggaggctgcaaaagctgggcttgtaagcggaaaggatcaaatcattgacaggagcatccaggatgcatacatacatgccatccggagggcaaagaacttcatctatatagagaaccaatacttccttggaagttcctatgcctggaaacccgagggcatcaagcctgaagacattggtgccctgcatttgattcctaaggagcttgcactgaaagttgtcagtaagattgaagccggggaacggttcactgtttatgttgtggtgccaatgtggcctgagggtgttccagagagtggatctgttcaggcaatcctggactggcaaaggagaacaatggagatgatgtacactgacattacagaggctctccaagccaagggaattgaagcgaaccccaaggactacctcactttcttctgcttgggtaaccgtgaggtgaagcaggctggggaatatcagcctgaagaacaaccagaagctgacactgattacagccgagctcaggaagctaggaggttcatgatctatgtccacaccaaaatgatgatagttgacgatgagtacatcatcatcggttctgcaaacatcaaccagaggtcgatggacggcgctagggactctgagatcgccatgggcgggtaccagccataccatctggcgaccaggcaaccagcccgtggccagatccatggcttccggatggcgctgtggtacgagcacctgggaatgctggatgatgtgttccagcgccccgagagcctggagtgtgtgcagaaggtgaacaggatcgcgg

SEQ ID NO: 24924 - DNA, 2324 bp, Oryza sativa
  ref <308>: DATABASE ACCESSION NUMBER: AK100366
  ref <309>: DATABASE ENTRY DATE: 2002-08-28
ggcgcgggccactcacccgctccaaacttctggtcatcctcgtcctcgccttcctcctcctcctcctcgatcccaacccaattcccccgcggccgcatgtagagctagccccacccggcgagctctcccacctcctccatggcgatggcggtgctgctccgcaaggtgtggggctccgtgctggcccgcgcggcggcgggggcggcgccgccggaggccttcgccgccgccgcctccccgcgccgcccgcaggccgccggggagtacggctcgctgggcgcgctcgacgttctcccgatcgacgtgctcgcgcagatcctgcgcctgctcggccccgccgacgccgcgcggtccaccgccgtgtgccgcgcctggcgcctgctcgcctccgacaatggcctgtgggccttcttcctccgcctcggccccgatccgtgggagctcgtcgtcttcgccgagacccacctcggcgctggcccggccttgcaccccgggctgtactacgatagctcgccgcagctttcgttcaagcatgtttacacccgtcgagcggtggttcctggttcgattatagtcgatggtggatcgggatattgtaagtacggatggagcaagtatgctgctccatctgggcgttgtgcgacattcttggaatttggcaacatcgagtcacctatgtatgcaaggcttcgtcacttcttgtccacaatctacaccaggttctaaaacttcaacagtacaacttgcttatttcgtctgattaatcttgccttagctaccacatatttgtccagaatggatcttttatgttcctgaaaggattttcttttgtgtcggtattggattaattcaattcgattgtaccatgaaaacttgacttctacaggatgcaagtaaagccttctactcaaccaattattgttgttcttccactctgccactcggatggttagtgtgtagtattttcagttgggtcaattttctagatggcagttctgtatttgaaaatagtatattgcaagagaaatttatggtcaaattaattttgtaagaccataccaagtcaatttgctccttataaaaatgaagggaggagggtattcgtgttgcacatcccatcaactctcttgttattcctgtttcactaaactaatcccaacttcttttgctgcaagtcaccaagtctaattcaaaatttacacagatactgagtctgctagggcttcaagaaagcaatacagggacacattatactcggttctgttcgatatgaatgttcctgctgtttgttctgttgatcaggcagttctagctttatatgctgctaaacgaacttctggtattgttgtcaacattggatttaatgccacatctattgttcctatatttcaaggtagggtaatgcatgagataggtgttgaaactgtggggcaaggtgccctcaaacttactggatttctgaaggaactaatgcagcagagaaatataacatttgagtcactgtacactgttcgaaccatcaaagagaaactttgttacgtcgcggctgattatgaagcagaaaaacgtaaagatacacaagcttcctgtgaagtagatggtgaaggatggtttactctgtctgaagaaaggttcaagactgcagaaatccttttccagccccagattggaggagtgcgtgctatgggcttgcataaagcagtatctctgtgtatggatcactgctacaattcagaagtgttcggtgatgacaactggtacaagacagtagttttatccggtggatcttcatgcttacctggtttatcagagagactggaaaaggagctccgtgaacttcttccagcacatatttcagaagggataagggttattcctcccccatttggcaccgattctgcctggtttggtgcaaaaatgattagcaacgtgagcactttcacggaggcatggtgcatcaagaagaagcagtttcgccagaagactcgtcgcaatggtccatcttttgtgaatgtgtggtaatagagccatataattgcaatacgattgcacgggaagagtccgtgatgaggggaaataaacatggggctgtctgttagcttttctccatatccagagtacggtacatagcaatatagcctagtcccaggtgtatagaacaaaagtgaagtccacattgtgtagaaatggactacaggtgaatacataatatactattgtttttattataggatgttgtagaaggaaatgctccaacacgatgtacggacgtgaattttgttgtcgattggcaaaagagacctgctgttgtttgttgtgaaagt

SEQ ID NO: 24925 - DNA, 3019 bp, Oryza sativa
  ref <308>: DATABASE ACCESSION NUMBER: AK100367
  ref <309>: DATABASE ENTRY DATE: 2002-08-28
ggtccacccactttctcctttctctccactttttacggatctggtgctcctcccctgccccaccgccgcctacggccaaggagtggcggtgtgcaggcgacgggcggccgacctaatcaccgcccactcccaccgggggtcgtcgtcgggtcgtggccgtatcggcgtgcggctccggcagcggcagttcagggatgaggaggagcggcggcgaggcgcatccagccacggctcggagacgaggaggttcgggcggtgaatccggtgatggcgaggcgtgtgggcggcgtgcggctattggctcgggcttcctccggtagccagcgatggcgacgctttgcggaagcggcgggcgcggccggcgacgacgacggcctgcgacggcgacggcttgcggcagcggcaggcgaccgtcctccacccggatccggcggtggcggcccggtggcggcgggaggagagcccagcggcgtagtcggcaatggcgtggccggcgacggcgacggcttgcgacggtggaggatgggggaggcgagggggaagaggcttcgtgctcctccaatcgggcgcattcgccgccattccgcccgcgctcgccgaggccatcggcgccgctgggtagggcgcgagcgtcttggaggtgatgggcggggcgcgcagactgctcgtgccggacccgaccgggacctgctcccaactcccgtggcatgcgagttgagtggtgccagatccgttggctacgactgggcaacggctgatccggggtaggcttcgtgctcactggtgctgccttctcccatgactccgacctccctctctagccgtcgccggcgtccactgctggatgcagtcaatgtaggctcgggactcgcctgatctggggtggatcgacgaccattgggctgtcgaagcatagcagagacccaggcagagatgtactccctccgtaccaaaaaaagacaaaccctggtttccgtgcccaatgttttaccgtccgtcttatttgaaaaaattatgaaaaaaattaaaaagacaagtcacgcacaaagtattaatcatgttttatcatctaacaacaataaaaatacgaattataaaaaaattttatataagacggacagtcaaagttggatacgcaaacccaggatttgcctttttttgggacggagggagtaggttgctgcttgcaggtccgccactgcccgtggacagacagtgctcgtcgatcgcatttgctgtaggcgccagcgactagtcctgccaggcctgactggagaacggtgggatttggtgctgctgcaccctcagcggcgctggttagttccttttttttttttattggatcgatggaagttctgagctgagcttgttactattgtgcttttggctttttgtggtctcgatctagttgaacagagctgttctaagagcatcttaatattattcccttgcttagcagtaaccaagtattacaaatcaatagcgataagtgtatgaaataaaaaatttgcccctttatatctttgtagtttgtaataagcctgctaaattctcaatgttcatgtgttctgttcaaaatttatatgattcagaaattatccaaaccacttgtgctagcgttattcataaattaagatgtcatggctgatatgatctgtgtatgtttgaatttcgacagtaatctcaaatttatacaactcaaaacttgtataaaccaccggtgctatctgttagagcttgcattttcagaaatagctgtaattggacatattttcataaatgatcatgtattcttagtgaatttggttctatgtattgttgtgatgattgctgcttttgctggatcaagcatcatgagtgaatagccctgataccagaggttttttttttttgcaacgcatgaagaaccatgctctcatcttaattttcatttgttcagtcatgaattgtttgtgcaatatattcagaaaagtgttcccatgtgaatttcatttgtttagtgatatatttgtgcgtgcaatatttggataactgccaatagcatcatcatcaggttctctgatatgtttgataaatgaaaactctagaagctcaattaggtagcagttctatgaagttttgtggttcaacagagcatatcaattgattttctctgaactactctctgaaattttgtggttcaacagagcaaaggtgtttgaataaaataatctacaacctattaacgtgatgatggtaacgtttcttatcagtgaaggattaaaactccttgattcccatttatttatgcgaaggaaaaaatgagccattttttatcccagttttgcatcgcggaggaaaaaaaaatctatttttcaaatgttatttactgatgtgtcatgattcatgatctgagaatttatcattgttttagacggatctatttggttttacttaaatgctcaccctctagttttaacccttctagaactgtgccatctgcccatctgtaatatagtgtagtggaatgattcattcggctcagttgaactagaaaatctagaaaatgaaccttgcagctgaatgatttattccgatcatcttgaccaaatagatttatttctggatttggtatttgctttctcattctgctgagttgcacaatgttcaattgtaggctgggagtaaggcgagcccaagaacattatagtccggatttaatttttgctttctcattttcaggtatagcagagtacattatgctcatgtgaatacaaccaagtacattttcagatccggttgctagctagtgccatggaggagcagcaacggccacctccatgacgcgactccgtcaatgtccagccagcgccagccatctccgccaccaaccaccggccggtgtctagatctatgttatattgtcatggagtaaaatgtttactcacaccatatgattgtttcatgccgtgtaggcttattgtaaaaaagttactattctcatatttctcattgtattcatatcgtgtaggtttattgt

SEQ ID NO: 24926 - DNA, 3241 bp, Oryza sativa
  ref <308>: DATABASE ACCESSION NUMBER: AK100368
  ref <309>: DATABASE ENTRY DATE: 2002-08-28
gtccgttacggcttctcgtctcctctccccttttcacgccatggccgagcgatctcccggccgccggaatggacgcggcggcggcggcagctgcggcgggaggaggtggtaacgccgccgcgcggagcagccccgccgcgaaatcctccaccatctcctcttcccgcagcgctaatcttcttctcccctttcacgtcgttaccgaggcaccgagcgatcgacccggccgaaatggcggcgggaggaggaggtggtggtagcgccgccgcgcggccagcactcgggaaactaaagcttgctctagttggaagctaacttgagctgaattagccaattagccatcagaggaatgatgcaagggataatgcttgcagcgttgcttgttctttgccagttgatcaaaaatgcaggcaagatcactgatgctgcgtgcatctccagtgagagggacgctctgcttgctttcaaagccggtttcgctgatcctgctggaggggcgctgcgtttctggcaaggccaagactgctgcgcatggagcggggtgtcctgcagcaaaaagatcggcagtgttgtcagcctggatatcggccattatgatctcactttcagaggtgaaatcaactcatctctggctgttctgacacatctagtgtaccttaacctgagtggaaatgatttcggtggggtggccatcccagatttcataggctccttcgagaagctgaggtatcttgatctttcgcatgctggttttggagggacagttcctcctcggcttggtaatttgtcaatgctcagccaccttgatttgagctcaccaagtcatacagttactgtcaaaagcttcaactgggtgtctcgcctcacttcactggtctatctagaccttagttggttgtatcttgctgcttcctctgattggttgcaggctacaaatacgcttcctttgcttaaagtcctctgcttgaatcatgcgtttcttcctgccacagacttgaatgctctttctcataccaacttcacagccattagggtacttgatctgaagagtaacaacttcagttcacgaatgccagattggatttcaaagctaagttctcttgcatatttggacttgtctagctgtgagctttcaggctcacttcccaggaaccttgggaacttgacatccctcagtttttttcaattacgagcgaacaaccttgaaggtgaaatacctggatccatgagtaggttgtgcaacctacgccacattgatttatctggaaaccatttctcaggagatattacaagacttgctaataccttgttcccctgcatgaaccagttgaagattcttgaccttgcactcaataatctaaccgggagtctgtctggttgggtcaggcacatagcaagtgtaactactcttgatcttagtgagaactcattatccggacgagtatcagatgatattggcaagttatcaaacttaacctacttagatctttcagccaattcatttcaaggcacactgtccgaactccactttgctaatctgtccaggctggatatgctaattttagagtccatttatgtgaagattgtcactgaagcagactgggtgccaccattccaactccgagtcctagtactttatggatgtcaggtaggaccacacttcccagcatggctgaagtcacaagccaaaattgaaatgatcgagttaagcagagcacagatcaagagcaagttacctgattggctctggaacttctcatcaacaattagtgccttggatgtctcaggaaatatgattaatggaaagttgcccaaaagtttaaagcacatgaaagcgctggagttacttgacatgagttcgaaccaactggagggatgcattcctgatctgccatctagtgtgaaagtattggatctgtcaagtaaccacttatatggaccattgccacaaagactgggtgccaaagaaatatattatctatcactcaaagacaacttcctcagtggaagcatccctacgtacctatgtgagatggtttggatggaacaggttcttctatcactaaacaacttctcaggtgtactcccaaattgctggaggaaaggttcagcgctgagagttatagatttctcaaacaataacattcacggagaaatatcttcaaccatgggtcatctaacttcccttggatcattgttactccacaggaacaagttatctggtccactccccacctcactgaagctatgcaacagattaatctttcttgatctttcagaaaataatttgtccggaaccataccaacctggataggtgacagcctgcagtctctgattctcctcagtttaaggtccaacaacttttctggtaaaattcccgagctactatctcagcttcacgctcttcaaattttagatattgctgataacaatctatcaggccctgtacccaaatccttgggaaatttagcagccatgcagttaggcaggcacatgatacaacagcaatttagcaccatttcggacatccatttcatggtttatggtgcaggtggtgcagtcttgtatcggttgtatgcatacttatacttgaatagtctacttgctggcaagcttcaatataatggaactgccttctatattgatctctctggtaaccaattagcaggggagattcctattgaaattggatttctatctggactaacgggtttaaatttgtcaggaaatcacataagagggagcattccagaggagttgggaaacttaagaagtttagaggtgcttgatctctccaggaatgatctgtcaggcccaattccacagtgcttcctgtcattgtctggtttgagccatctgaatttatcatacaatgacctttcaggagctataccatttggaaatgaacttgcaacttttgcagaaagcacatactttggtaatgcacatacaactgtcaagaagctgtttgtaccacaaaaggaagcatcaactaaactttgacacgggaacatacttaagtgcactgcttgggtttgcatttggattctgtattatgttcgtcatcctgataccctacatggttgcatgaaagactcttatgatagcctatgctttggattggctattatgatatatgaagattttgttttatagttagttgagcattgtaatgattttatccgaacatatttgacaggtgggttaagcggtgtaatgcactaaggcttagctcttttc

SEQ ID NO: 24927 - DNA, 2234 bp, Oryza sativa
  ref <308>: DATABASE ACCESSION NUMBER: AK100369
  ref <309>: DATABASE ENTRY DATE: 2002-08-28
tagcagccactcatttattttccagttccgcctccgtttcaaccctctctccctcttcctcagccggggaaacttccttttacacccaccaaacgcgagcgcacacacacagagccacacgggagtggggatactctcgccgaagtgatcggcgccgcggcggcgtgatggcggcggcggcgacgatgacgtggcacgaggagctggccacgctggtgggcgacacgggcgtgcggttccccggcgcgggcgggggatcggcggcgaatgtggcggcggcggtggggggcgggtggtacaggggggaggaggaggatggggaggggagggcggtggaggaggaagggtgggcgcagcaggcgagggggttcttggagtcgacggcggagatgctgcgggtgctgggccgcgggctgtgggacatcgccgcgcagagcctcgccggcgccgaggacagcgagctcgcgcggcggctcaggggccccgccgcggccgcggggaagcgcctcagcttcatgaacgagtacctccccgaggaccgcgaccccgtctggtgctgggtcgtcgtcgccgccgtcgcgttcgtcacgctcatcgtattaggtgtagggagtgttgatgataccccagtagaactgccaaagaaactctacataggtcccccaagtgccaaaacaattcaacttcctgatggaaggcatctggcttataaagaacaaggagtcacagctgacagggcaagattttcactgattgctcctcattcttttctttcatcgaggttagcaggaatcccaggaatcaaaccatccctcctggaggaatttggggcacgacttgtgacctatgatcttcctggttttggtgaaagtgatcctcacccaggccgggatctgaattcatctgcacatgacatgcttcacttggctggtgcccttaggattgtggacaagttctgggttgtgggatattctgcaggtagcattcatgcttggagtgctcttcgccacattcctgaccgagtggcaggtgcagcaatgttcgcgcctatggcaaatccatacgactctaagatgaccaaggaagaaagacgcaaaacatgggagaggtggtcaaccaagcggaaactaatgcacattttagctcggaggtttccggccctattacctctcttttatcaccgaagcttcctttctggaaagcaagggcagcctgagagttggctgtcactttcactggggaagaaggacaaaacttcactggaaagtcctatgttcaatgcattttgggaaaaggatgttgcagagtctgtgcgccaaggagatgcacagccttttgtagaggaagctgtactgcaagtatcagattggggattcagcttgtcagacattcaaatgcagaagagagaggatctgagcttttttgaattgatcaaatctctattccgtcaggctgaacgggagtgggtgggatttctgggcccaatacacatatggcaggggatggatgaccgggtggtgccaccgtcagttactgaatacgtcaggcgggtggttccaggagccacagtgcacaaacttctcgatgaaggccacttctcgtacttctgtttctgcgacgagtgccacaggcagatcttctccaccctgtttgggattcctcagggccctatcaaccctgtaccagaacccattgaagttgcctccgaactcacagaagaaacaacagtacctgacaaagctaaagaagaggagcaggacatatcggacttggcctgatagcattcagattcaggaaatcagtatcagaagcagtatagacacgagacgatactacttaacacagacaccacagaaagatagctttcgtcggctctcaccggcggacattgttgacagcgggtggaccgagctggcttcttttgcgctagtatttgtataggcaaattcttgaagaaggatgctacggtgcggttgatgtgccggctcatttcaatgtacaaaagggctatttaaaagttctgcacgtcacctgctgggtgcgctgctgctactctggtagagctcagtgatagctatataacatttgattaaacttcttactacgttgcatgttgtttttagatactcctatgttcttcacgctgctatgatgatgggtcacagcactcatctgtgcagggacagccagtgttcttggtcgctaactaacataagaatatggtgcggttaatc

SEQ ID NO: 24928 - DNA, 1497 bp, Oryza sativa
  ref <308>: DATABASE ACCESSION NUMBER: AK100370
  ref <309>: DATABASE ENTRY DATE: 2002-08-28
gacgcctccccccttggctcgtcgccgacgcctccaccaccctcgcgtttcccacccgattccaccccgaaacccctcaaatcgagcgcgaattcctctccaatagctgcggctccagcctccggtggattctggtctcgccggattcgagctctggtcggcggagagcaccggatccggaggtcacgcgggcaattggtgtgccccggaagaacaagaaccgggagaccatgcagtaccaacccctcgacagcagcggcactgatgacgaccttcctccgacataccaacctagaggaccaagagtgattttcaatggaaatggatcacttcctcaaccaaacctacacagcaacgtggacagagaaatacgtcagatcgagcaacaagcgtacactggtgttctcagagcatttaaagtgcagtctgatgctataacttgggagaaagaaagtctaataactgaactgaggaaagaattgcaaatttctgataaggaacaccgagtgctcttaaaaggggttactgaagaggaggctgtctgtagaataaggcaatcaagacagacaggtggaacacagtccagctctcaccatagcagtgtagttcatactccggtacctgcaaagaggcagaagaaatcccattcagtccctgtgaccccccaggcccctgtcattactatgcatgcagtggtgggcaagaagggtggtcggcaggcatctgatcgtgtattgaagcggcttcctagcaataatagtcctatgttgggttcaagcaggagaagaggaaggctacacccaaatgaactgataaagggatattctccattagatgggtttggcatacctaataccggcaatgttgtaatggaggttgagaaggtattatccaatccaaatatgcttgaaattgagaaggcaatgaaacttcttagagatcaggagcaatcattgcttgatgcaattgcaagacttgacgaagcatctgatggtgaaaatgaagatattgtgctcgttgcaagccaactaggtactaccgttgcatgacatcggtggtcatggcatcacttgctggtgacgtcttgagctttagaactgcaggcactaactggatacccacttcagacggtgggtgaagatggaaactcatgtgaagaatgcaaggtcggccagatatattggtcgacatgaattgtgaatttgtggttggaatatatattgttagagatctccatatcttgtattgttgcaatggtattttctttgcaaatgtagagataactgccctaaaaatagagcgtagatgaaaccccctttctccttcagaaatggggacataaattagtaggttgtaaattatttgcttctgtgccatccgtgcctgcaaagaaattgcggcactgtacagtatgcagcgcgctatcctgtatcaagaaaattattttatgaatcctgtgactaatatgaatctgtgtaaaaaggtttggagaaactc

SEQ ID NO: 24929 - DNA, 2568 bp, Oryza sativa
  ref <308>: DATABASE ACCESSION NUMBER: AK100371
  ref <309>: DATABASE ENTRY DATE: 2002-08-28
gctgcaccccaagtgcttggattttgcagctgctcccctgatccggttcagataggctcttcttgacaggatcaccatgtctgcctttgtgggaaaatacgcagatgagctgatcaagacggccaagtacatcgcgacgccggggaagggcatcctcgccgccgacgagtcgacgggcaccatcggcaagcgcctggccagcatcaacgtggagaacgtggagcccaaccgccaggcgctccgggagctcctcttcacgacgcccggcgcgttccagtacctctccggcgtcatcctcttcgaggagacgctctaccagagcacggccgccggcacgccgttcgtcgacgtgctcaaggccggcggcgtcgtgccggggatcaaggtggacaagggcaccgtggacatcgccggcaccaacggcgagaccaccacccagggcctcgactccctgggcgcgcgctgcgccaagtactacgaggccggcgcccgcttcgccaagtggcgggccgtgctcaagatcggcgccgccggcgagccgtccgagctcgccgtcaagcagaacgccgagggcctcgcccggtacgcgctcatctgccaggagaacggcctcgtccccatcgtcgagcccgagatcctcaccgacggcgcccacgacatcaagacctgcgccgccgtcaccgagcgcgtcctcgccgccgtctacaagtctctcaacgaccacaaggtcctcctcgagggcaccctcctcaagcccaacatggtcacccctggctccgacagcccaaaggttggcgcggaggtgataggggagtacacggtggcggcgctgcggcgcacggtgccaccggcggtgcccgggatagtgttcctctccggcgggcagagcgaggaggaggcgtcgcagaacctgaacgccatgaacaagctggaggtgctcaagccatggacgctcaccttctccttcggccgtgccctgcagcagagcaccatcaagaagtggggcggcaagaaggagaacgtcgccgccgctcaggctgccttcctcgcccggtgcaaggccaactccgaggccacgctcggcaagtacggcggcgccgccggcgacgccgccacgtccgagagcttgtacgtcaagggctacacctactagaattcgtcccaatcactgggtggcgcctatgcggccgtgcctatgacagtagtagggtctcggtccaatccgcgcgtccgtgcccactgtcaagttcctcctcgagaagggcgccaaggtcatcctcgccagccatctgggccgtccgaagggtgtcacccccaagtacagcttgaagcctcttgttccacgcttgtctgagctacttggagtcgatgttgtgatggccaatgattgcattggtgaggaagttgagaaattggctgctgctttgccggaaggtggtgttctactcctagagaatgttagattctacaaggaggaagaaaagaatgatcctgagtttgccaagaagcttgcagctgtcgctgacctctatgtaaatgatgcttttggcactgcacacagagctcatgcttcaactgagggagtgaccaaatttttgaagcctgctgttgctggcttcctgatgcagaaggaacttgactatcttgttggagctgttgcaaacccaaagaagccatttgcggccatcgttggtggatccaaggtctcaactaagattggggtgattgagtctctgttggcaaaggttgatgtcctcatccttggtggtggtatgatcttcacattctacaaagcccagggatatgctgttggaaaatctcttgtggaggaagacaaacttgagcttgcaacttcacttattgagaaggcgaaggcgaagggtgtttctctcttacttcctaccgatgttgtagtggctgacaagtttgccgcagatgctgaaagcaagactgttgctgcctccgctatccccgatggttggatgggtcttgatgttggcccagatgccatcaagacttccagcgaagcattggacacctgcaacactatcatttggaacggacctatgggagtctttgagtttgagaagtttgcagcaggcactgatgcaattgccaagaagttggctgatcttactaccacaaagggcgccacgaccatcatcggtggtggtgactccgttgctgcggtcgagaaggctgggctggccgacaagatgagccacatctccaccggcggtggtgctagcttggagttgctggaaggcaagaccctcccaggtgttcttgcccttgatgaagcgtaagctaattcggcttgtctccatcagcagtctgcacttttgtttcagacctctcggtgtaactttgcaatgtcaatgcttgtatgaagaacttgagataggcttatcgtcaagttttgctagatgagtcgtgaataagcttttcgacttcctcgctgccgcgagtgaagtggttcgaactgacatacatactctcatggatcgatattttgatatgcggttatcacatccctatgatggcatcatctgttgatattgcccgatc

SEQ ID NO: 24930 - DNA, 2284 bp, Oryza sativa
  ref <308>: DATABASE ACCESSION NUMBER: AK100372
  ref <309>: DATABASE ENTRY DATE: 2002-08-28
ccatggggccccacctcgtcagtgacctactctccattaattacgctaactcctcacgtcgtctcgcccgcaaaatgcttctcttcctcctcttcctcctcgccgccggcgaggccgcggcggcggcggcggccaccacgctcaccgcgacgccggcgaagctcacccagtccgaccgcgagatcacgatccggtggtcgggcctcccggacccggacggcctcgactacgtcggcatctactcgccgccgacctcctccgaccgcgacttcctcggctacctcttcctcaacggctcggccacctggcgcacgggcaccggcgagctcaccctcccgcgcctccccaacctgcgcgcgccctaccagttccgcctcttccgctggcccgcgagggagtactcctaccaccacatcgaccacgacgggaacccgctcccccacggccgccaccgcgtcgccgcctccggtgaggtcgccttcgactccccctcccgccccgaccaggtgcacctctcgttcgccgacggggtcgacgagatgcgggtcatgttcgtctgcggcgacggcgggaggagggtggtgaggtacgggccggcgaaggaggagggggagggctggaaggaggtggccgcggaggtgaggacgtacgagcagaagcacatgtgcgactcgccggcgaactcctccgtcgggtggagggatccagggttcgtcttcgatggactcatgaagggattggagcccgggaggaggtacttctacaaggttggtagcaactcttcaggatggagcgatacgtacagcttcatttcacgtgacaacgaagccaatgaaactattgcatttctctttggtgacatgggcacttatataccatataacacctatgtccgcacgcaagatgaaagcttgtcgactgtaaagtggatacttcgtgatattcaagcccttggagataagcctgcatttatttcacacattggggacatcagctatgctagaggttatgcttgggtatgggatcacttcttcaaccagattgagcctattgctgccaataccccataccatgtctgcataggaaatcatgaatatgattggccattgcaaccttggaaaccttggtgggcaactggtatatatggaacagatggtggaggtgaatgtggcataccttacagcgtaaagttcagaatgcctggcaattcttttgtgcctactggcaatggagctcccgacacccgaaatctttactactccttcgattcaggggttgtgcattttgtttacatgtcaactgagactaattttgttcagggcagtgaccaatacaacttcataaaagctgacctagagaaggtcaaccgaagtagaactcctttcattgtgtttcagggccaccggccaatgtatacatcaagcaatgaagctagggattttgctcatagacagcagatgctccagaacctggaaccactcttggtaacatacaaagtgacccttgcactgtggggacatgtccacaggtacgagaggttctgccccatgaaaaacttccaatgtgtcaacatgtcatcaagcttcgtataccctggtgcccctgttcatcttgtgatcgggatgggtggtcaagattatcaaccattctggcagccaaggaaggatcaccctgatgtacctgtctatccgcagcctgagaggtctatgtaccgtggtggggagtttggatacacaaaacttgtagctacaaaggagaagttgacactaacgtacatcggcaaccatgatgggcaagtccatgatatggtggagatattctctgggcaagtatctaataacaatggtgttcctgaggtgatcgatgatacaaagctcagcacaggggtcagcaccaaactgaaaatccctctgttctccttggaaattgtaggcagcgtgatgtttgcactggttctgggtttctctcttggatttctgatcagaaggaagaaagaagctgcacagtggaccccagtgaagaacgaggagacctaaaatcacacactgtatctaatgcaaatgcaaatggtttttgatcaacaacctgtttataggatcgtgccccatttcttggggctctacagtgttgtactatagtgcatagagtattgtaacatgtgctgtgtcaatcgtgggcattgtagagtttgatcagcatatctgttgccgtgattctacgatacataaaggtttcaataagtgacattacgttcacatcaattggttggtatgagtggttaacc

SEQ ID NO: 24931 - DNA, 1182 bp, Oryza sativa
  ref <308>: DATABASE ACCESSION NUMBER: AK100373
  ref <309>: DATABASE ENTRY DATE: 2002-08-28
gcttctcttttgtgataaagcaaactcacgtaaatattgttttatgtaggcactgttctattcagctctcctgtgcgcgcgtgaaatgttaaccccagaagatggatcagctgatttaatacgtgctctaaacaataggcttatcgcactgtcctttcatattagagagtactattgggttgacatgcagaagctgaatgagatttatcgatataaaacagaagaatattcctatgatgctgtgaacaagttcaacatatatcctgatcaggtttctccgtggcttgttgagtggatacctcctaaaggaggttacttcattgggaacctgcaaccagctcacatggacttccggttcttttctctggggaatttatggtccatagtaagcagcttggcaacaactcatcaatcccatgccattttggatctgattgaatccaaatggtctgatttagtggcagagatgccattgaagatatgctatcctgctctagagaaccaggaatggaagatcattactggaagtgacccaaagaatacgccttggtcatatcataatggaggatcctggccaacattgttatggcagctcacagtagcatctatcaagatgaacagaccagagattgctgcaaaagctgtagaggtagctgagaggcgaattgctatcgacaaatggcctgaatactatgacaccaaacgagcacgcttcattgggaaacagtctcgtctttaccaaacctggtctattgctgggtaccttgtggccaagcaactgctggacaaacctgatgctgctagaattctttcgaacgacgaggattcagaaattcttaatgctttgagcacaaacaggaaaagaggcaagaaagtgttaaagaagacattcattgtatgagttcttgaagcaaaagatccatcacttggttctttaagttagcatttaagttataggaaatatcttcctgtatatatacacgaaaggatatgtttggacggagagatgcctgctgttggatgctgttattgtagatgcatctggcttttgcaagaaagcacttgcctgggcatttctcaattgtatccctttcatcaatttttgtacactagacttgcctcttgtagtttaccatatactccatttgacatgacaaattttgtgccaaccaggtatgatcc

SEQ ID NO: 24932 - DNA, 2024 bp, Oryza sativa
  ref <308>: DATABASE ACCESSION NUMBER: AK100374
  ref <309>: DATABASE ENTRY DATE: 2002-08-28
gtctatgtttcgagagagaaaagaccagggtaccaacaccacaagaaagcaggggccatgaacgctttggttcgagtatccgcagttctgacaaatgccccttacattcttaatcttgactgtgatcactatgttaacaatagcaaagctgttcgtgaagcgatgtgtttcatgatggacccttctgttggtagagatgtctgctatgtccaattcccacaaaggttcgatggcattgatcgcagcgatcgttatgccaataggaatgttgtgttctttgacgttaacatgaaagggcttgatggcctccaaggtccggtttatgtgggaactggttgttgtttctataggcaagcgctctatggttatggaccaccatcactgcctgcgcttccaaagtcttctgtctgttcatggtgctgctgctgctgtcctaagaaaaaagctgaaaaaagtgagaaagaaatgcatagagactctcgacgtgaagaccttgagtccgccattttcaatcttcgggaaattgacaactatgatgagtatgaacgctcgatgcttatctcccagatgagctttgagaagtcgtttggactgtcatcagtgttcatagaatcaactcttatggagaatggaggcgttcctgagtccgcaaacccatctacactgatcaaagaggccattcatgtcattagctgtggatatgaagagaaaactgaatggggaaaagagattggctggatctacggttcagtcacagaggatatcctgactgggtttaagatgcactgccgtggctggcgatccatctactgcatgccgataagacccgcgttcaagggatcagcgccaatcaacctttctgatcgtctccaccaggttctccggtgggctctcggttccgttgagatcttcctcagccggcactgcccactctggtacggctacggtggtggtcgtctgaaatggctccagagattgtcctacatcaacaccatcgtctacccgttcacctctcttcctcttattgcatactgttgcctgcccgccatttgcctgctcacaggcaaattcatcattcccacgctctccaacgctgcaaccatatggtttcttggcctcttcatctccatcatcgtgacgagcgtcctggagctgcggtggagtggcatcggcatcgaggactggtggcgcaacgagcagttctgggtcatcggtggcgtctccgcccacctcttcgccgtgttccagggtatcctcaaggtgattgctgggctggacaccaacttcaccgttacggccaaggcgacggacgacaccgagttcggcgagctgtacgtgttcaagtggacgacggtgctgatcccgccgacctccatcctggtgctcaacctcgtcggcgtggtggccgggttctccgacgcgctcaacagcggctacgagtcctggggcccgctcttcggcaaggtgttcttcgccatgtgggtgatcatgcacttgtaccccttcctcaagggtctcatgggtcgccagaaccggacgcccaccatcgtcgtgctctggtctgtcctgctcgcctccgtcttctccctcctctgggtcaagatcgacccgttcatcggcagctccgagaccaccaccaccaacagctgcgccaacttcgactgctgagcgacatttgtgctccaggagcatcccgtttggcggtgttttgccggtattgcaaatgtgtgtatctaatgcgacgaagacgatgggtggtttcctctctctgggctttgtcctcgatctgagaggtgttgtaggttagtactccgcatgaaaatgttcattgtattgttattgtctgtgatataagaagttttgatgttgaagccgctgaaactatgagagggcaccgttaaatccgtttaatcatacttgtagaaaaaagagggggaaagaaaaggttttcttcggtgaacttgaaattggactactgatcagtttgtaatgttatatgactatatgctactgaatcttatctt

SEQ ID NO: 24933 - DNA, 2731 bp, Oryza sativa
  ref <308>: DATABASE ACCESSION NUMBER: AK100375
  ref <309>: DATABASE ENTRY DATE: 2002-08-28
gttgtctcgtcaacagatttcatcgcccgcggccaccggcggccggcgaacgcctccgtcgcggccggcgcaggctggggaattccaccggcgggttcgcccatggcctcccctcgcgaaccgagatccgggagcgctgcaccgccgaaagggaagaaggcggcggcggcgatggcggcgcctcccaattcaccgattgggtggtggcgcgaggtgagagcacgcttgtggctgcacacggtggaagtatgtcccccagaccaatggcttgtttggcgccgctcggctccgccgtgccgccgccaccgcctcgttttgcagagccggctggcccgccctggaattcaacagggatggaaaatataagggatcaacaccatcatttcaatacaggagagaaatcctttttttttaaagcagagagatgagtagatcttagctccttatgatactacatccaagctaatttttttataaccaaccagatattttatattgtagttgcttggtaaaacgcaatcagcattacacacagagctaggattggtaatagaagatagactttaatcccacaccaacactttcatctaaactcctccccttcctcaagactctaagtggcaaaacagtctgtatattattttcttggcatctcatacggaacaatttgttagtaaaactttctccacagaccgactgccactgcctgctttgatgcatcggaagccaaaccgctggaatttcacggtgatttccacctattctgctaggtggagtgtacctacctccgctctccagctgttataagatttggttggtcgtctctttggtcaacccggctaataaagccctccagctgttgtttgtgtgagaacgtgggatgcatacaagatacggagtaattctttactcaaagttgaaaaaacctctccttttttctttgtttgaagaggtggaagtcaactttcttgcacatccatttgtggtttactcccatttccctctgtttgaatctggctctcctcctagtttctctctgaaagcagccttgcatttgatcagcaagaagaaagatcaagggcctcttcttctaggagtgagctgcagttctgatcttactactagtcaggtgaatggattattgagtttcaagctgtaatggtcatttgaagaaaacagtatattttgaaaaaaagggaaataggtttgtacattgaccaacatggctacactaccaatagccaccggcattgggtgggtagtttgtcctatcatcaagcttatctttgagaaggtccaatcttatacatcaacccagtacaagtggcaatctgacttggaggatgatctaaaaaagatcgaatccactttgataaaaatccaattggtgctgggtgctgctgaaaggtcgcaaatgctagattgcaaccaagaagctctactttgccaaaatgaaagattctgcctatgatgccgacgacgtcatggatgaatttgattacctgattctgaaggcaaatgctcagcagaagagcaagctaagtagcttggcctccagttctcttgccataggaaagcgtttggttggccaagacaagttcagatccaagttaaggagggtcctcaatagcctgattagagtaaaagaatgtgctgacatgctcatcaaagtgattggggctgaaaactctaattcatatatgcctcctcagccacttcaatggcgtgtcaccagctcaatttctcctggccaaattatcattggccgacaatgagcaggatgatctagtgcaccgacttctgagagaagctgatggaccagagccaagcagaggactaacaatatcaccaacaccatctataattaccatagttggcagtggtggcattgggaaaactgcattagctcagcttatttacaatgacagaagaatagtcagtggttttgatctgaggacatggatatatgtttcaaatatcttcaataaggtcaaaatcaccaaagagattttgaaatcaattgatagaaacagtgatataacaaatttcagttttaacatgctccaggaagatcttaagaacaagttaacagcaaagaagtttctacttgtgctagatgatgtgtggtatgatgaaaagattggtgagcttacaaatgctgatagatggagagaattgtttgctcctctatgctatggagctaaaggaagcaaaattcttgttactgctcgaacaaatattgtttcaaggattttgggttgcccagcaccattccatttggagggtctgaagggtgaagatagttggaacctcttcaggatctgcgcatttggcgctgaagatccaggaaattatccagaactagagtctatcggtgaatgtattgtccaaaagttgaatggctcagcattagtcataaaggttgttggtgcacatttgaatgctaacctcaacgttgaagagtggacacgagttatgaaaagtagttcatcaaacaaggaagacattatgcaaattttgcgtctgagctatgaatgcttgccaggtcacctccagcaatgttttactttttgcagcctgttccccaaaggctattctcttgagcctgacttgttggtgaatatgtggatagcccataaatttgttcatggtcatatgggcacatatgaaagtatgagagaaactggtagaagttatttcaatgaactattatctagatcattttttcagc

SEQ ID NO: 24934 - DNA, 3393 bp, Oryza sativa
  ref <308>: DATABASE ACCESSION NUMBER: AK100376
  ref <309>: DATABASE ENTRY DATE: 2002-08-28
gagcttctctcttcctcctgatgctcttcattgattagtcctatccagtcaggaacaaagctcagcatcaggtttttcatgttagtttcaccagaaaaccatgcagctacttcattacaagaaacacagcaacaaatttcccatacctgttcttgcccttgcgctggtgctgctcatcaacctcgcctctctcaccagttcatgtacagagcaggacaggagctccctcctcaagttcatcagggagctctctcaggatggaggcctctctgcatcatggcaggacggcacagattgctgcaaatgggacgggatcgcctgcagccaagatgggacggtaactgatgtttctctggcttctaggaaccttcaggggaacatctcaccgtctcttggcaacctcactggattgctgcgtctcaatctctcccacaacatgctatctggtgccttaccacaagaattggtgtcttccagcactatcatcatcgttgacgtcagctttaacaggctgaatggaggtctcaacgagttgccatcttcaacccctatcaggccactgcaggtactcaacatctcaagtaatttatttacagggcagtttccatcttccatatgggatgtgatgaaaaatctggtcgccctcaatgtcagcagtaataagtttactgggaagataccgactcgtttttgtgacagctcatcaaatttatctgtgcttgaactatgttacaatcaattcagtggcagcatcccctcaggacttggtaattgctccatgctcaaagttctgaaggctggtcacaacaagctcagtgggacactcccaggtgaactcttcaatgatgtctcattggagtacctatcttttcctaacaataatttgcatggggaaattgatggtacacagatagcaaaactgagaaatctagtaactcttgatctgggagggaatcagttcattggcaagattccagattctatcagccaactgaagagattggaggagttacatttggacagcaacatgatgtctggcgagttgcccggaactctgggcagctgcacaaatctctcaatcattgatctcaagcacaataacttcagtggagatcttggcaaagtcaatttctccgctctacacaatctaaaaactttagatctttacttcaacaacttcaccggcacaattccagaaagcatctattcatgcagcaatttgacagccctacggttatcaggcaaccatttccatggagagttgtcaccgggaataatcaatctgaagtatctttccttcttctcacttgatgacaacaagcttactaacatcacaaaagcacttcagatccttaaaagttgcagcaccattaccaccctgcttattgggcacaactttagaggagaggtcatgccacaggacgaaagtattgatggttttgggaatcttcaagttcttgacataaacagttgcttgttgtctgggaaaatacctctatggttatccaggctcacgaatctggagatgctacttttaaatggcaatcaactcacaggaccaataccaagatggattgattccttaaaccacctgttctatatagatgtatcagacaacagacttacagaagaaattccgatcaccttgatgaatttgccaatgctaagatcaacatcagacatagcccatttggacccaggggcttttgagcttcctgtttataacgggccatcatttcaataccgcacgcttactggcttccctacgttgttgaatctgagccataacaacttcataggtgtgatttccccaatgattggtcagttggaagtgcttgttgtgcttgatttcagcttcaacaacttatctgggcagatcccacaatcaatttgcaacctcacaagcctccaggttctacatttgtccaataaccatctcacaggtgaaatccctcctggactaagcaatctgaacttcctctcagcattcaatatttccaacaatgacctagaggggcctattccaactggaggccaatttgatacattctcaaactcaagcttcgaaggaaacccaaagctttgtgactctaggttcaatcaccactgcagttcagcagaagcaagttcagtgtccagaaaagaacagaataaaaaaatcgttctcgcaatatcatttggtgtcttctttggagggatttgcattcttttgttgctagggtgtttctttgtctcagaaaggagcaaacgcttcataaccaaaaatagtagtgacaacgatggtgatttagaagcagcttcattcaactctgattcagagcattcattgataatgattacacgaggaaagggagaagaaatcaacctcacatttgctgacattgtgaaagctacaaataacttcgacaaggcgcatatcattgggtgtggaggctatgggctagtctacaaagctgagttaccagatggttccaagatcgctatcaagaagctcaatagtgaaatgtgtctaacagaaagggaattcagtgcagaggttgatgcactatccatggcacagcatgccaatctcgtgcccttctggggttactgcatccagggcaatctgaggctcctcatatactccttaatggagaatggtagtttagacgattggcttcacaattgggatgatgatgccagctcatttctcgactggccaaccaggctgaagattgcacagggagcaagtcagggccttcattacatccatgatgtctgcaagcctcatatcgtccaccgtgatatcaagtccagcaatatattacttgacaaagaattcaaatcgtatattgcagattttgggctgtcaaggttggtccttcccaacataacccatgtcacaactgaactagttggcactctgggttacattccccctgaatatgggcaatcatgggttgctacattgagaggtgatatgtatagtttcggagtggtcctgctagagcttctcacggggaggcgccctgttccaatcttgtctacatcagaggaacttgtcccatgggtacataagatgagatcagagggaaagcagattgaggtgttggatccaacacttcgaggcacagggtgcgaagagcaaatgctaaaggtgctcgaaactgcttgcaagtgtgttgactgtaatcctttgaagaggccaactatcatggaagttgtcacttgtctggacagtataggcactgaaataaagatataaaattataaaaacatgatagataattttgtagttccctataagtagtacttctgacttgtcttatagtttgttatgtacagcttgggacagactaatatcatttcagcaaattgatgttacttgtttttgcttagtgaatgtttaattcc

SEQ ID NO: 24935 - DNA, 1211 bp, Oryza sativa
  ref <308>: DATABASE ACCESSION NUMBER: AK100377
  ref <309>: DATABASE ENTRY DATE: 2002-08-28
gaccaatttatcctcgaaagaaatcgttgattcctcttttttcttcaatttgtttacgtgcaattcagttcttggaaataaaaggttggatttttactctgaacaaagcgaaaggtgtggcaatgggtgccagcggaaggctgatctccatttacccagaggatctcactttcctatttgagctagataagccatgctattgcaatctcaaggtggtgaacaacagcgagcatcatgttgcatttaaggtcaagacgacatcaccgaggaagtattttgtccggccgaacgcgagcatcatccagccatgggattcttgcacaataacaattacgctccaggcgcagaaagagtacccaccagatatgcaatgcaaggataaattcttgatccagagcaccaaggtagctgccagtactgacatggacgagatcccccctaacacgttcaacaaggaagtcgataaggtgattgaggaaatgaagcttaaggttgtttatacagttcccagtggaagttctgacgactctggtattacatctttaggcagcaggagcttcaaattggggtctgacgatctcacgatgctgaagaatgcaagcattgaaaagatacagacaatacaacgcctaaaagacgaacgagacaccaccctgcagcaaaatcagcaaatgcaacgtgaattggatgtgatcaggaggcgtagaagccgcaaaagcgatgcgggtttctccttaacgtttgctgcttttgctgggctcataggtgtcctgattgggctcttgatgagcctcatcttccctcgcccacaggctgctgcttaataaaatgccaatttcacaaccaagtgatacatgttcagcttaatgcccaacaatgtggccattatcgatcaaacaatcatagctaggttaataatcgagtcagctgctctggggaggaaaaatatatggaaaattctactttagtctcaattattcttttgttctttgcattgtagttaatatgcgtcacatcagaaaagggtcacaatgtttcatcaacccaactcccccttcctttttttattaaaaaaattgtattttcccttcttatgtaatctttttgtacaatttagtttgacataaacatatatcagggagaagctgtatgcattcaccgattggatataaggtcatgctcagtgaaggacaacttcatgagctctcccc

SEQ ID NO: 24936 - DNA, 3358 bp, Oryza sativa
  ref <308>: DATABASE ACCESSION NUMBER: AK100378
  ref <309>: DATABASE ENTRY DATE: 2002-08-28
gacgagcgcgggcggtgctctggtggaggagaggagagggaggcgtggtcggagtcggagtaggaggaagaggagatggtggtgctggtggtggcgacggcgtcgggcccggcgtctatcggcccagccgccgccttcctcgccatgcccggctggtctcccggcccgcccatccccgaggggatggagagctttacaaacggggacgttcgactattgaagcatgaacgcagcatcattgcggaggatgatcttgacaaccggtggcaggcagccactggagaggctgtttctgaggtcatattcctcagcaaacacactgctgtctccaaccgtcctgcgcttactgtccatccaatcggttggttatttttagtcataaagtgctatatgtttcttgtttatccctggctctgttaaatgtttaatatttttctgtgtttgagttatattgaatacctaaataagatatgacataaatggtggttaataaacctgaaaaggtactgaacttgtattttgttatttgtttgtttacaaataatgcatctgtacttttttgagtgcaatacatatgcttatttgtgtaaattaatggttcatacttcatagtaccacatgtattcaattattttatattaaacatggtgtcatttttctttggtgtgtcgcaccttaaggtgtgccacatctaagagaagatgagacgccacctcaaggagggagaccaggatgggcagctctgcccaatcctcgaattggtccatggctccgtttgatgcaaaagattgcggtagaccaaggtcttgttccagagtttgagattacactggaagctactcaccatggaccagtcaccaatacaccaacgatgtttgttgagataggtatagatctacttccatgcttatattctctgtattagcatgtatggtagggtgttttgtaaagcttcctacaaactggtttttgtcattgccctttacatgtcttttatagtttcagaaacatctgcgccattagcttactcaggtgtttcatgctgtacatttgttttgtgctctttgcctcccaaatgtcaatcatcaatgcctaaacacatgctaggacttttttgggggatagttgcaactattgcaatgggcatttcataatcaaaaagaatttgtgatttcacagataactaatattaagcattagtaatcatttgatcattcatgtaaatttgaaacttttaatttaatcatgttccacttgtagttgtgtacttgtgtaaacttagatagtttgccttagatacgtgtaaccttcttgagcagggaagagtcagctagcaaaattatatacacatttactccctccgtcccctaatataaggaattttgacattttacttgcactgtttgaccattcgtcttatttaaaaaaatttggaattattatttattttatttgtgacttactttattatccaaagtactttaagcacgacttttcgttttttatagtttgcacaaattttttgaataagacgagtggtcaaatgttacaaaaaaaatagtgaatcctatatacctatacaaatcatccccactactagcaattctctgcatcctcatgcttccacgtcaccccgttttctcctagccattggatctcgatcaagcgcttctcccggtcaatctgttggcaatccattggatcaaatatcaatggttaatgtgcagtccctctgttttcttttgctggccaacaagcccaactttacacaccatcaagcccagtccacactccttggcccaatttccaccgcatcttcccacactccatccacaccaccattcccgttaccctcttgagttcgagcggtcacgtctccctgcgccgctagaaactgcgagtgcggcgccggcgcctcaccttccagatcctgcgtagcgtcgtggttccccgccagctcttggactgctcacctccaaatggaaaccaccgctcacctgtcgtggttcgatcgctcaaactttatagctgtcatcaagatagttgttgtctcctcaacttcaagaaactatcatcctccacatcctgttcggtcgaatcctcacacgctgcccgattcacttcctactgcatactatttcacaccggaaaccatcgttccattcgttttccctgcctttaaagcttcagccgcctcctcaccttcaagaaacctcaggggtatatattcatctaccaaaggtatgcttcttcctccttttcttgaaccataaccatatgttcattcaatttattggcttacatttctcctttgaatcgcactcgattgatttgttcatgttatataccagattatcaatggattaaggacatacgagtattgatttggtttcggctcttcttcagatttccactgtcccaatatttatttggatttgtctcttcttcagatttgtactgtccctattcaataggattgaaatttatttggatttgtcacttcagatttctaccgtccctattcaacacgactgacatttatttggatttgtttcttcttcagatttatactgtccctattcaacaacattgaaatttatttagtatgtacaatttgttaaaggagccaattcatgatcatggtattatatgacgactctaaagatcatatatatgcatataccggttttatgtattgctgcaccttaatttgttttatttctgaatactccggttgcagatcattgctattagtagattagatactgtcgttgtagcagcagctctgggctactgctaaggtcagtcgccatggccatccaaagcagcagttgcagcataaatttcctcctatatgaatcctctattaagaaaaatatcaacaatacaatcggtaatgtttaattgtatctacttcattcatggtcatgttttccaaatattatattatgcccaccctacgttacttgctttgcaatttcttccataagaacaaaacaatatcatattttctgcagactatcagggactgagttcagcaatgaacttaatttaggtaaatattggtccttggatctgttcattttttttagatgaagggcaacgccctttgcatcctatggtggatgcaccttgcatctgtccatgctaaccttctttgctatatgatgttcttacttaacatacgggttaataagctacagtttgtgatggatgtaacttaattcttatctttcccttctttcttagtagaatataaaggatgctctttgtaatagcacacaattgaacataataggggattcatcatttatgtttctatcgatacaatctctctgccctaatgattagtatcctc

SEQ ID NO: 24937 - DNA, 2371 bp, Oryza sativa
  ref <308>: DATABASE ACCESSION NUMBER: AK100379
  ref <309>: DATABASE ENTRY DATE: 2002-08-28
gcccgatcgagttcccaccccagccaacgacccaaccccagcttctcctcctcctcctttcaaatcacacccttcgtcctcggaattctctgcgctgcagcaccagcatctcgcaagtcaaaccatccttatttattctggttttcttgccttgctgctgctgctgctgcggttgattttgatcttggaagaggaggaggaggaggggttgggttggtgggggtagcagcagcagcagagccgccggtgatggaggaacggcaggcggtcaacccggcctgccccaacgccgccaaccccttccaccgctgcgccgactactgccccgtccctgctcccgccgccgccaccgccaagccgcccccaccgccgccgtcttcccgaccggcgcagaacgggaccgcggcgccgcagaacgggacggccgcggcgcagaacggaatcgcggagcagaacgggagcacgcacagcgacggcgagctgcaggcgaagccgcgccgccgcgacagggccggcggatccgggggcctccccttctacgtcttcctgcgcgagggagccgacggcgacggcaagaaggtggacccgcgatgccccaacgcgcccaacccgttccacgtctgcaccgagcactgcgccgccaagatggccgaggtcagccgctcgtcggagggcgggaagtcccccatgtccctcttctcccgccactcgcgccgctcctcctcctctgaagatggcagcgtgagatcggggagcagcaagaaggtggatcctaagtgcccaaatgctggcaatccattccatgaatgcactgagcattgtgctgccaagatgaaggaggtgggtcagcagaataagactgttaagaagtcgtcctcacgcaagaaagggggaaaggagatctctgttgtgcagaactggaaggtggatccgaggtgcccaaatgcgtccaacccattccatatatgcgcccaatactgctttgatcatttgaatgaaacgggtcagaaagatacaagcaaaccagactcaaggaagggcaaagctgttgtgaaagcagagcaaacaggagaaatcaatcctgattgtgtgaatgcgtccaatccctaccacaagtgtggggaacattgtaagagaaagggtgacaggtagataaggctggcgatacaaggtttcctctccagatgatgatggtgaaaaaaaaagtatatcccgacaatagtcctgtaggtttcaatagaagctgtgtttccatcggctccgctttttattgtggctgcagcatcacaatctttgctgtattatcatgtactttctacacactttcttaccgccattcactcctataaaagagtcccatattctagatctagtagtataatttattccgtgaagattgtaaaaatagaagcgtgttgtttctttttttcccccttctttttgtaagataattgcctgcttatataagttataattttgtcaccaaccaagtggtccacaaaccagttttttcattcattttctttccatcactgtccatatttgttatataaaaagatataggcggatcgatgttttgttatagcagggaggttcttctgaaccaagatatgtggccattaatttcccttttgttttatcatcaatgaacaagggaaacccatcattgatatcaactctttgacaagtatggctgctctttctggttggcagggtctggttgtgaatcttctagaatggagatggagccatttggtcagaataatacagcatcatcagtattcagtactactgtacacgtcatgttacttatagatgaggaatgcctggggggcttggaattttcagactcgtcagttgtttggtttgagacgtccaattcgtgcctgaaaatgtcttttgacctgaaaaaaaaggagaattttccagtgtttgcagcatagctgatgtgcgtgatgatgtgatcgacattcaacaaaacgggtggttgcacgttctgattatatttatggttcacacgtaggcgacaaaaggacgaaaatgaggtcgctactcaaaaccttcgtgaagaaagtaggcgtcagaagtgaaaaactgcaccgaaccatacgaccaatcaaagaacctgggaaacaaaaacagaacaattgcaagttcatgtgtctgttccaagagaattgggatccgggagacaggtgatgaaattctactcatacagaatttgacgtaaatatgcaagattgtggagcggaacttgccaacttggtagaattcttcaggaggttggttgatgagttgtcttgtttgaaactttttgagttgaattgttgaacgctttaaaatagaagtaagccgtcctccttttttcatg

SEQ ID NO: 24938 - DNA, 2709 bp, Oryza sativa
  ref <308>: DATABASE ACCESSION NUMBER: AK100380
  ref <309>: DATABASE ENTRY DATE: 2002-08-28
gggttgcaactaggaagaatgaaggatcgtatacctctgtggcagtggatccagttgacggttgcaagaggaagatgcttagctgtgtggcaaactggcaatggatgctagtagctctgtagcattggttacaattgctcacttttcactagatgttggcagtaccaacagccaagcaaagggaggcaaagttgccagcgttggggatcaggcgtacggtttcttcaaggggccatggcggctgcggcgccgagttcggtggtagccggactcgtgtccgggctagggctggcgcgctcctcgttaacgcccagcgacggccgctctccttccctctcgcccctgcatccgccatggcccgcggccccgcggctcgtctgtaggagcagcggagcccggccccccagggagagagccgtggccgccgccgccgccgccgcaaattctccgcggcagcagcagcagctaggagagcatgagcatgaggaggctgtggcagcggcggccatggagccggaggggagcagtccccatgaggtcaccgtcctttctttctccttggtttggcgattgattgattggttggtcccgtgcaggtgagggaggagatagcgaggtgcttcgatctcgtgcgccgcctcggccgtggcgccgtctacctcggctcctccagggtgccgcccacccatccccattacctccatgccgccgagctctcaagggagatagctaggctgctggactgcaccacatggtccggagctggtccaggtttcatggatgctgccacccaaggcgctcttgaggcgggcaaaccggtcggtggcttcaagattggcaaggaggcgggtgaatggacaacctccaattttcatccttacctgccatcagagtcatatctcacctgcaggttcttctctgcaaggaagcatgggttagttgatgccgcggtgcggaactgccctaccgatagaactgccatcattgcattacctggtgggatagggacgctggatgagcttttcgagatgatggcgctaattcaactggagcggatcggttccacgcttccagtcccattcttgctcctcaattatgattcttactactccaaactattggactttctgaatgactgcgaggagtggggaaccgttgctccgggagaagtagcatctctttggaaggtttgcaatgggaatcatgaagctttggagtacctggcacagttctacaatgtacctcttgctgaaagaaattactgcatatcaccacagttgaagcagcaggcaacttcataggccacaagttgacgattcaggatgaacaaagagcagaagatgttgctcctttcctctctggtgatgccagaactcctgaactgacttttgcaactgattgacgggggttcagtgcaaaatgatcaaatgaaaggccaacaaatgattttcttgggccttggttctgttcatggtactccataatgtgcaagccccgttggagacttgcagccagtgaatcagttgggctaagcttgcttgactgtaaagaagaacgaactgcactttttctggacacttcatcaccgggacaatcagatacactaagtttgcttggtgacagccctggtgaggtgcggggaggcactaactgatagaaaagatttcctgtcagacacaaggtcttgatcaacttttgtactggacaacacttcatgctcttcctgaatcgggtcttcacaatcatctattacaggctgatcatcttcctcacttgtttttggattccccttagagcaaggagtgtcatcaccactctctgcatccatgaagtcatcgaaagtgtcttcagatgaggaatgaagctttcttatttggtcacgcagttcttgtacatcctcttcatccacatccatctcttcctctgaatcaacttctatgtgaggcaagattagagagcgattgagactgactcgcaaattatgcaggctttcacgggcattctgtgcactgaaatacccattcttgcagggttcagtgtctccagattttgttcgtatgagctcgtcctgcaagtgatagaacaattagcaagtgtctgtaaattgttgccacttttatctgctgctgaggaaataccttcaactgacgtatttgatcgctcaaaccattaacatcatcttctgatatctcatttactacagccttgtttgacatgagctttgctctctcaccgaaccgtagcgtgcttaaagttgtagttctgcacctgcatttgccagtcacaggactctatgtcaacttaagagaatgtaaatggcatagtgaagtacataaggtaatgaacagaaaatacctgtgttctgaagaaatggaacacaagaatgtaacccttgaatttccacctagtgtatccttcagcacatgcgtcaaacaggattgcttgtggggagagtcatctttctgggtctctggtgcttctgatagaatattgacgagtttcctgaagtaacaattgcttgttgccaccatcaagttcatcattatcaggaccagcaagatcaacgaaggtaattctgctggtccgtgagctgctgaagccatttgagaaaccctgtaatttggttgaacaaagtaaattcccaatataatgacaacatgtatatttgctgatcaattagtgaacttaaaaaacagaatagaatagacc

SEQ ID NO: 24939 - DNA, 3762 bp, Oryza sativa
  ref <308>: DATABASE ACCESSION NUMBER: AK100381
  ref <309>: DATABASE ENTRY DATE: 2002-08-28
gcctcccctccccgcccgcgtggcctacccccttcgttagggtttcgcgccctcttccctctctcccttcccctcggccgtcggcccggctcctcgcggcggcggcggcggcggctcgctttctagggttagggttagggttccggcggcggaggaggaggagatgggtgtgccggcgttctaccggtggctggcggagaagtacccgatggtggtggtggacgtggtggaggaggaggcggtggagatcgagggcgtcaaggtgcccgtcgacacctccaagcccaaccccaacggcctcgagttcgacaacctctacctcgacatgaacgggatcattcacccctgcttccaccccgaggataggccctctccgacaacattcgctgaggttttccagtgcatgtttgattatatcgataggctatttgtcatggttcgccctcggaagcttatgtatatggccattgatggtgttgctcctcgtgccaagatgaaccagcaacgctctagacgattcagagctgcaaaagatgctgctgatgcggccgcagaagaagagaggttgcgtgaagagtttgagagggaaggcagaaaacttccaccaaaacagcaatctcaaacatgtgattctaacgttattactccaggaacagagtttatggctgttttatcgattgctttgcagtactacatccatctcaggttgaattatgatcctggatggaaacaagttaaagttattctttctgatgccaatgttcctggtgaaggggaacataaaattatgtcctacattcgcggtcaacggaatctccctggatttaacccaaatactcgccattgtttgtatggcctggatgcagacctgatcatgttagctcttgcaacacacgaagtacatttctctatactgagagaggtagtttatacacctggacagcaggacaaatgcttcttgtgtggtcaggttggacatctagcagcaaactgtgaaggaaaggttaagagaaaagctggggagtttgatgaaaaaggtgaagctattgttccaaagaaaccttaccagttcttgaatatatggaccctccgggagtacttagaatatgagttcagaatgcagaatccacctttcccgattgactttgaacgcatcgttgatgatttcatcttcatgtgtttttttgttggcaatgattttcttccacatatgccaacattagagattcgtgagggagctattaacttgctaatggctgtatacaagaaggaatttccttccatgggtggctatctaactgatgcttgcacgccggatctgaataaagttgaacactttattcaagcagttggctcctacgaggataaaatatttcagaaaagagctcgtttgcatcagcgtcaagctgaaaggataaaacgagaaaaggcccaagcaaaacgaggggatgacctggatccccatgtcagggatgatcttattgtacctgttgcacgcttccaagggtctcgccttgcatctggacctgtgccttcaccatatgaacaaaatggatctgacaaaaacaatgggggaaaaaatagtcgtgctcggaaagctgcacgggtatcatcgtcaggttcaagcattgcggctgctattgttgaagctgaaaatgaccttgaagcacaggaacgcgaaaacaaggaagatttgaagacaatgcttaaagatgcacttcgtgagaaatctgatgtttttaattctgaaaatccagaggaggacaagataaaacttggagaaccaggatggagggaaaggtactatgaagagaagtttggagcaagaacacccgggcagattgaagaaatacgcagagatgtcgttctgaaatatactgaaggtttgtgttgggtaatgcactactattatgaaggtgtctgctcgtggcaatggttttacccttaccattatgctccttttgcttcggatttgagtggtctaggtcaactcaatataacttttgaacttgggtcaccattcaaaccgtttgatcaacttatgggagttttcccagctgctagctcccatgcactccctgtacagtatcggcaattgatgacagatgcaaattcaccaataattgatttttatccaactgattttgaagtagatatgaatgggaagaggtattcatggcaggggatagcaaaactgcccttcattgatgaagcccggttgctagctgaaattaaaaaagttgagcatactttgacgcctgaagaagcaaggagaaacagtatcatgttcaatatgctttttgtgaatggctcccatccactttcgccttatatctactccctcaacagcaaatttggacacctacctgacagagagcgaaatgaaattaaagaaaagattgatccttcttctagtggaggaatgaatggttacatctcactttgtagtggggatccgtgccctcctgtcttcaggtctcctgttgatgggttggaggatatcatggacaatcaagtgatatgtacaatctacaagcttccggattctcataagcacatcgctcgtccacctgttggtgtaatcatacccaagaagactgttgaagctactgacctgaaaccaccacctgtgctatggcatgaagacagtggtaggaggcctcatgataataacaacaggaggccttatgaaaacagcaacaggcaaaacccagctggagcaatatctggccgccaacttggggaagctgcccaccgacttgtggtgaacagcttgaatgctcggagtggcggacaatacaataccccatcgatgccatatcaaaccataatgaatggcatgccttatccaaatgggattccaccaaggatggagcagcctgctcctggctggcatgttcctggtgatctaccaaatggtcaggtaccaccagcttatgcatcatcatcaggtcattatcagaacgataggtctgggccttctcagtatggacgagataaccatggaaggtacccatatgcaagagacaaccaccatgattcaagaggaagggttccaccataccatcagagcggtggaaactcgtatcaatcacattctgctccatcagcaggtcctggacggtatgcgcaacccccaccatatgctggggggtatggtaggagctaccagcctgcaccgtatggaggtggtcagcagtggcagcagcagcagcaacaaccttatggctcctatgctgggtcagggccttatgggggtggggcacctcctgcaaggcctaattcacgaccacagcagtcgcagaaccgttacaataccttagataggaattctaacaggagacctccaccaggtcatgggcgacactaagcccaacctctgtttgttgtacctgtggttttgttgttagaaaacctgcgtactaaaatagagaacctcagcctagtaaaacagagaacctcagcttagagatatatatagagcaatttgcatagtctcgtgatcgacaagctgttatagcatcaaaggttctaagaggcatgtgttgtacaatagaattgtcagttcatcagatactggtggctgactgccgtttttcatttgtggcactcattattttagccccctaaggttgggaatatgtttaacaagttttgtatttttaagataataatgttctaggttaaatttcagttttggtggatatatgtcaaaatcttgtattcttttcttatttataatggaattgtggttttccctct

SEQ ID NO: 24940 - DNA, 2538 bp, Oryza sativa
  ref <308>: DATABASE ACCESSION NUMBER: AK100382
  ref <309>: DATABASE ENTRY DATE: 2002-08-28
gagcaggcgacatcgaggtcgagatcgagggatttatggcgttcccttgagagagaagctgacgaggagcgcgcgccatggttcccagatggccggcggctacggtgttgagtgggtgcgtactcgatccttgctactactaccctttttcgctcttctataattatatcatttatagccctagctccttcctaccattcgatctagtttaaattcgatagtgtttcaatccccctccaccagcttgaacgatagtctatcgtcgatagagacatgggagaaaaagaaaagaatctttttgcctatttttttcaatctaggcacatgcaagccgcccctaattccaaatgagagcacgtattatcctgaattctatttctaatcaaactagctagcaggcacaaagcaaatgatagctagtattacaattacccttgctgatatcgcttctatgtgaaacaaatcatgattattggcacatattatgattttgacgatccaagcagatggattgtatttgcacggaccgctggagttgcaattttccaaaaggaaaacaacatctcagtcaagtaatattttttagtggattagaacagagaaaaggcaaagaaagctcgagactgacggcactgtgccttatctcgtaatggttgatctaaccaattgcaaatggtaataaggttttctttcctgacagcaaacattcaattaatcaatggcaaccattagtttgttatacggagtatttcgttggacatcaagtctgatggataaggaccactgcacacacaagtgagcttcttgattagaaacagaatttcatccattacctgcttacatttggaattacagggctgcatgtgcttagatatgaaaatttggaattagagggctgcatatgcttagatatgaaaatttcggatcttcgcacaacgtggaattttatttggtctggaactttatactagtatactactagtagtgaatgaagctcataagttaaaaagcctcttctttttgtgaggagaacttcaccaggtaatggagaagatcaccaagctcaccaaaatctttatttttttttaagaaaatcaaattgtttgaatgtccattgaggtattagagaagatcacccaattaataatctaggcatagttaatgtggctgcggataccaggtaaccgaaagttaccatgccattgccacctcctgtgctaaggatgttgcatttgcagtcaagtcagggttgcctctgctagcagctagcgccaacaaagctgctgtgtgctgtcaccaccaccgccgcgctagagaaatctctttgtgagttcagtttctgtggggggactggattgcattgtgttggactgcctagtttggattgggttgggccagtttggtttgggccatctacatgcctacttggtgtcaccagcattacaaatgatggtaatcattcaaagagtaatctaaaccaagcatcttcatatcaggacccgtcaacaaattaagggtcatccacagtttcacaattactccctccatccacaaaagttacacatattacttttgacaccaagaccaaggagaaattagatcaccttggatgttacaaaatcaaggagtgaatgcaagcatggaaccaatgagtatttagatgactccttgggttctaataaaacatttaatttatctcttcacttaaatcttgaatgcatacagactacaaatagaaacaacttatttggaaaaacttaaatgtgaaataggtgtaacttttgtggatggagggagtactgtcaagaacagcacttgatccaagtgtctgcactaaaaagaatcattaaatgatatatactagatcattaaatgacatatactgctgttgttttgggagttgcctgtcatcataagccaaattttacaatgcatattccagtggaatttaacatgttgctatgcagtttcaagtagtgtatgggaaggcggaacaagcatcagccgttctgtcacaacatgatctggttagagaaagcggtgagaggtatatatatgtacttttctagctgtgatgctgctacaagcgtttttgtcgccaatgtaatctgtctgcacatgcaccctaatcgatcttttccttttgatccatgtactgcagcttgatccttgagcgcaggaagaagattggcacacacaacataaggcatttgtggatggttgctgcatttgcaatgtctggctaccttttcggtgctggggtcgctacccttatcaaagggaacaacagacgaacacctgaagcggcaggaactaaggaagatacaacagacgaacactaggagcggcaggaactaaggaagaagcttggacgactagaagagtaatagtactcaattccaaatggactggaaatgattctgtaatcaaatgcctctaacaagctgtggtaaccttggaccgtctatgatttaaatcgttgttgattgggacctcccttttatatcatgtaacttagctgctgttgcgagttctccg

SEQ ID NO: 24941 - DNA, 3262 bp, Oryza sativa
  ref <308>: DATABASE ACCESSION NUMBER: AK100383
  ref <309>: DATABASE ENTRY DATE: 2002-08-28
aagggagcaaaagaccccacttgcttagcctccaatctaaccccggagaactactggagtatcgcgcggagagcggaagagagagcagaggctgtggaggcggagagcggagagcgagcggacatggcggcggcggcggcaccggcgccggcggagagcaatgtggagttcatccgcgcgcggagcgacaagcgggagtaccgccgggtggtgctccccaacgcgctcgagtgcctcctcatcagcgactccgaaaccgacaaggcggcggcgtgtatggaggttggcgtgggctcgttcagcgacccggaggggctcgagggcctcgcccacttcctcgagcatatgctattttatgccagtgagaaataccctggggaacaagattacacgaagtatatcacagagcatggtggctcttgcaatgcctacacaagttcggagacaacaaatttctattttgatgtcaatgtggccaattttgaagaagcattagacagatttgctcagttttttattaagccattgatgtcgcaagatgctgttcttagagagattaaggctgttgattctgaacacaagaaaaacttgttgtctgatggctggagaatgtatcagctccaaaaacatctggcttcaaaggatcacccctatcataaattcagtactgggagttgggaaacgctagaaacaaaaccaaaagagaggggattggacattagacaggagcttctgaagttctatgagaattattcagcaaacctgatgcaccttgttgtttatggaaaggagagcctggattgcatccaaagctttgttgagcgcttgtttagtgacataaaaaacactgatcagagaagcttcaaatgcccaagtcaacctctttcagagcagcatatgcagcttgttatcaaagcaatcccgatatctgaaggcgattacctaaaaatatcatggcccgttacacccaacatccacttttacaaagaaggtccttcccgttatctgagtcacttaattgggcatgaaggcgagggatccatcttccatattataaaggaactaggatgggctatgaatttgtcggccggggagggcagtgacagtgctcaatactcctttttttcaattagcatgaggctcaccgatgctggtcatgaacacatggaagacatcattggcttggttttcaaatatattcttctactaaaagaaaatgggatccatgagtggatctttgatgagcttgtggcgataaatgaaacggaattccactatcaggacaaagtccatccaatcagctatgtgacagatactgtctcaaccatgcggttattcccaccagaagaatggctggttggagcatcactaccgtccaagtatgctccaaatagaataaatatgatacttgatgagttgtcagctgaaagagtaaggatactgtgggaatctaaaaagttcaaaggatctactgattctgttgagccatggtatagtacagcgtattctgttgaaaatgttactccttccatgatacagcaatggattcaaaaagctcctactgagaagctctgtatcccaaagcctaacattttcattccaaaagatttatcgctcaaagaagcgcatgaaaaggttaaatatccagcaatattgagaaagacaccactttcacggttgtggtataagcctgacatgctgttctccactccaaaggttcacattataattgatttccactgtccgttaacaagccattcccccgaggcagtcatttctacgagtctctttgttgatttgttagctgattacttgaatgcatatgcgtatgatgctcaaattgctggtttattctattcaatatatcgcacttctgctggattccaggtctcagtaggtggttacaatgacaaaatgcggattctgctagatgccattatgaagcatatatctaactttgaagttaaaccgaacaggttttgtgccttgaaggaaactgctgtcaaggactaccaaaatttcaagttcagccaaccatactctcaagcttcatactatctctcgttgatattggaggatcagaaatggcctttggctgagaaacttgaggctctttctaagcttgaaccagattctcttgcaaagttcatgccacatttgctatcgaagacatttttggaatgctatattcatgggaacattgaaccaaatgaggcaacatctattgtccaggagattgaagatactatattcaatacccctaattctgtgttcaaatcaatgtctccatcacaatatctgattaaaagggttatcatgcttgaaaatgagttaaaatgctaccaccaaattgagggcttaaatcagaagaatgaaaattcatcagtggtccaatatattcaggttcatctggacgatgccctttcaaatatcaaacttcaactgtttgctttaattgcgagccagcctgccttcaaccagctgcgaactgttgagcagcttggctatatagcaggtctttctttaagatctgattgtggagtctgggcactcgaggttgttattcagtccacagtaaaggatccttcacatcttgatgctaggattgatgaattcttcaagatgtttgaaagcaaaattcatgaattgtcagacaaggattttaagaggaatgtaaaatcacttgtcgattcgaaactggagaaattcaaaaatttgtgggaggaatcccacttctattggggagagattgaggcaggaactctcaagtttgacagggtcgagtctgaggtagctcttctaagagagctgaagaaagaagaattcatcgaattttttgatcagcatataagacttggtgcccctcaaaggaaaactgtaagcgtgcaagtcttcggcggcgaacatttggcagagttcaagaaggccattgctgaagctgatacacccaaaacttaccgaatcactgacatattcggcttcaagcgatccagacctttgtaccgctcactgaagggagggccaggccggatcacaatggactgacagctagaattagttacactctcttatagtattattctttctcgcggtgatatatagcttgtgtatatgcatgaactgaattttgacggcattttaatggccggagtatacacgattgctattcttatggtatgattcaccaatgcacgtacttccgaatgaaatataacaactgtacagactactagagagtaatgcacaaacttgtataattgcc

SEQ ID NO: 24942 - DNA, 2277 bp, Oryza sativa
  ref <308>: DATABASE ACCESSION NUMBER: AK100384
  ref <309>: DATABASE ENTRY DATE: 2002-08-28
ggttcgtcgccgccgccaccgctgccggcgcagccgcgcagcccgcgctcttcgagccatcgtcgctgcgtggacgagaggaacgcgagccgccaccgccctcttatccctattcatccccatgcggccaccgcttccctctcctttgcgctctccactccgctaggtgaggtgctcgatctggttcaggggccgccggaagcgatggtctaggacgccccaccagttgatccagtcgcccttggtccgtcctccggtgccagggacacgccgccttgcacgcgctcattcctgcgctccctcagctcctccgtgcacctgtcgatctcgcgtccaccccgacggccggacgacctccccgcatcccttgcctgtgctcccgcagccagatggccagctcgacgctgcaaaggccatgttcacgtcatcgcttcctctgtaccaacgccgctgcccccatgtggttctctgcttgcagttgggactttcatgcatttattcaagtcccagctgttctctgctagcttgcagttggttgccaaggtatccctctctagatgcaggtattcctccagtgcatatggagtggtacatatctatgttgtaattaatctggcctgttgttgccatttcctacgcatccactatctttccccttctgcgaatcagtcagctaacacagcatgatatgcagccacttgccaattgttgtgcttctatttggaccgtatggaaattctttgttgtcttctctaagagaatgacagagtatgtatgatatacttttggacaatcttatgttgggaatattgattgatatgtcatcaaagattctccgaacttggcaatcttggtatatatcgcattgaacctttcagtttgtccattcaaaggtattgttattcgtgcatttgtatctccatttttattagcttaggccctgtttcttttagcttgagattattataatccagattattaggagtaagctgaaagaaacagacaacttattgaagtagcttattataatctcgagcctagcttattataatctgataagctcatttaggtgagctttttttcagattattgggtgaaaaattacccaccatgccaccccactccttttttagacttgcaaacctaataatctaggttctaataatctaggaaagaaacaactaaccgcttattctactacatattataacaatctagcttatagtaatctgactcaataatctagattataataatcttaagctaaaagaaacggggccttagttccttcatctctatatccattatgagacaacaagcttattctgagtccattctcccaatcctaggcttattgattacatttttaagatgttgcattcggtaccaacaaatcatttctttatggtaaaaggctacatctttatatgatctttcttacacaacaaccaatactactgtgtcaatcaagggttatggaacttactgacaattacaaggaatgttgcacatctagcaaaaaaaaaaatctatacttcggttgaagattttgatattagctagaactttactagatcacaaatatacatatttatattgtcttcgttaggtcagctcaggctctatgtataacaagctaaatggcaatatgtcgagatatgcgctgaatataaatggcagtatcaataccagatgtaaatggctaaaattgttgatatgaatagtccatgttttcttttttatctacattttgggcatttagatagtatttacttttttagaattctatatatgtgtagtaggtacactagagagtagagacagatcaagaggtgtgatgtctgtagtagatgcatgctcttctcaattgttatcactagcagtgctgcttgagaaatcatcaagttcaatatgtaccttatgggttattctgtgttcttgatactatcactcttatttatggtctctttttgttctcagatggtgccaatcaatattattaatggtttatcttttctggaagtcctttgtttgtaggtatctagataaccaaaacaattggagctgatgacatgggattccaaaaaaatgcacatgctatatatgtggagtctagagatatgttttattttgtttgataggaatctggagatgtgtatgttcactagatgaatgtttgttcattacatgtgcaatcattatattgcaagggctcaggaacaatgaggtgatgttttagctagaaaatcatacatccatactagctaatttatacct

SEQ ID NO: 24943 - DNA, 3083 bp, Oryza sativa
  ref <308>: DATABASE ACCESSION NUMBER: AK100385
  ref <309>: DATABASE ENTRY DATE: 2002-08-28
ggttcttttttttttcggcgatagcccacgaagttcgccgtctcccctccacaagtgcgtcaccgagatcctccgccgccaccaccgccgcatagccaacatccgccgccgcagccgccgccgccgctggtgctacagatccggcagtccccagcttcggcggtgccaaatccggcctcaagatgagccggcggcgcctcccactccaggcgctaccccttccctcctcgccgccccctcctcgccggctcgtccctgcgtcaggtctcgggtgagggcgaccgtaccctgtttcccttctcctctggcgcctgctgccccttccttgcccaagcgccgactgcctccgcagtgcctcgtcgcagcgacgacgggtgagcagcaccggccaacaacgcgtcccctgctcgcccctcctcttatggctgcaaataccttccagatctgatgattagtcctgcaaatccctctcagatatgatgcttgatttgttcgtgaaggtacggtgctactcctgtctcctgtgtccgattaattaagtttgttaggtgttaattgttgtgtgcattagtattctccagtgagcctgcaatgttgttatgtccagatgtgatgagtcgggcaaagctgaagtgtcattgctatgtttattataccttgccagggcaagctaaactgttgatgcatgttagtagcttattattaaaggaactcatcgagtagtagtaatttttctcaatatacagaaacgaacccatgcactttgctggaagggacacctagactttgcctgtttttcagtgctacgactaaataatttatatttctcagtggtactaccgaataagttaatctcatgattttttttccctgagattgatcagtgatttctacttatatatttattccttttgaatattctaaatgatgtgatttgtaaagtaaggtcatagctcagttatactttagcgtggttgtttctttatcaacaggagttaggaatgaaataagtgagttttgatgtagctcaactcaatgtagtacaaataactgctcaagtgattttttttctcttttgagaatgggacaatgcacagattagtatgagtgcattctccaattgcttcctagtaaaatttctgcaccatggttatcactcctccaaatatgattctgccctcttgataaaaaaatattgtcttcaggtttgctttgcataaattttagatttttcttgattgcatattattgctatatggcactgaacaatgaaatttatttctaaatttgtaggaagtctgaaaatatctaaacataagtcagaaactaatgtacatgtccagattgagccctgggttattccctgtactttacccattctccttatctacttgtcttgaaaattaatgagacatcaccagcaattctttgtatgattttggccatgttactcatggtttaaatggagctgctggcgtctcttaaaaaaataatttggtcatgcactatagaagaaaatcatggtgtttgtttctgctttttttcttgtctctggaggtaatatattgttggctcagattgtcagacagattttgcatacttcattgttgacggcccgaggagtcggggagtggatgatgttgtggtcggtcgccgttgtctgcagcttctgggaaggctcattctgatcatacttacccttgtgcttccacctagttttaattaggtgatgatgttcgtttgagtttataaaatttataaaattttataaaacttataatagaacttttatctgtttatatattcctgttcactgagtaaacattctgtggcattttagttgatttttcttatcttttgctgatcagatatgctcattttacataagatggctactcatcttatcttacataaattgcatatatggagtataagctataagcttatatgtgtgttactttattctggttcagagattaaaaactcaagccctcgagataaaatccaagtagctgtaaggtaaaatggaagagatgaaataaaggtggtctcattagtactacttttattttgtctaaactctaaagtacaaatctagaaggaagatgctgctggttattggttatgaattggcataaacctatgagcatataacattattcttcgaccgaaagaataacacactcctgtctatcaccaaatagtaccgtcctaacccctaaaaaaggtattgatcatgagtaatgacacacttatttgattggcaagacttttatggtcattgtgaggtacagagaggtattttttgattgtcaagaaacatttattttgggatgccttttgcatttttgtacaggagacatgcccctttcttattgtaagatttgttagcatctgtttgagcatatgatttgtatagctatttcttctatgtacaaggcattttttattaaatggatagtgcaagatttagaatgtgagcattgggaactattgcaagtttttgccttgtaactacaactttaactacaagtgaaatccccctgtcacatggaagctaagttagtcttcagtatttgtagtactcattgagcttgtagtgctcgatactaatgcatttctgtttgaccagtagggaatcgaatttgtttgaactatatagttatattccatacaagcaattcctttttgcatcgattttatgcttgcctcttatcgaaagagcttctccttttcttatctcagctataccttatatatctgacttgtatatctgagcaatacactttatttacattacaggtgatgtatcatgtgaacttttgacaagggtgaagcgtgtacccgtgttctccatttcgatgctttttaggatattttctactattatgtgtatgtaatctatatacgacatgtaagcccggataaaatagcgattttagcatctttttccttgcataccattatgactcatcttttgtcatttaaaatgcgctagtgcactctgatgttattgtatgttgaattatgtaatctactaaaatgtgtgcgagggctccatgcatgtcacagtattggttgct

SEQ ID NO: 24944 - DNA, 1806 bp, Oryza sativa
  ref <308>: DATABASE ACCESSION NUMBER: AK100386
  ref <309>: DATABASE ENTRY DATE: 2002-08-28
tcccctctccccccaaggctactcgcctagcgcccgccacctaggccgcggcctcatcccccccacctcttctgctcctctccccaataaaattccccgcacgaatcgatccccccctcggatccggatcgcctcgcccaccccctctccgccgctcgtcgatcgcgatttttttttcttcgccggatttttttttctcccgatcggtggggagggctctctctctctctctctctctctcttcaccctagggttagggggagcgccgccgcatttcggtccgccgccgccgccggagtcgaggagctagggttttcgtcggtcggggggggggaagaggtggggggttgagattgatggagaagaagaaggtggcggtgccgctggtgtgccacggccactcgcgcccggtcgtcgacctgttctacagccccgtcacgcccgacgggtacttcctcatcagcgccagtaaggatgggaatccaatgcttcgtaatggtgagactggagattggattgggactttccaaggtcataaaggggctgtctggagctgctgcctagacacaaatgctctgcgtgctgcatctggttctgctgacttttcagccaaagtttgggatgcactaacaggtgatgagctacattcatttgaacacaagcacattgtccgtgcatgcgcgttttctgaggatacccacctgttgctcactggaggcgtagaaaagattttgcgtgtctatgatatgaatcgtccagatgcagcaccaagagaacttgacaaagctcctggtaacgtgcgaactgttgcttggcttcatagtgatcaaacaatactaagctcgtgctctgatatgggaggagtaagattgtgggatgtgaggactggaaaaattgtccaaactcttgaaaccaaggcgcctgtgactagcgcagaagtaagtcaagacagcaggttcatcactacagctgatggctcgagtgttaaattttgggatgctaatcactttgggcttgttaaaagctatgatatgccttgcactgtggagtcagcttccctggaaccaaaatctgggagcaaatttattgttgggggagaagatatgtgggttcatgtatttgatttcttcactggtgaagaaataacctgtaacaaggggcatcatggtcctgtccactgtgtccgctttgcacctggcggtgaatcttatgcatcaggatcagaagatggcaccatccggatctggcagctgagcccacctaacgctgatgacaatgaggcggtcaattcaaatggcaaaccaacagttggggtaaatgaggttgcacgcaagatcgaaggcttccacattcccaaggaggaggagcagcaggctgaggggtaggactacaaggttggcaaacatggcagtgcttggtgcttactgggagatgattgcttgtcgatgctcctctccttcccgtttctcccttgctttgttgatgcccttggttcccgacgcaaggggggagagatcttgtcctccgtgaccaaaacggtggatttctgtatggggccctcaccaaatagacagtgtcagggtagtatctatctacagtgccaaaataaaccaagaggaaagcaagttggtagtttagtatcgttgattgcattcacagaagtgaaagtcttgtattccgctggtggccgtgatacagcagatgccattgtgttcaccggtttttgcctcccctacccttctatggactcttttcttatcaggaattgcttctttttattattgccgctgttttgacttctgatgc

SEQ ID NO: 24945 - DNA, 2396 bp, Oryza sativa
  ref <308>: DATABASE ACCESSION NUMBER: AK100387
  ref <309>: DATABASE ENTRY DATE: 2002-08-28
gagaacctataggagaatcataatacaagacatacagagagatgactggagtagtaccatggatgatccttgcaaccaccctactgctagcaaccatcagcttcagtgcagcatccaggatggctaagcctagatgcagaggaacatgcggcaacctcaccattccctaccccttcggcatcggtgctggttgcttctacactgatgggttcgacgtttcatgcgaggagaaccgcacctacatgcataactcaagcagcaacatggagatctacagcctcaatctgattggagggcaggctcaagtcagcaccttcatcgccgacaagtgctccaacaacacagatggcacttcaacagatggttgggtatcaacatctactgctcctttttttcacattatccagcagggctaacaagttaacggtggttggatgcaatacccttgcattcctggggggctacaacgaggaagaacagaacgttggggctgggtgcttctcgatgtgccccgacaagcagagtgtggacagtagcggccagtgctccggcatgggctgttgccagacatctattgcaccaaatctcacctccttaaacgtgacattcgacagcaggttcaacaattctgaggtgaacagcttcaacccatgcagttatgccttcgttgccgagcaagactggttcaggtttgagcctgattacctagaaggtcacaagttcacagacaagtacaaaggggttcccactgtgcttgattgggttgctggaagagaatcatgtgcccaagcgcccaagaacaggacatcatatgcctgtgttagcacgaacagcagctgcatcaactcaccaaatgctaccgggtatctctgtgcctgcaacaatgggtttgcaggcaacccgtacctggaaggagggtgccaagatatcaacgagtgcgaatctccgggtcagtactgccatggaatctgcgacaacacaattgggggctaccattgctactgcgggcctgggactcaaagtacagatccaaagagagagccctgcaatccaataacagcttcagaaagagctagactaacaaaaacgtttataggcatttcggtatgcgctattatactgcttagttgcacttttgcactactgatcgaatgccagaaaagaaagctgatgaaagaaaaagaaaggttctttcaacaaaatgggggtatgctgctgtatgagcaaatccggtcaaagcaagttgatactgtgagaatattcacaaaagaagaactagagaatgcaacagacaattttgactcaagcaaagaactaggaagaggcggtcatggcactgtatacaaggggatcctcaaagacaacagaatagtagccataaagcgctcaaagattatgaatatggttcagaaagatgaatttgtgcaagagatgattatactttcacagatcaaccacaggaatgtggtaaggcttctaggttgttgcttagaagtggaagttccaatgctggtctatgaattcatcccaaatggcactttgttcgagcatatacatggtaaatacagaacaacctccatttcactggatgctcgtctacggattgctcaggaatctgcagaagcactagcatatctacattcatcagcatcccctccaatagttcatggtgatgtcaaatctcccaacattctcctaggtgacaactacataacaaaagtgactgactttggagcatcaaggatgcttccaaaagatgaaatacagtttatgacaatggtacaggggactctaggctacctagacccagaatacttacaagagcgccagctaacacagaaaagtgatgtttatagctttggagttgtgcttctagaactaataacaggaaagactgcaatttattctgaaaatactgaagaaaagaaaagccttgcatcatccttccttctggcactgaaagagaacagacttgagtccatcttggacaggaacatattaggtgttggaacagagctgttccaagatgttgctcaactggcaaaatgctgcttgagtacaaagggggaagaacggccattaatgacagaagtagctgaaaggttaaaagcaataagaagcacctggcgtgagcaattgattgagggtgctaatgaagaaactgtatgtttgcttgaaaattcatcacagtatgacccttctaccactggacgacacggaagcttgatggcgctagatatagaaactggtagatgatgagtatgcaagtatcaataaatggttttagcagagtttcgattagcatctcctgacataaatatcttgtaaaaatatttgtgttcaagaataaaaactgcaggaaatcaatgaaaacttatatgtgacatgattttatg

SEQ ID NO: 24946 - DNA, 2253 bp, Oryza sativa
  ref <308>: DATABASE ACCESSION NUMBER: AK100388
  ref <309>: DATABASE ENTRY DATE: 2002-08-28
ggggcaggcggagaaaaaccaaggacaaggaaaccccttccctttcctggagagcacgggtgatggagagtggagagagcaagccgaaacccccaaaaccctcctccacctcgccgctgcgcgctatgtcctccgccgccggggaccacctaatccttggccctcccgtcgcgggcctccccgtcgggaatgcgtcgtcgtcagccgaagcgggctccacctccaccgcgggacatgtcgcaggcgcggaggtcgtcgagcacttgcaaagtggcgcctttggcaacccctgccttagtttcttcgccctcgtcgacagggacacgccgccccagcacctccgcgacctcctcgccgccgcctgggagcacgatgccctcaccgcgctcaagctcgtcttcaacctccgcggcgtgcgcgacaacggcaagggcgacagggagggattctacaccgccgcgctctggatgcaccaataccacccacgcacgctcgccggcaacctctccgcgttcgccgagttcggctacatcaaggacttccccgagcttctctaccgcatcatccacggcgctgatgcacgcaaggtcgctaaggccaagtccaaggcctgagggggcgacctcgccagactgagcggccggaagcgcgcccgcgacgacgacgacgaccctacgcctgcggcgtctaccgatgcggtccaggtccagccccagccccagccccagccccagcccgaccacttgctcgccgacgccgtcaacctggagacagaggatgtcgtgggggaggcgccggtgaagggcagccccagcaagaaggtgctcaaggcggcccgcctcgccaagttggccatgaaaatataccatgaagatgacaactatcgtctcctcttcaactccatcaccagtttctttgtggacaaaacctccgctccgatctcgagcaccacaagtccggcaagctgtccaagatcgggctcaccgccaaatgttgtccctcaccagactcgtccttcgaccaatccacattgttatgtgaggccatcgctcgcggtctctttccacgcgaatcagacgctagctacgccaacatgaaagagaagcattacatcttccttgtgcgccgccgtctccgccgcgaggttctcgtgccgctgcgtaaggacctggagctgcccgagatttatatgtccaaaaaccaatggtctgatctgccttacgagcgcgtggcctcagaggccatgaggatttacgagcacttgttcaagaagcacgatgaagggcgcttcacggcgtttctcaaagaccacaaagatagccgcgaggccgccaagcacaaggcaaagaaggcggcgccccagccaccccttctgcaagacatcattacctcgcttggcctggcatcgcatgccagcaacatcaaacgaagggaggatgctgctcagcagtggcgcactttggtcgatcatctccgtgggaagggatctctgtgcaattgtatggcggtctgcgacgtcaacaagggggggctggtcaaaagtgaaggccagaagttgttgaaggtctgtgtggggcttggattcttaatctctgaactcagttcgcctccatggacgaactcggtgcatgccttcgcttcaaactatttccctcttgtgcttcctgttggcagctatcgggaaaagttgaattttattcgccagatgccttgcgaagagaggtttaacctaaagaaggtgtttgaggggataattacaagggcagtaacgagtggtgttaccccggacaatatggtgaagaccatattcatattcacagacaagttttttgagaaggcatcagtgcgtccggttgagctgattgaacatgaagattttaatccattgtcgtcgcgtccgtggcatgaagaatatcggagggtgtgcgaagaattcaagagggtaggctttcaggacgtggtacctcagatcgtactgtggaaccttaaggggccacgctctgcaggcttaaccgcaactaaggatggagtcatgacacttagtggatactcggatgagttgatgagattgtttcttgagaacaatggggtggtggagccggaagatgagatgcttgatgcaattgctggggacgagtaccagaaacttcaagtgattgattaggataactggtctagaggtttgagattatatgagtgactaggagatctatgtttatcctgactcagtaataccttttttgtgttggatgc

SEQ ID NO: 24947 - DNA, 2415 bp, Oryza sativa
  ref <308>: DATABASE ACCESSION NUMBER: AK100389
  ref <309>: DATABASE ENTRY DATE: 2002-08-28
gactcggctcggctgcttcttcttctccttctcctcatcctccacatcgctgcggattcgagcggcgaggcttggattttctcccggcgagatctccccggcggccgtctcgcgatgcctgaggcaaatgcgggtgggcgggcggcgccggcggcggagcagcggagcaagaacacaacagagatggatttcttcagtgaatatggtgactccagccgatacaaaattcaagaaatcgttggtaaaggaagttatggagttgtttgttcagctattgaccaacataccggtgacaaagtagcaatcaagaaaatacacaatatctttgagcatctatctgatgctgctaggatcctccgtgagatcaaacttctccggcttttacggcatcctgatattgtcgagatcaaacatataatgttacctccatctagaagggacttcaaagatatttatgttgtcttcgaactgatggatacagacctccaccaggttattaaggctaatgatgacttaacgaaggaacatcatcagttctttctgtatcaatgcttcgagcattgaaatatatccatactgctaatgtttatcatcgtgatttaaagcccaaaaatatattagcaaatgctaactgtaagctcaagatatgtgattttggactagcaagagttgcatttaatgacactcctacaacagttttctggacggactacgttgcaactagatggtacagggctcctgagctgtgtgggtctttcttttctaagtattcaccagctatagatacatggagtattggttgcatttttgcggagattttgactggaaaacctttgttccctggtaaaaatgtggttcatcaattggacttgatgactgatctcttgggtacaccatcaatggatgctatttcaaggattcggaatgacaaggcaaggaggtatctgagcagcatgaggaggaagcagccagtaccttttttcagaaaagttcccaaatgtagatcctttggcactcaagctcttacaaaggcttctagcatttgatccgaaggatcgacctactgcagaagaggcgttggctgatccatattttaaaggccttgcaaaagtggagagagaaccatcatgccaaccaatttcaaaaatggagtttgagtttgagcgaagaaaggttaccaaagatgatatcaaggaacttatattccgtgagatattagagtatcatcctcagcttctgaaggattacatgaatggctccgaaaacacgagctttctatatccaagtgctgttgataatttccggaggcaatttgccatcttagaggaaaacggaggaaagagtggtgcactagataggaagcatgtttctcttccaagggctacaacagttcactctacatcaattcctccaaatgaaggcctagatgcaacatcccaagttactcaaaggatcccaacagctagaccaggaagaacggttggtccggtattaccattcgagaatccaggcgccgcagatccgcacagcgcacggagggtggtgaggaatccgatggttcctccagcagctgccaacaagtcaggatacagctacaacctaaagtcagactactctgataggcaacatcaggaagagcttgagaaagatcgtgtgcagtacaggcctgcacaacacttgatggatgctaaagttgctccagatacagccccggacatacggtcttcacaatactactttacgaggagtgctcccagaactgatctaacagacagggctgcactccaggggagcatgctatacggcattgctccgttcaacggcatcgcagcagttgctggtggatacagcaaggttggtgccgttcaatatggtgtttcaaggatgtactagagttttagtcaggcagttgtggaattgctccatagatgagcaagatgggaatgccggagcatggctttgtgttgtgcccatccacccagatataaggctggcaagggaattggtcgcatctggtcatggatgcaggcgaaggttgaagaaaggagaagggaaactcctattccatctcaggcggccattgtccatttgaaatggcagtgagctcgcgatggtgaaagaggaaaagagggagagaaagttcatggtggaatttctcgcactttatttgttgtggagaaaaggagaaaatgtgaataacagcactaggctgggcttgtgtacatacctgcaacccttgatttttttttcttgttttcttgctagaagctgttgcttcttgtgtaaacctgcaaaagcatactccgaaaatgaatcattcgccaaaaaattgagacggcggattatttggtagaatgttatgctagctatccaaagtttaatcttgttgaaatgaggaagcaaaatatgctagtg

SEQ ID NO: 24948 - DNA, 2682 bp, Oryza sativa
  ref <308>: DATABASE ACCESSION NUMBER: AK100390
  ref <309>: DATABASE ENTRY DATE: 2002-08-28
ggtgctggaaatttcctaatatcccctacttccgatctcaacgccggcatcgtctcgccgtgaactcgccaagacctccgcgtgacgggaagcggagcgggaaaaggaggatccatccgtccggtacacgagctcctcgtcgacgccgccgggggagggagggagggggaggatgatccttccgctggcgaagctggggacgctggcgctgaagacgatgtcgaagccgatcgccatccgcctcaagacggaggccagccgccaccctcagttccgccagctcatcatcaacctcgcccagacaaatcatcgggtctccacaaatatccagagaagaatatatggccattcaactaaggttgagattcggcctttgaacgaggagaaagctgttcaagctgctgctgatcttattggggagctctttgttttctcgtaggttgctggggctgctgtaatctttgaggtgcaaagaagcgcaaggtccgaggcccgaaaagaggaggctcgtagaaacgaagttgaggtataagctctggaatgtcaatagttttgtaacttgagatgagttgtgtcttcgcagggtaatggttttctttttgttaacgtccacatatttcatttcagtgactatattcatttatgtatctataatctataaataggagcccccccaaaaaaatcacatagctcattggtatatccaaacaacaaattgtctgatgcagctattcaatcttaggattattctaccaaatgttactaaaaaaattaatcagttcaatggcctgggaataattggggatgaatagctattgtttacattgctgagaatcgtcaggatagctctaatatttcagtgaagtcttgcaagtgataacaaacaaggcaatgcttgggctatatcttggatacagttgtattcttggagtacactccagtataggagttattacattctaaataatgtgtagaaggactgtagcagcgaagtgctctaatattggatgacagcgatataagagacacaaagtgcttacctttattgtctgaagttataaatcagtcaaatgtaagtagactgtcttgtctgaagtcttgtagtaatgattcaattatggaggatagcaactatttgcaacaaataatcatatgtaaacctgtactgcattttcaccaaactgttgctatgaaaaccaaaaatacatttataccaaagctatgctacacaccttgcagtacagtagccctaatgggttgtaaaaggccatagcaagctgcaaccatacagagtgctgcagactttgcctgcagttagtatcaggcactacaccttaattctaaaccagggctattgtagtgttatcatggccttttctgaacattcaataggtatcagatctgtgagcaataatatggcagcaggccaactgttcttttttttcctctaaaattggccatttatagtttttgttgcattgcatattttttgaccaatttacattttgcataaatagtctagaatttgatgtttcagcaatatcacgtcgttgacttgttctttgctgtttattttcattgttatgctttatatcattcaatatggaccagctttgtggattgtctttttcctgtccaagcaagtgacagttaccagacagatctgtttggtgtatgcagaagaggtagtactcttctctctgaaaaggacaagagaacagatagcagtctgaaacactggaaatataccttaggttgtggctttgtgagaaccagagatgaatgaaacagaatcaagtccaagagtaatgtattgctatggtatcccataaatcccaagtggaaatgaaattcctatatgtaccatatgaaactgaagtctctgcaacaaaaactcactatcaataggtgttgaccagagaacatttgatgtcaacattatcttcaatgtgcatgagtggctctggttagacaatgcattgcagtagcatgtattcataaatcatctggcctttgactccagttgttaatgtgctttgccattatgtgaccgtatatcttcagtcttgctgttggtgatgttattgacttgtgttgctattttttgtcgattatttctatcattttatgagtttgaaaaaaaaacatttattttgtaggcgttgaggcaaaaggaggatcagttggctcgggagatagagattgtgaagcagaaacttggcgagatagagcgccaagctaattctcgaggtctctctggagttcttttcagaagcagcagtgctccagaccaaacaaaggcctcatgagtttgattaactaggacaaaggcaagacttcaatggcagcatcacaaccaagttaatcgattactgtcctgcattgcttgtgatattgcacatggatgtgcagatttttgaagcacacatcttgtagcttgtgtttttcctgccaatcaccatgggaatgggcccatagcttgaggtttcgaacaacttgtcgtatttgaggctattttaactcgaaagcgttggagagcagttccaagaagggaacatctggcaagtgcaaagcagaattgtgctatgtgtgtgttgtctggcaattctcgcgagttgtcaacttgcatcataagataactgtatgccatgaacttgtcaacatgggaagcagattgctgcc

SEQ ID NO: 24949 - DNA, 2754 bp, Oryza sativa
  ref <308>: DATABASE ACCESSION NUMBER: AK100391
  ref <309>: DATABASE ENTRY DATE: 2002-08-28
gtgcaggtggcgcctctaattcctcctcctcgcgccctagtcccctcgccttcccctcccgtctcctcgcccgccggccgccgcctgcgacgatccccatcccgcgagcggcagcggtaccggcggtcctctgccgcaccctcgccgcggtgagctcccggtcagcagtttccacatctcagctaaggactggaatggccaaacccaatggcaaagagaaaacgggtgacacgggattgtcgatggctcctccaaagatttccaaggatagatttgatgctgctatcagagccatggctgatattggtatcctaaaggaaactgctgcgcccgtgttgaataatctactaaacttattcgattacaactgggtgcatatagaagctgataattatctggctcttgctgatgctatattttgtgattcagatcccaaagaaggacagaaaaggcaagctaatgagacaaatcttgatgcagaccaatctaacaagaagcttaagacaaaaaagcgttctcaaaatcctacatccaagatgcatggcaatgacaatagagagtttgttgaagctccaccacagcagggacgaggcacactgtctgcccgaactgttaatgggaagaaagtcaccagggcccacttggagttgccttcttcacaattactgatcaaggaaccacatacatgccctagcattgcaaagaatacaacaattgttgaaaataattctgctgtattatgccatggtcaagaccttcaaacttttgaggtcccagtagcaactacttgtccgcaagttgtagcccccagtactcgcaaagatgcacgtaggacttctggtgctcgccatgatcagaagcatgaaggtgtatctggtgcgcatgaaaggaacagggctgttgcgtgtagcaaccaggaaattgtaagcagcaaggattctccatccaacattgaggtagttttgtcaaattatggagctgggaaactatcattcacatacaactcttccctggcaaaccgttctgattttcatctgcctgacattaaattaatttgcaagaaaatggaggctagatgccttaggaaatacaagagcctagaacccaatttctcttttaagaatcttattaaagatacttgccagtgtattgttgaatctagtggacctagacatgaaggcatcatacaaactgttcctgccctggacattctgtccaaaccttcagtgccgcaaatattgcagtcaaatcaagctaattccgcttttatgccacctaataatgtcatgagccttggtggtacttcttcctcttgcactgttgctggagttagccagaattctagtaatatgccggttgttccgcatcaactacatattggtgccaacagaccacctcatgatgtcaatgatatcacaaaaggtgaagaacgtttaaggattccaattattaatgaatatggcaatgggattcttcctcctccatttcactacataccacacaatatcacactccaagaagcctatgtaaacatctcccttgctagaatcggagatgacaattgctgttctgattgtttcagagattgtctggcacaatcacttccttgtgcgtgtgctgcagaaacaggaggagagtttgcttatacaacagatggccttcttaagggagcatttctagatagctgtatctcaatgattcgagaaccacttaaacatccccatttctactgcaagatttgcccaaacgaacgaatgaagatagaagtaaattctgattcatcaaacacagaaatgaatcctggtccttgtaaaggacaccttacaaggaaattcatcaaggagtgctggagaaaatgcggctgcactagaaattgtggaaaccgtgtggtgcagcgaggcatcacacgccatttacaggtgttcttaacccctgaaaaaaaaggatggggattgcgcagtactgagaaacttcctcgaggtgcttttgtttgtgagtatgttggtgaaatattaacgaacattgagttgtatgaccgtacaattcaaaagactggtaaagcaaagcacacatacccattgttacttgatgccgactggggtactgaaggtgttcttaaggatgaggaagccctttgtctagatgccacgttttatggtaacgtcgcaagatttataaaccacaggtgctttgatgctaatattataggaatacctgttgagatcgagacgcccgaccaccattattaccatctggcgttcttcacaacaaggataatagagccttttgaggaactcacatgggactatgggattgattttgatgatgtcgaccatcctgtgaaggcattcaaatgtcattgcggaagtgagttttgccgagacaaaacgcgcagatctaaatcgagggcgcgggtttaacctatgaattctctactctgctattcaagtgattcaaggaagtcaatgcagagccattgatggtatcgtccagaaagatgatatagtaatttttctctggaataggataaacaatccagattccagagttacagactgctggttcagcacttaaatattccaacagctcatacgaactgctgtcctttttttccaagcttggttgcccgcaaagcagtatgcttggttgcccgttctttgttccttttaccaataccaagtgatgtaaagaattctggaatgtgaactctctgccatgatatagctctagctcaatgcattatattggggaacc

SEQ ID NO: 24950 - DNA, 1795 bp, Oryza sativa
  ref <308>: DATABASE ACCESSION NUMBER: AK100392
  ref <309>: DATABASE ENTRY DATE: 2002-08-28
ggctcttcctctccgaccttgctccgcttcttcttttctcggtgtaagcgtgcgcgcgtttcactgtttcggtttcatctcccgctcttccattttgccgctccggcgaagtgctggaagcggagccgaggttaagccatgggaacggccgagctgaaggcctaggagatggggtgggcgtccaggtggctgcgcgggctgctcggcggcggcaagaagcccaactccggctccggcgacccgaagccggcgagggagaagaagcgctgggggttcgggaagtcgttccgtgagaagtccccggcccatccgccgccgccgccaccgccgtcggcggcggtgcagagggcggtgacgccacggcgggcgtacacggcgtcggatgagggggacgacgagcagagcaagcgggccattgcggtggcggcggcgacggcggcggtggccgaggctgccgtcgccgctgcccaggcggccgcagccgtggtgcggctgacgagcagcggacgatgcgcgccggccgccgccaagcgggaggagtatgcggctgttcggatccaggccgcgttccgcggctacctggcgagacgggcactgaaggcgttgcgagggttggtgaagctgcaggccctcgtccgcggcaacatcgtgcggcggcaggcggcggagacgctccggtgcatgcacgctctcgtccgagtccagaggcgggcgcgcgcgtgtcgcgctatccgctcccagcatgtctcggcccatcccgggccaccgacgccggagaagtacgaccaggcgactcacgagggcgtgcctaagcacggccgttctggttctctgaaggggagctcgtcgaagacgccgggaagtgagagactgacccgggagaggtcagaatcttgcgggaggaactggcttgacaagtgggtggaggaacggtatttggatgacgagaagaacgccaagattctcgaggtggacaccggcaagcctgggcggcacgcctcacggaggcgcagcggcagccatcaccaccactcgtcatgctcgtccatgacatccgagcagaagagccggagctacgcgaccatgccggagtctccgtccaaggactccacgaccgcgcagcagtccgtgcccagcccgccgtcggtgggcatggccgaggcgctcagcccgctgctcatggccgtcgacatcgccgagctctgcgacagcccgcagttcttctcggcgacgtcgcggccggggagctcgcggagcagggcgttcacgccgaccaagagcgagtgctcgcgcagcctgttcggcggctactccgactacccgaactacatggcgaacaccgagtcgttccgcgccaaggcacgctcccagagcgcgccgaagcagaggccgcagtacgagaagtccagctccctccggaaggcgtcggcgcacgcgttcggacccggatcgtgcgcgccggtggcacagaggacaacggcctccttgcatagcaagttcaccaacaaggcctaccctggatcgggcaggttggatcggctaggcatgcccgtcaagtactgatcatatgccggattctcgcgatcaaccgggacaagtgaatgaaagcgacaagtgtgtcaaactgtgtttagcaaggaccgagtgaatttagcaattggtcgttgttaggcttgagctttttatgggtgctgttaccgtcacagattttctttcttgtttttaactagttatgaagtgtaagttgctggtagctgtttggtgaagtatctatgcgtccttaaccttcctgact

SEQ ID NO: 24951 - DNA, 2168 bp, Oryza sativa
  ref <308>: DATABASE ACCESSION NUMBER: AK100393
  ref <309>: DATABASE ENTRY DATE: 2002-08-28
gacctcgaccctctgcccctcaactcggtggtgaccacgcgtccacatctctcatctttctttctccgctattctcctccagtcctcttctcttcttcctccctcccttcgcccactgaatcgccaaaaaaattcccctcctccactccatctctataaaaatcctcccccaaatctcgcctcgtttagccagcacaactcacacaactctctctctctctctctctctctctctctcgtcgtctgcaagcttccgcctcccggatcgcggcgaccaccggaggaggagggagcagccatggcgaacatcgacatggggaagatcctggcggggctggagaacgacgacgcgcgggtgcccaagaccaagctggtctgcacgctcggcccggcctcccgctccgtccccatgctcgagaagctgctccgcgccgggatgaacgtcgcgcgcttcaacttctcccacggcacccacgagtaccaccaggagaccctcgacaacctccgccaggccatgcacaacaccggcgtcctctgcgccgtcatgctcgataccaagggtcctgagattcgtactggatttttgaaggatggcaagccaatcaagctaacaaagggtcaagaactcactgttaccaccgattatgagatcaagggtgatgagaacatgattaccatgagttacaagaaactgccagttgatgtgaagcctggaaatgtcattctctgcgccgatggtacaatctctttgactgttttgtcctgtgatccaaaggctggaactgtgaggtgtaggtgtgagaacacagcaatgcttggcgagagaaagaattgcaatctgccaggaattgttgtggaccttcctacactgactgagaaggataaagaagacattttgggatggggtgtgccaaatgacatagacatgattgctctgtcgtttgtccgtaaaggatcagatttggttaccgtcagacaacttcttggacagcatgcaaagcgcatcaagctgatgtcaaaggttgaaaaccaagagggtgttgtaaacttcgatgagatcttgagggaaacggatgcatttatggttgctagaggtgatcttggaatggagattccagttgagaagatattccttgcacagaagatgatgatttacaagtgcaaccttgctggaaagcctgttgtgactgctactcagatgcttgagtcgatgatcaaatcaccacgtccaactcgtgctgaggcaactgacgttgcaaatgcagttcttgatggaactgactgcgtcatgcttagtggagagagtgctgctggagcataccctgaagtagctgtgaagatcatggcacgtatatgtgttgaggcagagtcttcccttgacaacgaagctgtcttcaaggagatgatcaggtctgcgccccttccgatgagcccattggagtctctcgcatcctctgctgtacgcacagccaacaaggccaaggcagccctgattgttgtcttgactcgtggtggtaccacggcaaagctggttgccaagtatcgtcccagggttccaatcctctctgtggttgtccccgtgttgacaaccgattcattcgactggacaatcagctcggagggcccagcaaggcacagcctaatctacagaggtcttgttcctctcctggctgagggttctgccaaagccaccgattcggagtcgacagaggtcatccttgatgctgctctcaagtcagctgtacagaagcagttgtgcaagcctggtgatgctgttgttgctctgcaccgtattggcgtcgcatccgtgatcaagatctgcatcgtgaagtaatcgctacacggtgtcttcttagcgccattttgctgggttaagtggcaaaacaaaaactgctatgcttgtttttactcccatagtccatctttgggagacaatttaattaccgtatcagcccctgcagttcgcagggtgcctttcgttacatagatttgctggtaaaatgaggagagatagaactccattatgtagagctctatttatcgtcgatgccatgtagtatggtaggtggtttctattccatgcctgcacaattttctggtagctactgtgttgtttgattactgttttttcaggtgatgtcgatggagttgataataatattggcacc

SEQ ID NO: 24952 - DNA, 2666 bp, Oryza sativa
  ref <308>: DATABASE ACCESSION NUMBER: AK100394
  ref <309>: DATABASE ENTRY DATE: 2002-08-28
gacgccaccacctccacctccacttcgctcgctcccgctctcgccatggccgccgcgcccgcgccatgaggtggccgccaccgccaccgccacgccactcctctcctctaccctgccgcgcggtgctgtttcctcgtccgtccccatgctcccgcgctgcctcgtcgccgtcgcggttctcctgctcgtcgcgtcccacgccgcgcggggggaggagcggcggcggctgctgctcgcgaggcaggacgtgctcgcgctccacggcctgcgcgggtcgatcggggtgcgggcggagtactggccggtgaagcgctatccctgcagctggactggcgtcgtgtgccgcgccgggcgcgtcgcggagctccgtctcaccgggctccgccgcacccgcgcgggtgcacggagccaggggttcaccgtcgacccgctgcgggagctcacggcgctcgaggttttcaacgcctcggggttcccgctccctggtcggatcccggcgtggtttggcaccggcctcccggcgtcgctggaagtcttggacctccgctccacctccgtcaatagcacgcttccagccgatcttggcatgtccgggaacctgacgacccttgacctcgccggtaatagcatctccggctcgattccggcgacattgttcctcatcaagggcctcaaatttctcgatctttctgacaacaatctcaccggggagctaccaaacgtgtctatctctgccggtgatggaaccggagttttcaacgcttccgggaattcgttgtacggtgccattggagatgtgcttgggcccctcaggaagagatttcgtcaggttgatttgtcgagaaattacttcactgaggtgattggaactggatttgggaacagctccgatggagcagtggacataaacatgaattgcttgtccggatcaagccagcgaagccagggggattgtgaagcattctacaagaggattggtgtttcattgccagagccaccaaatgcattgccatcaccaagcaagaaaggggtgaagtggaagtatgtacttgccggagtcctggcagccgcagcatttttggtggttcttttccttgtagcattagtgttctgcttgatgaagagtgggggacggcgaccgagaggaagagggttggagcagaatgaggaagggattcgttcggggcgcaggagtagcagcgttaatcctgtgatgctgtcatccatggcagcatcaccggcagcaaatggtgctgtgaaaggtctgcctaccattgtagatgagttcacctatgagcagttgcataatgttactgggggttttggggatgacaatcttgtcaagcatgggcactctggggccatttaccttggtgaactggagagtggcttcaatgttgttgtcaaaaaggttgatctgaagagcagtaataagaacttgggggaattgggcttccttgcaaagaattcccatgggaggattgttccattgctggggcatttggccacagatgaggaggaattgctggtctacaagtacatggcaaagggagacttgacttccgcattgcacaggaagtcagtggatgctgaggaggggctgcgctcgttggattggataacaaggctgaagattgccattggtgttgctgaggcattgtgcttcctgcacgatgagtgtagtccaccattggttcacagagatatccaggcaagcagtgtgcttcttgatgacaaatttgaagtgtgtcttggaagtttgagtgatgtatgcactcaacaaagtgagggaagcaggagtttcttctccaggatgttgagatcatcgaagtctcttgacaagaacgcatcaggtccaccagctagctgctcgtatgatgtatactgctttggaaaggtgctactggagctaatcaccgggaattttggtgtgagcggctcaaatgacactggttcagaggagtggttggcaagaacactggattttattgacgcccatgacaaggagggtctttcaaacattgtagacccttcacttgtagtagatgaagaccacctagaagaggtatgggcagtctccattgttgcgaagacatgcctgaacccaaagccctccaggcgtccactggctcggtacatcctgaaagcattggagaacccgctgcgggtggtgagggaggaattacagtcgaattcatcactcacgagtacttcatctcgaagctcttggcattttgcttttcatggggactcgcgcaggagctcggagctcaggccaacattggggcagtcagccaggaagcagtcagtgaagtcacaaggaagtgacgaggatgaggacgaggaggaggattcattctccttcaagagggcttcaagggagattctccctgacccggtagagttggaaaaggatgcagttgtgtagaattcaccacagattagcaatacatgctactgagatttcatctcagtgtgtataattcatcctctgatgcgcatctcctgatgcctctaggtgaaaaaactgtgcatataggagttagacttgtttctctttttccttttcatttcagtgttgtgtaatctgtaactgagattttgagaataagtggagcacaagggtgcgcggtgcttgaaatgcaagcggccagaaattttcgtag

SEQ ID NO: 24953 - DNA, 2407 bp, Oryza sativa
  ref <308>: DATABASE ACCESSION NUMBER: AK100395
  ref <309>: DATABASE ENTRY DATE: 2002-08-28
gccgcatccgccgtcgcctgcgcgccgccggaggccggagcccgccgccgtgggatactagtccagcttggaagcggggagggagaggctccagccagtgtgccgaaacctacccttccattctgacccaccacgccatggcggagcccacgccgccgctgccgtcgaacgccgggctccgcatcctcctcagcaaggaccggccaccggcctcctcttcctccgcgctcgccgccgccacctccgccgccgtctccagccacaccgaccgcgaccgcatcatcggagtgttccgggatgcgctgtctaggactgaatcccctgaagcttttgcccttcaggccgttcaggatgcgattaaacctcagaagcaaacagtgttggttctggaggagaaccaatccttagaaaatgctctacgcaaattgctgcaggaacttgcatcatctgcagttcaatctggtaaaagaataatgcaatatggggataatgaagaaaataattgcccgataacacgtcttcttgatatcgtgctttacctttgtgaaagagggcatgttgagggaggtatggtattccagctgttagaagatctgacagaaatgtcaactatcaaagactgcaaagatgtatttggatatattgagagcaaacaagatgtcttggggaagcaagagcttttcgggcgtggcaagcttgttatgctaaggacttgcaaccaactacttcgaagattatcaaaggcaaatgatgtggtattctgcggacgtattatcatgtttctagcacatttcttcccattatcggaacgttcagctctcaatatcaagggggtttttaacacatcaaatgaaacaaagtacgagaaagacgctacagatggaatttctgttgatttcaacttctacaataccctatggagtctgcaggagcattttagtaaccctgctttaactgctgcaaatctgacaagatggcaaaagtttgtgtccaatttaacggttgtgctaagcacatttgaagctcagcctctcagtgacgatgatggaaaacttaacaatcttgaccaagaggaagatgctgctttcaatattaagtacctgacaagtagtaaattgatgggtttggagttgaaggacccaagttttcgacgccacatccttgtccagtgcctcatattcttcgactttctcaaggcacctggaaagactgacgaagaaggtccaactgggagcatgaaagaggaaatcgattcttgtgaagagcgtgttaagaaacttctggagataattccaccaaaagggaaggacttcctacaaagcatcgagcatattcttgagcgggagaaaaattgggtatggtggaaacgagatgggtgtctagcgtttgaaaaacaaccttttgaaaagaaaccaggccaagctggagtcagaaaacgtaagccaaggtggagattgggaaacaaagaacttgcccaactgtggaaatgggctgaacaaaaccctaatgctctgactgattctgaacgtatttgcatgccatcagtaacagaatattggaaaccacttgcagaagatatggatccatctgctggtattgaggatgaatatcaccacaagaataatcgtgtgtattgctggaaagggttacgattttcagccaggcaggatttggaaggtttttctcggttttgtgattacggtattgaaggagttgtacctcaagaactgttgccacctgaagtccgttccaagttttattcgaagcctggtgacaaggctaaacgacctaagagggaagacccaaaaggcacttcagcccaacccaaggaacaacaggttgtttcagccacaccggagaccgacggtggcggtagcggggctgaaccagaagaaggtgctgtgccaatggattctgataatgccgcgatcgatgaaggccggaagcagagcccagaggaggtgtctggacctgaaagcgggcagtgcgaggctgaagccgatggcgaagataacatgaaaaatgaggctagtaaagacggtccatccgcatagaacctctgccggaagattttgtagtatcctgttgccgacgtttctactgagatcgcccatctttagagttactgtgaccccccagattgagacatccaggctccagattgttttaaagaagatagagagacatgtatctagtccactgaacacagaattttaatgaatcatcagtagctgacgccatgccttagcctgacatgtgtatatagacagcttgttcgttgaagtgttatcttgcatcctgggtcccctcctgtgtgtgtttactgttcggtgtagcatactgcttggagtacactataggagtactagtatgtatcaagctcaatttaccgtaccagtttatggtg

SEQ ID NO: 24954 - DNA, 2259 bp, Oryza sativa
  ref <308>: DATABASE ACCESSION NUMBER: AK100396
  ref <309>: DATABASE ENTRY DATE: 2002-08-28
gtccattttcgtttctttggggagacacaagaaagcgcagcaagcaagcgcagcggaggcacacggatactactccacgcataccataccaccacttacctaccgctccccacatctctcctcctcctccctttttcctctcctcttctctcctcacctcccaaatctgaaggaatccgccattctctgagcttgctctgtgtgtgtgcgtgtgtggagttctttctttggttggagaggaggtgatgttttgtgtagcttcgggcgtggtcgatccggggtgttgctgttcttggtgggtggcctgctgctgctgctgaggaggtgaaggaggagatctggagatctctcaggagcgaagcattgacattccgctatggaggctccttcgtcgtccccgtcatcgccaagtctgaaagatcatctctcttcgccaactggccctttgcatctcaaagtatgggaggtcacatgcattgtcttgggggctttcatggtggtcatcttctttgtaaccgtgtggctcacgatccggagtcggaagagggttagacgggcttcggcaaatatcccaatcacccaaatccctgccatttccaaggaaatcaaggaagtgagggtggagcaagtcccaacaagcgattttgcagcacatgatggagtcctgatgacaatccaagacaagtctagtgagaaggagtcagacaaggtcatggtccatttgggtgtaagcaaatcgaagcgtggcgatgagagccactcaggatcattccgttacatggacaaggatttaggattccagtcagctgatgaaggaggctcaggaacatttcggcataattcagctcatgcaataactgctccttcacctttggttggcctgccagagttctcttacctaggctggggccattggtttactttgagggatctggaagttgctactagccgtttttcaaaggataacattcttggtgagggtggatatggtgtagtttatcgtggccaactgatcaatggcactcctgttgctgttaagaagcttctcaataacctaggacaggccgagaaggaattcagagttgaagttgaggctattggtcatgttcgccacaagaacttggtccggcttctgggttactgtgtggagggtactcaaagaatgcttgtctatgagtatgtaaacaatggaaacctagagcaatggcttcatggagctatgagtcaccgtggttcccttacatgggaggcccgtgtaaagattcttcttgggacagctaaagcgcttgcttacttgcatgaggcaattgaacccaaagtggtgcaccgtgatatcaaatccagcaatatattgattgatgatgattttgatgccaaagtatcagactttggtttagctaaacttcttggtgctggcaagagtcatgtcactactagggttatgggaaccttcggctacgtggcaccagagtatgcaaacactggactcttgaatgaaaagagtgacatttacagctttggggtagtacttctagaagcaattacagggagggatcctgttgactatggtcgtccagcgaatgaggtaaatcttgttgactggctaaaaatgatggttgctagcaggcgatcagaggaggtggtggatcccaccatagagacccggccttcgacaagagctctcaagcgtgcacttttaactgctctgagatgtgtggatccagattcagaaaagagaccaaagatgggtcaagttgtgaggatgctggaatcggatgacccaattcctcgtggggacagaagatctaagcacaaccgtggagggagcaccgaaatggattcccaaagggacaacaactccgacacggacaagagtgacaatccagattccaaaccaagcaggagcagagcctcatcttccaaatgagaacatccagcattcctctcctattatattcctttggtccataacggaccgtcccccctctgtttctgctgacgaattggtaaccgccattgctgaagcttgaatacaaaagaagctcgaagacacattggttctcattcctttttttcttctttttcgtggctgtaacggtttatgatttatttgtagacaaggtgttggtttttctacttatgaatttatatatatatatacatatacttaacggtggtcttgacaatttgttgttgtaagtttttaacagtgtgtacagttgtagcattatgaatactggtcgaacccgaatatttgtg

SEQ ID NO: 24955 - DNA, 2546 bp, Oryza sativa
  ref <308>: DATABASE ACCESSION NUMBER: AK100397
  ref <309>: DATABASE ENTRY DATE: 2002-08-28
gtgtgtgcgcccttgttgattgctcttgtttctgccaggtttccttgttaggctctagttttgctcgttgtttactgtaaattcccatgtatattaagtttgtgcagtgcgctgtcagcttggcaaatgggcttttcatttcctgatcgaaaaaaaaaacaaacctgtgattaacaaggggaaattaccttcactgtgcctattggcatcattccaagttattcatgctttagttcctagccattaacttaagatagaaataagatcctgccagttcactagttttcttgtcagtttgatatatactttgatcttgtcttttctggttgttttccttaattttgtctgtgttgttctagtgcttaattagttgcctctcagttcttcacattctatgtttttgagtaaaactctgtccatatggccgttctgttatgtatctcagcaatctgcttatattttttttttttgcatccccacacaattctatttgacgttgtaaaaaagaagagagatagctagataagcgcaactgatgctctatacttagtttcacggttcttggtttaatgcctaaaaattgtgcactatcagtacttcaattatgttatctagtagtgttttgtctcctctgaataatgcctgccattcttatgctgctctactgctgagaaaactacactatttgaattactgattgctaattatgtttcgattaacagcataaaggaacattttgttgatgttctaatggagtcaaaaggtggcaaaaagaagtctagcagtagtagttccatgtacgaagctcccctaggctacaagattgaggacgttcgcccagccggaggaatcaagaagttccagtctgctgcttactccaactgcgctcgcaagccatcctgatattccttcacatgcctttccccgtagagtaggaatttcctgcaatttttcctttgttttgttgcaataaatctcccttggctggctgctttctcaatctcttcccttgtcttctccgatctcttctttcctgtcttgtccactgctccttgcaacacttgatcaaatgtcgatgtccttggctgattcttggggctctgcccctgcctcgcccattgggtttgaaggctatgagaagcgccttgagataacattgtctgatgcgcccgtctttgtggacccctgtggtcgcggccttcgtgccctctcacgtgagcagatcgactcgttcttggatcttgcaaagtgtaccattgtatcccatctttcgaacaagcacttcgactcatatgtgctttcagagtcgagcctttttgtttatccccacaaggttgttctgaagacctgtggtacaacaaagcttctgctctccattcctcgcatccttgagcttgctgcagagttgtcactgcctgttctatcagtgaagtactctcgtgggatgttcatcttccctggagcgcagccgtcaccgcatcgcagcttcttggaggaggtttctgtgctcaacagcttctttggtggcctcaagtcaggtggcaatgcttatgtcattggtgatgcattcaagcccgagaagaagtggcatgtctaatgtgccacagaagagcctgagcagcccatggttacactcgagatgtgcatgactgggctggatgctaagaaagctgaggtgttcttcaaggattccactgatggctcctgctcatcagctaaggagatgactatgttctctgggatttctgaaatcatccctgagatggagatttgtgactttgagtttgacccgtgtgggtactcaatgaatggcatttatggtcccgccgtctccacgatccatgtcactcctgaggaaggtttcagctatgcaagctatgaagcaatgaacttcaatcctagctccttggtctacgatgatttgatcaagaaggtcctggcttgtttctgcccttcagacttttcggtcgctgttaccatcttcggtgggcatggttttgccaaatcatgggcaaaaggtgcagaggttgattcctacatgtgcgatgatcttgttgagcaagagcttcctggtggcggtgtgctgatgtatcagagttttactgctgttactcctggtgctgtgtcaccgaggtcgaccttggatggctggaacagcgatggagcagagatggttgcgaagagcaaagagatgagtgtctgctgggaaggagagaaggcggcgaagaagagagatgcagatgcctgagaaatcggcagttcttcaacctcaagttgcaagtttgattcatctgaagtttctgagacgccttatttggttctgctcttgcagtttcggttaagcagctggctgggctaccggcaaagcatatgttacttgttcattgttcttttatatctgtctgcccaaataagtgctctagatggtttgctgcgtctgccatagtgagcaattcagattgtagtagaattcttatctgttgccgatgctctttaagggagaatgatatgtaactcgattattttcaataactattgcaacttcc

SEQ ID NO: 24956 - DNA, 3420 bp, Oryza sativa
  ref <308>: DATABASE ACCESSION NUMBER: AK100398
  ref <309>: DATABASE ENTRY DATE: 2002-08-28
gagggagctcaaaagatgaggccttcgaagaagaaatcgaagaagaagaagccctcgccggcggcggcggccggcgcggcggcgccgacgacccctccggcggcggcggatgggggagcggggggcgagtcgtgctcgccgcggtcggaaaccctaaccctagctgctgcggcggcggcggcggcggtggcgtctgagacggagtcgagcagcagctgcgaggcgtccacgtgctcgtcgtcgtcgtcggctttcaaccccgggtcgtcgggggcggcctcgacctcctccctctccgccttctagtcgtcggcctccaccgcgtcgtcgtcggccgccggcgacgagcggcgcgacatggcgtggctgctggacgccttcggcaccgccacgatcgaccaggtggactccgcctaccgcgaggccggcggcgacgccttcctcgcggccggcatccttggctcctcgcccgaaacgcagccctccccgccaccccggcccccggatctctcgccgcgggccggatctggtggcaggaaggccagcaggaggccgaagaaggtagccgtggctgcgaccgggatggttgcggacgtgatcggtaaggcgtacacgcgacctgccacttcgcccgtaaacaaaacgaacgcgtggaagggcaacgcttggaaggacggaagtggtggcgaccgcaagtatagtgttgaagaggccgagcagttcctgtgctctatgctgggggataattcggagcttggcatgggtgtggtcagagacgtgctcggtaagctgcttttgcctaacaagcgtacctgtaaaaaaatgcattttttttaccgttgtaagagcccagcagagttataatacatcaaagaatgaaataaagatagaaacacttactacacacaacaggagagcatctacgattcaaaagatatattttttcccccaaggaatggttggttcttgtttacaaaaagagaatccaaatgccatccataacattgcacagttcataagccaatctagtgaaaggagcaaatatattgtttgattggactagaaaatatgatgattagtttttagttttcttattctgggtgcgaatcttgtgttaacttcctgatctgctaatattctatatgaattgttattattactccctccagtcaataatatttgacgttagtgctactactactactactaatcttagctatcccaacacaaaatgttattgattagttggggtattattattatttcaaaatgcttgaaatgaaagggcaataggctgtctatctcgttctcaaatctgtggcaattaggtttgactatgcctcttccagcacagatgtgtctgaggctgtgatggtggatttgggatgaagtcctataggaaggttattcagaggattgattttttgtttgaaacattgtagaagccctgaataaatagagcaagattcttgtatggtcagtcacttggacttgtgttatgccaacatacattgtggtgcaccgttgttctcttaggccaagcattgggatgtgaaggagattgttgcctacggtgattgttttatgctaagttcttgcatgaactaagaatggaagcatactgatttccatcatagatcaacgttctacctttcaatgtcatggacattggctggttttcttacatacatgggtagcgttctgcaggttaaaatcatctatacatttagttgaatagctgcatgtttgtaaatgttatttatatgcggaactgctgcataatttactcacacaactgctgaagttatgttttcgtcatgaaactagtcattggatgaaatttggtgtttgtgtttgtgttgaaagttgatccatttttatggtttcattgaatgtaataccaaatctttcacttttatgcttactaaaactagtggagggcaaaagatttcttttaccttagcattttattatttgtgattggccagtcagttggaagtggaaatgaatcttagtggaatgagtttctgatgttacttccctctattgttcaggtcaatatggatgcgatgttgagaaggctctggatgcattacttgatatctcgggtatgtcttcccttcaaaacatggaaaggtgtttcccgaatgctcaaataaatggcatgagctctccaaacatcttcctaggaaatggacggtctgaggaagtgtcaactgcaggcattgaaaaaagttcataccagtttacagatgaaatgcgaaacatgtcatataatcgttccgataatgagcacggattcttttggggcgagcttcagagaagctacttgaaggttgcatgtgaggagccccactcaacaacatcatctacaagatcaacaagctcgatatctaagacaccacaacaagtgctcgattcactgttcaaaatacctgaacaacgcacatatgaaccaagttccatggactggaagaaggtagttaagaggctgcagtcattcaattctcccatcacatcgaacaatcaagaaaaaccaaaaaatgggaatgggtatcaagaatttcgtactgtcgctggaaggcattatgatacaatgaaaacatattatcagaaagctgccatggcatattccaaaggagaaaaatcttatgcctcctatctcgcagaggaggggaagcattaccgtgaattagctcgcatggaagatgagagagctagcagggaaatatttgaagccagaaataagcatataacgaatacagtgactattgacctgcatgggcaacatgttaaacaagccatgaggcttctcaaggttcacatgatgatttgtgtgtgcatgccaaccacctttcttagagtaattactggttgtggtgtagaaggcacagggaagggaaaaataaagcgcgcggttgccgagcttgtggagaaggaaggcgttgagtggcatgaggaaaatgccgggaccatagtactaaggcttggtggcccaagggagtatcgtttccttgagcatgacagtgactctaattgagccttgggtgtctgttttgaggagactttacatagattaacggccgttctaatctatgtatctcctgtatctatctgtatttacatgtgttgtaattatggataggtgacctaggtcgtcctctgatgtagggctgtagtttctgacatacaggctctggaatagcaaggagtagagaacaggtgctgtctgatgtaatgatcgttgtaggctctgatgtaatgatcattgtaggctgctaaccttgtaatgaactctagctatgtacctgtctaatcgttttgatgtgatgctcaagataacttatgtcttgaatgtcaacattgcaacattcagacaattgatctactaaaggaactatcagaaacaaaattagctgt

SEQ ID NO: 24957 - DNA, 2253 bp, Oryza sativa
  ref <308>: DATABASE ACCESSION NUMBER: AK100399
  ref <309>: DATABASE ENTRY DATE: 2002-08-28
gccccgccacgtccatcgatcacgccgcctctctttgcgcgagagaaagagagcgagacggaggggggaaggatgggggagggggtgaaggcgatgctggcgaagccgatccagctcgcggaccaggtagcgaagcaggccgggtggcagtgcttccgggcggagtgcatggacctgcggtcgcgcgccgagaagctggcggcgctgctgcggcaggcggcgcgggcggagctgtacgagcgccccgccgcgcgcatcatggccgacaccgtgcgggcgctcaacaaggccgccgggatggcggccaggtgcttccagagccactcccgcctccgccgcttcttcacgctcaacccggtctccggcctcccccgcaccctcgccatgctcgacaccgcgctcgaggacgtcgcctggctgctccgcatctcgtccccgcacgccgacgctggcggcggcggcgacgacgacgactacgacctccacggcctccccaacatcgcgcagaacgagcccatactgttcctcatctgggatcacatcgcccggctccacaccggcaacctcgccgcgcgcgcggacgcggcccacaacctcgcgtccctcgcccgcgacaacccccacttcgccaagctcatcatcgaggaggacggcgtcgcgcccctcgtcaagcttctcaaggacggcaccgacgacggccaggaggccgccgccacggcgctcgggctcctcgcccgcgacgaggagagcgtggataagcttctccttgccggtgtctgctccgtgttcgcggccgccttgaaagtgccgccgatgcgcgtgcaggccgccgtcgcggagtccgtcgcggctctcgcgcatcacaaccagaaatgccaggacctgctcgcgcagaccaacgccgtgcgtcacctcgtcggccacctcgccgccggaaccatccaggagcacagtagatactatgttgcctggaccggctcgaggaacatgaacatgacatcccttcactccgttgtgcttgccaagacgctcagcgtgcatcaaggtggctctggttcccctgccaatgaaccgccgagctcgtcggaatatccgggtagccagcagcaagcaggaaagaaccagatgcaatcggtggtgcaatctgccatggctgccaagaccacggcgaacggagccacggttccacccggctgcaggcaccagctgacccccaacggctcgagcggtcgtggatcgcgcgaggccgaggacccggccaccaaggctcacatgaaggccatggcggcgaaggctctctggaagcttgcccgcggccatgtcggggtctgcaaaagcatcaccgagtctcgcgcgcttctctgcttcgccaagctcctcgagcaaggcgacggcggcgccggcacggacctgcagttctactccgcaatggcgatcatggagatcacccgcgtcgccgagcacaacctcgcgctgcggcagtcggcattcaagcccagctcccctgcggccaaggccgtcgtggagcagctcctccgcatcgtgtgcaagggcgacgtcgacgacctgctgcgcccgtgcatcacctccctcggctgcctgtcgcgcacgttcacggcgagcgagacccgcgtggtccgcccgctggtggagctgctcgacgagcgcgagctgccggtcaccaaggaggccgtggtcgcgctcaccaagttcgcgtgcaccgagaaccacctgcacgtgagccactgcaaggccatcgtcgacggcggcggcgcgcggcacctcgtccagctcgtctacctgggtgaccaggtgcagatcgaggcgctcatactgctctgctacattgcgctgcacgtcccggagaacgaggagctcgcgcaggccggagttctcgccgtgctcctctgggcgtccaagcagccacacatggtgcaggacctgcgcgtcgacgcgctgctcccggatgccaagggtcggctcgagctcttccagtccagagcatctcggtgatcaactggtgacggcattggcggcgatcaccggagttcaagaagatgagttagccctcgatttactgcaaaatcgaagtagatctatgtcgattgttcattagtagttccaaattcttgttgttttgttgttagaatgtatatatcacaccttcaatttgttgctttgtctcaaagaaattgctcggtgtattgattagtatggaggcgcttttcatgtatataacatttttgtatctgc

SEQ ID NO: 24958 - DNA, 3243 bp, Oryza sativa
  ref <308>: DATABASE ACCESSION NUMBER: AK100400
  ref <309>: DATABASE ENTRY DATE: 2002-08-28
ggcagccgctgctcctcttcggttgctccacggagccgtcgccaactgaggggatgatggccggacggcgaactcaccgaggcacggctgttggagcgaactaatccggagggggtcaggactattttgcgccgccgcggaggcggcggcgctagaggcaggtcgagcggaggcgacagcgtcgggcgacggggtggtgcaaacggtgggggccgcccggctcgagcgacagtggcgccgaaggcggtttgagcggaggcgacgacgccgggtgacgaggcagcccaaacggcggcggcgccagaggtgggtcaaacggaggcgacggcgctgggcgccgcggaggcccgagtggagggcggcgacgacaatgcgtggcgggccttcctccgcgctgccccccctcgctggctgccggctcccgaagctccgccttcaccgctctgttcctccccagctccgccgctctccctccccatctgcagctcgacggcaccggcggcggcttgacgacggccgctccgtgcccctcctcgccagatccggccttaaggtcgccggatctggccttgggaggcggtggcggcggtggcggcttgaaggcggcagcagcagatcgaaggctgcggcagcggctcgactgcgggagcagcagctcgaaggcggcggcggcggctcgactgcaggaacggctcgacgacagccagcccgcgccccctctacagtgcagtagaggtcccatcgatcggtaacatcgattcactgattcttccacatctctcccttgcgccgcttcgtcgcccacattcactgattcttggaagcacaaacgaaaggatcacatatgtacgttactaccttttcctgcaaatacatatacaccacttggatatacatacccattctgccttgctttacatgttaattaacttgattgagcaaatgtttgttgcattgatcggcctgtatctcaaagtacaatgagtaagtgactgaaggtaattcattagccttttatgtctatatatgatcatagaatgtatgcagggtgcatcagacaagcaaaattatatggcaagtgatggcacatttcttagggaaggatttatgagtttaatgtcaaaatcctctctatcagttgcttatgcagctaaaaatagggaaacaacctatttatattcataggatactctatgagttcaacatcaaagtttcttataggatactctatgagttcaacatcaaaattatttatattgacatgttaatttattatattctaaatccatatgttattgagatgtgttctccaattgatctgaatgcagagtatcctatcataatattaacaatgttggaccatacttttggtgggtgctgcatgcagttattattatcaaagccatgaaaggttcaaggcttccagctggttggcaattgctcttcagggtttctctacctgttaactgttattgcctgatattatttcagttttttgggtagttccttgggatgtcttatttgttgtttagtcgttatattcctatgcatgatcattatttagttgttttgataaatgaccttccctactctattttttatcatataaattagtattcggttaaactatagcatatatttttttgcatgaggcaatatttgtatttagcagcatctcactgactacattcatccattttcgttttcaggcatgggcacatggcagataccacaatgtgaggcaaacattggaccttagctaacataaatgaatatgtgatgccactttcactgatgcttctatgaccactagtccgggtaatttcaactttctcatgctgttatatgctgatgctatattacttagcatgctttaggaaattacagactatttcattctgttcaaattacatgttgttatttgtaatagtgtgggatatgcatgctcttcattactgtatatggcatgctcttcatcaaggttaaaccgtggatctattttccttttattattggtggctataaaatagattgatgctaattaatggcaagtttgcgaaaatactgaactctcatatctccaggattggctataaaatcgtcagttctgggtcatggaacagtaaaccttaatttctatttgtttttgctaatggccaatctgtatagattaattgtaaaacatacacaatatgagttgccactgtggttagggttgcgatctgcggttagggtttgggtatggaatagagcaagtgtgatggccaatgtgcatgacagagtcagctccactaaccaatgtctctagatatggttctactctgtgatctcccccatcatctccgtcatggattaggtctaagcttgatttaggtgtgtggctgtccagccatctgcgctcctccaatggcatgctgctggatatgcagccatctccagcttggttattctctgctgaaaaaaaattaatccctcctatcacatctaacatttgcttcgacccatgacaatgcttggtttggtatgccttttttcaccatcctttactctacaatccatgatttgcattcattgtttacaaggtaaatttattgaagagtggtctgttcttttgcgctgcagcattgtattgctcagaagctattttccagtcatcaaaatctcatttggataagcagctgtgttctgctatatattttttttgtccactgactctgtgaacaaccccgccaattatactaaaaccaaacaaaggtacatgaagaacaatccgcctgcaaaatcatttctatcaaacacattcttcactttttattcaagagctaatagacaaacctttctaagacgtatcgtgtcttgatgcatctatttacatgtgtcctgaccggtttctttacttccagaaaacaatcctttgcataataatatttgtacagattccattggaaactatccttttcagaaaacactacttttcattagccatgttatttcccttttgccgacctgacagtaatagaaggaaaaacagttgtagtttcattatttcaaactcaatcgcacgtatgcagctatatatatgggctatatatatgggctatggtttaagtaggtggacctactcttgcttcaatctttctttgtggtatagcatttgagaaacattagttagaatgttgcataagtgtagaattgaagaactggtgtaccttccggtttcatgaaacattactgttgcctacg

SEQ ID NO: 24959 - DNA, 2181 bp, Oryza sativa
  ref <308>: DATABASE ACCESSION NUMBER: AK100401
  ref <309>: DATABASE ENTRY DATE: 2002-08-28
gagtgagaaatccgaagccgtcttcctcctccccccacgccggcgacgacgaccaaccctagacccgccgcctcctccgccgccgccgccgccgccggccaccgcgagaggtaacgacctctcctcccgcatctccccctccctctccttcccaccatggggagcaaggggagggcgccgccgccttaccaccaccggggggcgcacaagatgatgcaccgggacccgtacgggggggcaccggggatgccggggccgttcccgtacgacatgctggcggcggcggcgccgccgccggagatcctggagcagaagctgatggcgcagcggggggagctgcagaagctggcggtggaggacgaccggctggcgatgagccacgactcgctgcggaaggagctcgccgcggcgcagcaggaggcgcagaggctgcaggcgcaggggcaggcggcgatggcggccgaggagcaggaggcgagggggatcctcgacaaggtcgccaagatggaggccgacctcaaggcccgcgaccccgtcaaggccgagctgcagcaggcgcacgccgaggcgcagggcctcgtcgtcgcgaggcagcagctggccgccgacacgcagaagctgagcaaggacctgcagaggaacctcggcgaggcgcagcagctccccgcgctcgtggccgagcgcgacgccgctaggcaggggtatcagcacctcagggctacgtatgagtacgaaaggaaactcaggatggatcactccgagtcgctgcaggtgatgaagaggaattatgacaccatggtcgctgagctagacaagcttcgtgctgagctgatgaacacggctaatattgacagaggaggcatgccgtttatctgttgttccattttttttaccacaatttttgggtagcatatatagaaaccacaccatgagacattttctatgtgtaggtatgctatacaatactaatactgctcaaaaggatgatggcgcgcctagtcttcctgttggacaaattgcttatgatagtggttatggagctgcgcagggaaggacaccacctgctggactgggagactctttaagcggaaacccagctggcacagctcctcggactggatttgatccatcaagaggcaatatgtatgacgcttctcgtattgctagcttcagttcttcaaaagctggaggacatgatgcatcaaggggtgccgcaggctacaattctttgaaaggtgctggatatgatccttctaaagcacctgcacttggaggacaggcaacagctgcagctgctcatgggagtagtgctgattactatggatcaaatcaggcaacaccaccttcatatgcttggggacaagctgcatccgcttatggatctgcacaagtgccacagtcacatgcatctggacctcctgttcaatcaacatcctacagtgcaacaacagcacgtaactttggctctgcccaggctttaccatcatatgcacatgcacaggagcaaccttcatatggacacgcacagctaccatcctcatatggattagcgcaagcatcatttccatttgccccagcgcaaggggtgtcaccctatgggtcaggtgcacagcctccgcagtatggagctgggcaagcagcaactaatcctggcagtgcttaccaagcacctcatggacgtaaataaatcggcaaaagttgtctactgatggattgttattggcaaaagagacaatgcgctgctttgtacaccagagttcagtttcctttccacagctaccaaatcttgtcgtttaactgatatgaggtgattcctgaatatagtctggagaagtaatgctctgcaagatgggaatgcttctgtaaagtgtaaacttgtcgtcggtgttttaactgcctttttttataccttcaagcctccaggttaggcaacccatggaagcatgaattctgacaagagctgtaactgttgattcttatttgatttgtcaaagttagtcgattgtttgttagttcaaactcaaatgctgcatgtatggtatgagatatacactgctagttctgggaggttaataatatgcccgtgctggagattctcaatgtttatcatgcatgcattcgttctgtttatcctgtaaatgcgcatgcccaggatgcatacatccgacattcccaatgacg

SEQ ID NO: 24960 - DNA, 2144 bp, Oryza sativa
  ref <308>: DATABASE ACCESSION NUMBER: AK100402
  ref <309>: DATABASE ENTRY DATE: 2002-08-28
gagaatccgctttgcgagcagcgaggagggtggaatcgagttcgagcggcggcgaatcgggagcggcgagattgggggaggcggccggagatggaggaggaggtgacggggagtcgaggggggttggggggagggaagaagatggcggcgggggaggtggagctgaaggagaaggcggggacggcgtggagccactcgtacctgaaccagaagccatggcacccgctctcctacccgaaccagcggcggaagtggatcgccgagcagatccacgccaaccgcgcgcgccgccaggaggaggtgcagcgtgagttcgcgcaggagcaggagttcttccgccagaccgccctcttctccaagaaggacaaggagaagagagtgcaaaagcagctgaaattgaagatgagaagaggaggtctggtgaaggtgatgcaacccaaagtgctgctgctgcaagcacctcttcaatgcctgataaggaacttgacaagacccacgcaggtccagataagaaaaacaggccaaaagatgtttttggccggccattgccaacagaacaagaatttgaagtgctgaaaaatgctccaaggttggagacaggtgctcctgcgagggttaaaccatttggagttgaagttcgtaacgttagatgtttaaggtgtggaaactatggtcatcagagtggtgaccgagaatgcccactgaaggatgtgatcatgcctaacgaggagagccgactgaaaagggatgatcctcttacagctataatggcacagactgattcaagtgagcctttgaagtgggaacttaggcaaaagccaggcatgagccctccacgtggtggatacaacccagatgatcctaatcagcagattgtagccgaggacatctttgatgaatatggaggatttcttggtggatgtgatattccagctcttctttccaacttttctgctagcaaatcaaagaaacgctccaagagtaaaagcaagcataggcaggctgagcctgctgctcatgaggaatcttcacactctgaagctgagaagagcaacaggacatcaaggagcaagagaaagaaagaatattgttctgattcgtcattttctggtgctgaggtggaagctagaaaaagcaagcaaaaatcaaagcacaagaagaaacacctgccagagtctttgtctgattcaaaagttgaagttggtagagatacaagaagacatcaaaagagagagcataggaagaagaaaagaaatatcactgagtcagagtcttcatctgattcagaagttgatatagatacaaggaaacatccgaagagggagcacaggaagaagaaaagagatgtcactgagtcatattcttcatctgattcagaagttgaagttgatagagatacaaggaggcatccgaagagagagcataggaaggagaaaagaaatatgactgaaaatgggcattcaagccgatcgagggagaagcaccactacagtgacactagtacttcggacaatgagaagcactcaatgggacataaggatgagcaatactacagcgattcaagttcttctaggagcaatcggcattcaagaaggtcaagggaaaagaggtactacagtgactcaagttctcctgagcacaataggcattcagggagatcaaaggagaagagggcctatactgacttgagcacgcatgacagggataggcattcaaagagatcgagggataagcgggagtacactgaatcaaggccttatgagagcaataagcattcaaggacattgaaggtgaactggcactactctgattcaagtgcttctgattattcaaactccgaacggcactatagtcatcgccatcgtagaagaaaatgagcagtgttgtataatctgcatgatgtctccacagaagatcgctctgccgtttatatgatgtcattagctacatatgcttggtcattttcttaaggccaccagggtccacgggttgctggtgtttggtgactgcagctgctaatcgacttgtgatgcgatagtaatgtatgtgactgaattttgtcttctgtagaagaattgttgtgccttttgttgtaggcttgtacccgagggacttttattaatttaaaaaatatcttgtttggc

SEQ ID NO: 24961 - DNA, 1222 bp, Oryza sativa
  ref <308>: DATABASE ACCESSION NUMBER: AK100403
  ref <309>: DATABASE ENTRY DATE: 2002-08-28
ggaccgtacaaccaagccgcagagaagaggaaggcggaatcagtcgagggcgaggcggcggcgatggcgacggcgaggaaggcgccgcgcatggtggcgatctgggcggtggtggtggtggtggtcgccgccgatctgttcggagcggcggtcgcgcggtcggcgtcggcgcgtcacgcggtggggaagaagcagcgggagttcgactacttcgcgctggcgctgcagtggcctggcaccatctgcgcctcaacccgccactgctgcgccatcaacggatgctgccgctcggagccgctccagacgttcacgatccatgggctgtggccggactacgacgacgggacctggccggcgtgctgccgccacaccagcttcgacatggacaagatattgcccctgaagccgacgcttgagaagtactggccgtccctctactgctcatcctcttccacttgcttcagtggcaaggggcccttctgggctcatgagtgggagaaacatggaacatgctcatccccggtagttaaggatgaattagagtatttcaccactgctcttgacctctacttcaaatacaacgtcacggaaatgttggcaagtggtggtatccatgtttcaaatggtaaacaatatgcgctaactgatgtcattgatgccatcaaatgtgcttttggggcctcaccgcaaattgtttgcaagaagggctcagttgaagaactgaggttatgctttgacaaagatttgaagccccttgattgccttactactactgctaccaatgaaaacgtatcgaagaagaagtattgccctcgatacatcaccctgccaacatatgaccccatagtacatgctaattctactcgggagatcataacagtcgaaagtgaggtctatggatatctttacacatcctaagatacgattaccgcgagcaagaattacatggccatgatgaagccggtagttcagggctcttagctgcttaagacatactggggccggcattgaggttcaaggaaatgtatatctagataactcgattattacatttgtaagcacggcacgccagaacaacggagaatgtgattgtgtctgaaaaatcaattgctttatgtactatgcaaggttggaaaatagttcgtccatgtatatagtcattggtcagggtcatctgcgactgcaatctgctgaattataatggacagtggcaatcggtctg

SEQ ID NO: 24962 - DNA, 1976 bp, Oryza sativa
  ref <308>: DATABASE ACCESSION NUMBER: AK100404
  ref <309>: DATABASE ENTRY DATE: 2002-08-28
gaaaccccgagacccccccgcctccaccaccacccgccgctcgccgctcgcccaccatggccatggcgacggcgctccgcaagctctcctccgacgccctccgccgccagccgctctcccgcatcaccccgctctactacatggcgtccctgccggcgacggaggagagatccggagtcacctggccgaagcagctgaacgcgccgctggaggaggtggatcccgagatcgccgacatcatcgagcacgagaaggcccgccaatggaagggtctggagctcatcccgtcggagaacttcacctcggtgtcagtgatgcaggcggtgggatccgtcatgaccaacaagtacagcgaggggtaccccggcgcgagatactacggtggaaacgaatacattgatatggccgagtcattgtgccagaaacgtgctttggaggccttccgcttggacccagcgaaatggggagtgaatgtgcaacctctatcagggtcacctgccaacttccatgtttacactgccctattgaaaccacatgagagaatcatggctttggatcttcctcatggtggacatctttctcacggctaccagactgatactaagaagatttcagcagtttcgatattctttgagacaatgccctacagattggatgaaagcactggcttgattgattatgatcagatggagaaaagtgccgttctttttaggccaaagttgatcgttgcgggtgcaagtgcatatgcgcgtctttatgactatgaccgcatgcggaaggtttgtgacaagcagaaggcaatacttctagcagatatggcacatatcagtgggcttgtcgcagctggtgttgttccatctccttttgattatgcagatgtagtgactaccactactcacaagtcactccgtggaccacgtggagccatgatcttttacaggaagggggtgaaaggagtaaacaagcaaggcaaagaggttatgtatgactttgaggacaagatcaatgctgctgtcttcccaggtctgcaaggtggaccacataatcataccattactggcttagctgttgcgcttaagcaggcaactactccggagtacagagcttatcaagagcaagttatgagtaactgtgcaaaatttgcacagagcttgacagcaaaaggctacgaacttgtctctggtgggactgacaaccatttagtgttggtaaatctcaagagcaagggcatagatggttcaagagtggagaaggttttagaaaacgtgcacattgcagcaaacaagaacacagttcctggtgatgtttcagctatggtaccaggaggcatcaggatgggaaccccagcactgacctcaagaggatttgttgaggaggactttgctaaggttgctgatttcttcgatgcagcagtgaacttggctttgaaggttaaggctgcagcaggtggaacaaaactgaaggactttgttgccactttgcaatctgatagcaacattcaatccgagattgcaaaacttcgccatgatgtggaggaatatgcaaaacagttccccacaattgggtttgagaaagaaaccatgaagtacaagaactaagaaactttgaatggaacagcaagggtaaaagaaaaggcatcaagctgaattcctgaggtgactgttggaattcttgcaagaacaagtcggtgtaaacatatatccatggagtgccatcttatgtaaaagggacccctggcattttacagcgtgtggaaactttgtcaatagttcttatcgtagacacctactgtaagatgttatgctaatgctatattaaccttcactatcttcttggacaagcagttacacatactttggtgtattctgtgaataattcgcatgattgcggaatttttcgtgtttataaatcgtaacttgtaatcttttggccctgcacgcaatttgaaagccctcgatcggattgtcgtttactcc

SEQ ID NO: 24963 - DNA, 1731 bp, Oryza sativa
  ref <308>: DATABASE ACCESSION NUMBER: AK100405
  ref <309>: DATABASE ENTRY DATE: 2002-08-28
gagtagcagccctcgtcgacccactcccgtctccgatccgccgccgccgccgacgacgacgacaccggcagccatgtccaaccccgaatcggacccaccaccaccatccgccacatcctgcccgcctcccggctccgccgcgcacgcgggccacgccccgctctgccgctcctgcggcgcgcccacgacgacgcccgtgcctcccccctggtcggcgtcctccgactccccgccgcctgcgtaccgccccatccgcatgccggccatcaacgcgcccaccaacaccgccgccatcgtcctctccccggtgccccagccgctccccgtgccgcccgcctccccgccgttcgccttccaggtccccgccaagcgcatcacctcccccgacgacatcgcccgcttccacgcctccgtccacgggcgccacttcctcggcttcgtcgccgcgctctccgcctccgtccacggccgcaagctctccgacccgctcccgtccccgccatccccggtcgtttccgcgctcctcgagctcatctccgcgctctccgccttcgtcgcgtccaccccaccgctcccacacaactcccgctacggcaaccccgccttccgcctgtggcacgagaagctctccgactcggccaaccagctgatcgctccgatcatggccaccgccgggtcgcccgacctcgccggcgccgaggccgagcttgcgccgtaccttctcgactccttcggcaacgccacccgcatcgactacggcacggggcatgagaccaacttcgcggcgttcctctactgcctagcacggcttgggctcatcaccgaggctgattaccccgcggttgtgctacgggtcttcgctgcatacctggacctaatgcgcacgcttcaggacacctacttgctggagcccgctggctcgcatggcgtgtgggggctcgacgattaccacttcctcccattcatatttggcgcggcgcagttgattgatcacaagtacatgaagcccaagtcgatccacaacccggatatcctggataactctcaaaggagtatatgtacctcgcatgcgttgcctatgtgaagaaggtgaagaaggggccgttcgcagagcactcgccaatgttggatgatatcagtggcgtaccacattggaagaaggtgaacagcgggctgctcaagatgtacaaggctgaggtgcttgagaaagtgccgattatgcagcatttcctctttggttcactcatcaaatgggaggactgaagcaatatccaaaacccctctgcttcgaggcaaatgtccagaacacacacacacaccatcatgttctgcaagtactccgcctggatgcaaaagactgatgtacagcgatgctgctcaatgtctgtacctatagaagctcactttccttctagcgttatgggctccggcttaggggatgtgctcggtttctgcatgatggatagcatagcgtttcatcattcgttgtgctgtagcgtagtagttcctcatcacacccgctgtggagcttaaattctggaccttgtctgttcctgttcagctcacattgctttggggattcccctctggacaggctggtagtggtaatattaataactccatgtactcaggctttttgatgtggatgactgggaagtgaaacagtttctgttgttggtgaaggtacactgtttggtgctatttcatgaataaacatcctcctgccatggc

SEQ ID NO: 24964 - DNA, 4081 bp, Oryza sativa
  ref <308>: DATABASE ACCESSION NUMBER: AK100406
  ref <309>: DATABASE ENTRY DATE: 2002-08-28
gttcagctggatcaacccgctcatctccaagggctccagggcggctctcgccgcggacgatgtcccgcccgtggcgccagatgataccgccgaggcgacttacgcgctgttcgtgtcaaactgggccgcgccgccggcgccggggactaaggccgggcatcccgtggtcaccgcacttctccggtcgttctggccgcagttcttgctcaccgccatgctcggcctggcgcacctctcggtcatgtatatcggcccttccctcgtcgacaggttcgtgaatttcgtccgccgcggcggggcgttgacggaagggcttcagctggtcgtcgtcctcctcgccggcaaggcggcggaggcgctggcctcgcaccactacgagttccaggggcagaagctcgggatgcgcatccacgccgcgctgctcgccgcggtgtaccgcaagtcgctgcggctgtccacgggcgcgcggcgcgcgcacggcgccggcgcgatcgtgaactacatggaggtggacgccgaggaggtggccaacgtcacgcacgagctccacaacctgtggctgatgccgctggagatcgccgtggctctcaccctgctgtacacccacctcggccccgccgtgctcaccgcggtcgccgcgatcgccgtggtgaccgtggtcgtggcgctcgccaaccgccgcaacctggagtaccagttcaagttcctcggcaagcgcgacgagcgcatgaaggccatcaccgagctgctcaactacatgcgcgtgatcaagctgcaggggtgggaggagacgttcggcggcaagatccacgagctcagggaggctgagctcgggtggcttgccaagtccatgtacttcatgtgcgccaacaccgtcgtgctctggagcggcccgctcgccatgaccgtgctcgtgttcggcacctgtgtgctgaccggcgtcacgctcgacgccggcaaggtgttcacggccaccgccttcttccacatgctggatggaccaatgcagagcttccccgaggcgattgcctccgtgacgcaggcgaccgtgtcactggggaggcttgacaggtatctgctcgacgtggagcttgatgataccacggtggagcgtgttgatgacgctgggattaaccctgatggtgtggtcgtggaagtgcgcgatggcgtgtttgcatgggacgtgaggggcaagaaggagaatgaagagggcgacgacaacgaggatgatgaagaaggtgaggaggaggaggaggagaaagatgtcgaggagacgcctgttctggagacagtgctgaaggggattaacattgaggtaaggaggggtgagcttgcagcggtggtcgggacggttggctccggcaaatcgtcgctgctgtcatgtatcatgggggagatggacaaggtctccgggaaggttaggatatgcgggagcactgcatatgttgcacagactgcttggattcaaaatggcacatttcaagagaacatcttatttgggcagccaatggatgctgaaagatataaagaagttctgcggtcttgcagcctggaaaaggatttggaaatgatggaatttggtgaccagacagagattggagagcgagggatcaatctcagtggtggacaaaaacaacgtattcagcttgccagggcagtttatcaaaattgtgatatatatctccttgacgatgtcttcagtgcagttgatgcacatactggctcaagcatttttaaggaatgtctgagaggcatgctcaaaggaaagaccatcttacttgtaactcaccaagtggatttcttgcataatgtggataacatatttgtcatgagagatggcatgattgtgcagtcagggaaatatgatgagttgctagatgctggctcagatttcttagctcttgttgctgctcatgatagttcaatggaactggtggatcaaagtcgacaagttgtcaaaactgaatattctcagcctaaggcggtagccagaattccttctcttcgctctagatccattggaaagggtgagaaggtacttgttgcacctgatatagaagcagctacttctaaaattatacgagaagaggaaagagaaagtggtcaagtaagttggcgtgtgtacaagttatatatgacagaggcttggggttggtggggggttgtcggcatgcttgcttttgcaattgtatggcaagttactgaaatggctagtgactattggctgtcatatgaaacatcaggcagcattccatttaatccatctctatttattggagtgtatgttgctatagctgctgtttcaattatccttcaagtaatcaagagtcttcttgagacaatattgggacttcagactgctcagatctttttcaagaagatgtttgacagtattttgcatgccccgatgtcattttttgataccacaccttcagggaggattctcagtcgggcatcatcggaccaagcaaccattgatattgtgctgtccttttttgttggtctgacactttcaatgtacatttcagtattaagtaccataattgttacttgtcaggttgcctggccatcggttatagctgtaattccacttgtactattgaacatttggtacaggaatcgctatcttgcaacttctcgggagctaactagacttgaaggagtaacaaaggcaccagtaattgatcacttttcagagactgttctaggtgctacaaccatcagatgcttcaagaaggacaaagaatttttccaagaaaatttggacagaatcaattcaagtttgcgcatgtacttccacaattatgcagcaaatgaatggcttgggttccgtctggagttgattgggacactcgtattggcaataactgctttccttatgattagtctgcctagcaattttatcaagaaagaatttgttggcatgtctctttcatatggcctctccctcaattctctagtgtattttgcaatatccattagctgtatgttggaaaatgatatggttgctgtggagagggttaatcagttcagtacccttccttctgaggcagtgtggaagatagaagaccatcttccttctccaaattggcccactcatggtgatattgacatcgatgatttaaaggttaggtaccgaccgaatacacctctaattttgaaaggcataactgtaagcattagtggtggtgaaaagataggagttgttggaagaacaggcagcggaaaatcaactttgatccaagcattgttcagacttgtagagcctgtgcaggggacaatgatcattgatggaatagacatatgcacattgggtctgcatgatctaaggtcccgctttggcattattccccaagaaccagttctctttgaaggaacaattcgaagcaacattgatccaattgggcagtattcagatgctgagatatggcgggctctggagggctgccaactgaaagatgtagttgcttcaaaacctcaaaaacttgatgctctagtggctgatagtggggagaactggagtgtaggccaaaggcagcttctttgtcttggccgcgtcatattgaagcggactcgaatattatttatggatgaggcaactgcttcagttgattctcaaactgatgccacgatacagaagatcacacgacaagaattttcttcatgtacaataattagcattgcacacagaataccaacagtcatggattgtgatagagttctggtgctggatgcaggtctggtaaaagaatttgattcaccctcaagattgattgagcagccatccctgtttggtgcaatggttgaggaatacgccaatcgctcatccaacctgtaactccgtctgttatacacattttctcaagcaaatcagagtaattttgctagggtgagactacttcacatctcaagaactaaaaaaaactaaaacagtatgataatgttcatgtgtaccccatttgaatctttgttgtagctttgcagcatttttgttagaagctcactaaaggaggatagtaataactaaaatgtggatggttttatttctggcattaacaaagatcccttcttgatttgtatt

SEQ ID NO: 24965 - DNA, 3488 bp, Oryza sativa
  ref <308>: DATABASE ACCESSION NUMBER: AK100407
  ref <309>: DATABASE ENTRY DATE: 2002-08-28
gaggaggcccttctcggcttctccttcctttttccctctctctcttcatatcaaagagacgcaccgaacaagaagcacaaaacccactttcatcaattctctctgcggcgatcgccgagggatccaatggcgcacgcggcgcggccattgggtgggcgcgcgcgaaaccctagccccgggcccgctcggccgccgccgccgttcgcggcggcggatgctgccgccgccgctgacctccgcgacgcgccacggagggttgcgcggatgaaggatagagcttgtgcaacttgtggtgataaaattgattcaggaaatgtaatacgttgtcagtgcaagaaatctccagagcatgcaaagcatgaaatccatcatacgaatgatgcaatgcttgaggcaaagggatttgcaaagccaaactcttcaaataagtatgggatgcacaaatcttctggtggtacatattcaaaacctgatgcaagagtaaagataattcctgcagaagaaattacatatgtacgtcatggaaaactatgtggtaaaactgttggctcagatggattacagaaaaggcaacgcagacgaagtgtcaccccccctccgagttcacgtaaagtgtctcttgtgacacctacagtggttaatcagaggcctacaccaccagtctcaccagctgcctcgcgtatctctcctaaccggcctgggacagctaaaaatgttcactcagtcgttacctcatgtatctctccaaacttgaccgggaaagctgaaaatggtcactcacttgctacctcaggtatctctcctaactgtcctggggcagttaaaaagattcactcacttgctacctcacctatctctcctaactggcctggggcagttaaaaagattcactcacttgctacctcacctatctctcctatgtggcctgagacagctggaaatggtcactcacttgttgggggctatatcacaaattcctttacaacacaaatagcttatctttcacagcgtccatcaccattctgcagggctgttctttcacagccttctgggacacctcttggtactgatgccactgctcccaagaatcttagcagatcgggtaatagagaagcatatgtcaaaagttgcagttcacgcaccagaaccttctcatctgcgcatgcacattcaactgtagttcctcctggtacaaatgcagaaccttctgctgaaagtttttgtgcgcctggcaatgagaagtcatcccctatgagctgtaagttgggcacgttacaatgtcaaggcacaagaactgctgtggcgccttcagtgcaaaaaaagctaaccatggagcctgcattaccgagcccaaaatctgtgcttagtgaaaagtccaacgaggcatatcctgatactgatccaaggccttcttccagaccaaatttatttgatacaaaatgcaaggtgggctcaccgcaaagtgaaacaatcattcctccatcacaaagtccacagtctacatctcatgcacgatgtgttgaaccgcctgatgattttgaagcagttccatctactaagagccatataattacagaaaaacaaatgaaccaggaggcaccaatcaattgtaatgtatcttcaggtatcccagtaattttacatacaaagctgcacaagaagcattaccaaccagaagcctgctggaagggtaaatttgaagtgactggagagctaacacatatttgtgatggacttgaagcccatttccctttcgaaatttctgcccaagtatatgaggcttcaaaacaaatgcctgaaatattaaagctagaggctagacctctttctcatctgtggccgaaaacattcaagatgaaacctccagaaggacaagatattggactgtgcttcattagctctcttcaaagaccaaatgggagttctgaccatctcctgaaaaatatttcttcgcatattgggttacgaaccaagattggtgctactgagttgctgatattttcatccaagttacttacccaagaatatcaaagaaaatgtgataagttttacttttggggtgttttccgggcgctgcacagatcctataatcaaacaagtatgtcatttgatgcaacaggatgcaaagagattgagaggcacaaaaataaggaaactggcaagattttggagacacaagacaaaaaaacagagaaggaaaaatgtggggagattggtaataaattggattcggcagttagcagagaaagagataggatcaacgaatgcatgagaatgctgactcctgatccaaatgctgcggcaagctcttcagattttacttgtcaatctgctcctagagttcctgctggttctgaccttgttttggacacacctcccgggtttcctcatgatgaccctccaggcctcacaaaagcccattgtctcctccatacaggagaaaccactgagccttacatagactcatctccaagccttaatttgggcgtacctccagggctttctcttgatatccctcctggctttatgaaagctcattatctccctcatacaggagaaactactgagtctcacataaacccttctcacagtcacagcctttcttgggacacccctctaggattttctcttgatgttcctccgggatttactaaagcccatcgtctacccatagtatctactgctggatctgaaactgttgtttctgaaaagaaacccctcattaagttcactctgaatgttccaagggttgcacaaacagaagccattcctggcatttattaaactgcttgcagtgaaacaagagcctgggttgcctgcaatctgtatggccacagagaaggcatcaactggaaaagaagatgaaattaaaagtaagcaggatgaggtagtaacagaacgggacgaaagctcagaggagcgtttgtttccaaagaccaggcttctttctgatattctgagctcttcggcggcttctaatgcgaacacaaatgcttcacccaagcctacaagcaagtttcatgatgcaccagacaaccaaatacaggacagaaagagagatcacccagaatcacccgagccttctcctgcagatacactcaaaaggctcagggtgaatgggcgcatagctctaaacagagtcatggatcgtcgaacattgagttcccaaccaatctcaagggaaggattagttgatatacaagtgtcaggtcctacagtactgacgagaagcaaatgctgtagttggcaacatttcaggtgatgaatgtgcatgttttgtatgcagcgaagagttcccaacggggtgatttgtggcgctccatatcatttgttttaagcaacaggaagcggcaccttttcgttttaagcaacacttgttaacaaaagtgcgcagctttgggtttcttgcgaggtgtagctaacgagtaacctggtaccaccaaatatcaacgaaaccatttgctatatcatttaatagtattattatc

SEQ ID NO: 24966 - DNA, 2287 bp, Oryza sativa
  ref <308>: DATABASE ACCESSION NUMBER: AK100408
  ref <309>: DATABASE ENTRY DATE: 2002-08-28
gaacctgtagcccgcttcagtccgacgaccatggccactcctttgctcgccgcgctcctcgccgccgcgctgctcgcctcgccggcggcgccggcggcgtcggccagcggcggcaccatcgtcttcaccaccctcggccgcagccgctacgagttcgacatcttctccctccccctcgcgccctccccccataaccccgccgccgccgccgagctccgcctcaccgatggcgtctccgtcaactacaacggcaacttcgcccccgcctccgattccatcctcttcgtctccgagcgcaacggctccctcaacctctacctctccccggttccctcctcccgccgcgaggcgctcgagtcggcgtcgtcgtcgtcgtcttcggcggcggcgacgatctcgccgctcctcccatgggagccaatcgcgctcaaggaccggccgtcgctcacccccgacggctcccgcctcgtctacgtctccaccgccgtccccgccgcggagccgcgcagcagctgggccgccgtgtactccaccgagctgtccaccggccgcacgcgccgcctcacgccgcttggcgttgcggacttcagccccgccgtgtcgccctcgggcgagtggacggccgccgcgtcgcccggcgccgccggttggagcggcgaggtcgaggacctgcgcactgacatctacgtcttccgcaccgccgacgggtcgcgccggtcgctcgccatccgtgacggcggctggccgagctgggccgacgagaccaccgtcttcttccaccgccgggacagcgacggttggtacggcgtctaccgcgccgagatctccgtcaccggcgacggggtcgaagcggcgtccgtggagcgaatcaccccgccggggttccacgccttcacgccggccgcgtcgcccggcgcgccggggctcgtggcggtggcgacacggcgggcgggctccgactaccgccacatcgaggtgatcgacgtgagcagcgacggcaagaacgcctacttcgaggtgaccaggcccgtggcaccgcgcgtgcaccacttcaacccattcatctcgccggacggcgcgcgcgtcgggtaccaccggtgccgggggagagggaacggcgactcgccgctgctgctggagaacatcaagagcccagggtcaccggacacgttctcgctcttcaggatcgacggctcgttcccctccttctcgcacgacggcaagaagatcgcgttcgtcgggctgccggggatgtacgtggtgaactccgacggctccggtggtcgccgcaagatcttctccgggaacgccttctcgacgtcgtgggactggaagaggaaaggcgtggtatacaccagcatcgggccggatttcgccagcgagaccacggaggtggacgtggtggccatctccctcggcgacgacgacgacgagtcaaccatctcgatgaagaagctgaccgtgggaggcgagaacaacgcgttcccgtcgccgtcgccggacgggaagtgggtggtgttccggtcggggagatccgggaacaagaacctgtacatcatcgacgccgaggacggcgaggccggcggcatccggcggctgacggaggggccatggtcggacacgatgtgcaactggtcacccgacggcgagtggatcgccttcgcctccgaccgccatgccccggggagcggcagcttcgccatctacatggtgcaccccaatggcaccgggctgcggcgggtggtgcacagcggcggcagcggccggaccaaccacccatggttcagcccggactccaagagcctcgtcttcacctccgactacgccgccgtctccgccgagccggtctccaaccctcaccattaccagccatacggcgagatcttcaccgtcgacatcgacgggtccaacatccggcggctcacgcacaactcgttcgaggacggcacgccgtcgtggacgccatacttcctggagccccgagacgtcggcgagacgctgcaagcctcgggcaggtgcgcgttccaggattgccactggctcaacatccaagatgctgcccaacctgaagagctcaactatggcaagagctgctgagtgaagccatggcactggctgatcacgctgaattaagccaataaaccatggatattggagtgcatgaatgtagatataatactgttatgtagtagcatgaatctaccaggaataagatcatgtacactgatgccatcttcagggcaaacgatatcagaattgctacatatctagtttttttttattggcc

SEQ ID NO: 24967 - DNA, 2595 bp, Oryza sativa
  ref <308>: DATABASE ACCESSION NUMBER: AK100409
  ref <309>: DATABASE ENTRY DATE: 2002-08-28
gctctctctttcccccccccccccccccacctcacctgcgtcctcgccgccatcgccgccgccgccgtcgcagcatcgggatatcctcccgccgcgagtttgctgagcacagttgctgaattttagggttatctgcttcaagcataagtgggccattgcttctggcttttactgaacgtaactcacttggccaaatgaaatccatggtagttggttattctgaagcatagaattgttactgctttgtgaacgaataacatctatctatctagagcactggaagatggatcatagagatacttctgggtttgtcagtggaggttgcaaagaatcaacgaactgcatcaccctaggatttctaactttttagctttgttaaccattatttaatctggaagtgaggttatctggtacttggcaaaaaaattggctgtgttttgtctcctgagaaattctctagcaatggaccccagacttgggcggtcagcgtttataaatttctcaaatccaaatgcctatgtgggcaagttccctgtcatctccacagtcagccatcctacagcttctagtcaaattgatgtgctagctcattgcagttcatacaacctgcctagagggaccaagagaaagtttgatggcttgtcactagggctgggcaactcatcaagctcagaatctagcaagcaaagcatgggtactggctgcaccatatcttctgctaagggtagtgatgatggttcttctattgatttggatttgaatcattttactctgggcaatgaaggtacttccaggcttgataagcgggcctgtgattctaggagggctttggataagcctgaattgaatcttgagctgtctttgtcatcccagtctgctattactggtgcagacttcactgcagcgactgaatataatagcccaagtctgcagccatactatatggacttagtgccaacagttgatgaaggatctacatctgctcgccgaccatctggttgtcaggtactgtctttccttaataagactgcaaagatgagtgaattttctccaagggaggttttcccaggtagctctaaccagagtcaaggtccggctccaatgccaacattgcttcaactgccaaaaagtccagtagcctgtacttccggtttatctcgtccacaacagcgcagcagtagcacaaaaaactgtacatacccaggatgtatgaaaggagccagaggttcttcagggcgttgcattgctcatggtgggggtagaaggtgccaaaaagatggttgtgacaagggggctgagggcaagacaatattttgtaaggcccatggtgggggaaggcgctgcgaacaccttggatgcaccaagagtgctgaaggtcgtactgacttctgcatagctcacggtggtggccgtcgttgtagccatgaaggatgcaaaagagcagcaagagggaaatctggtcgctgtattaaacatggtggtggcaaaaggtgtcaacatgcaggctgtacaaagagtgcagaagggcgctcaggcttgtgcattgctcatggaggtgggcgccgctgtcagcaagatggttgcggaaaaggagctcagggaagtaccaacttttgcaaggcgcatggtggtgggaagagatgcacacaccctgattgtaaaaagggtgccgagggaagtacagcgttttgcaagggacatggaggaggcaaacgttgttcagctgaaggttgtactaagagtgtgcatggcggaaccctttgctgtgttgcccatggaggtgggaagaggtgtgtggtagaaggatgcacaaagagtgcaagaggccgtactgaccgctgtgttggccatggcgggggcaagagatgccaatcttctggatgtgataagagtgcacagggaagcactaacttttgcaaggcacatggaggcggcaagcgttgcttgtggggtcacgaaggatctgaccatggagctggtgacactccttgtgagcgccttgcaagaggcaagaatggcctgtgtgtttatcacaatccgcaggtggatgaaaatcgtgtccatgggggtttcagcgttgtcagcgatgcactttctcagggagatcgaccttcaaacactgaaacaagcaggtgcagcattttctcgcatcctatggaggctcctcgtcgtgtggcagctccagctgacgagggtcgggtgcatggtggcaacatcctgtcaatgtttgcaaatggcatgagtttggggaggcatcccgccaaccaagcagaggctagcacctctgcacctcgcaactcgaaatccaccaatggcatggtgaccggtaactctgcggtgcggggcagctggctgtagagccttgaaccgccttctgctctctccatttcagtaagcatatgcttcgaaccatctgacaagtgccttctcttcttaatccttcgggtgtgaaaactatggtgtgattgtgtgaactgttgtgtcctgatttgtttagcagtgttgtgaacttgtgatatattattaatcgtttgtgctttgtaaaatgtaataatcacctgtgtgagataaataaaagggggaaggttacacatt

SEQ ID NO: 24968 - DNA, 4003 bp, Oryza sativa
  ref <308>: DATABASE ACCESSION NUMBER: AK100410
  ref <309>: DATABASE ENTRY DATE: 2002-08-28
ggcggtacggacaccccccgcccttcctccctccctccctcccccgcgcctcgcctcatcgaatcccctgtgtcccgcggggattcggcgccggcgtccgcccaattggtcggcctcggctcgggagaccaccgattcagcgcctcgacttggtcgggctccccgcgggatctttggtggttccttttttcgggggattgttctttcatgctggctgctcgattcgcctcttgggggtttcgatccgctagcgttagttgttcctagggtttcttgggcgatcgtctgggtcgcgtagttgaccccatatgtgattgatggatgatgaccgttccgatggataaagctactgcttccccatcatcaagggagcttgcacagcggctcttaaagaagaacgctgaacatgaaagtcgtctgcgaaggtcagcacagtccaaagtgccatcagatcctaacatatggtttcagatgcgtgagaactatgaaaagataatccttgctgatcatgacttctctgaaaaacgtgagatagaatatcttctgtggcagttgcactacaaaagaattgaggaattccgagctcatattgtctctgctgggaagaacaatgccaatcctgatcggatcaagaggatcagatcttctgttagaagtttcctctcagaagcaactggtttctatcatgacttgatgctgaaaattcggtctacttatgggcttccgttgggctacttctctgagggtcctgatagttctgttgttcctgataaagatgggaagaaagtggttggggtgaaaaaaggcttgttgtcatgctatcgctgtttgatatatttaggagatcttacccgatacaaaggtctgtatggggatgtggattatgcaagtcgtgaatatgctgcagcctctatctactacaaggaagcagcttcgctgtgcccttcgaatggcaacccacatcatcagcttgcaatactggcatcatatgctggagatgaggtaacagctatctataggtacttccgtagcttagctgtggataatcctttttctgcagcgagggaaaacttgattctcgcatttgacaagtttcatatgcagaatcatgatatctatgctcagctatcaggtaatagcaaggttcccaacgctaagagcttgccatccagatcagttggtagggccagaggaaggggtgagacaagatttcagcccaaaggttctagtacagaagaaaattcaaaggagcgagagcacagtattcaagaaatactgaaggctttctatattcgatttgttcgcctcaatggaattcttttcacaaggacaagcttggaaacatttggggagttgtctgctacagttatcagcgatttgcaaattcttctttcatctggtccttacgaggagcttaattttggtgttgaggctgctgaaaacgcgctttctgttgttaagcttattgctatccttatattcacagtgcacaatgcaaacaaagacgcagataatcaatcatatgctgaaattgtgcaacgcagagttcttcttcaaaatgcatttgctgcagcctttgaatttgttggataccttctcaaaagatgcgcagagcttcatgatgttgcatcaagtatctacttgccagctattttggtcttcattgaatggctggcgtgccatccagattttgtggctagttctgagatggatgaaaagcaagccgatgcaagatctttcttctggagtcaatgcgtgccatttatgaataagctcattttgactggtctcgcacatgtcgatggtgataatgatgaaacttgcttttttgacatgggcacatatgaggagggtgaaactgggaacaggcttgcgttgtgggaggatgttgagttaagagggttttcgcctttggtacctgctcaaggtatcttggacttctccaccaagcaaggttttggaagtgatggaggtaccaaggagaaaaaagcacgtgtagaaaggattcttgctgcagggaaggcgctgttaaatttcgttcaaattgatcagctgcgaatatattttgatgcatcctcaaaaaagttccttatggcttcagaacctcctcctcctgcttcttctgttcctcttgttgtatcttccaatgcgcagacaacaaatcacatacaacaggaacctgaagtctccagtaaaattggttctgtcgcagaagatctaggtgtgcttcagtcaaaggcacaactctttcttgatggagatgatgatgaagaaatagttttcaagcctccagtttctgaaaagcttccgagagttacttcagaacagactagtaatgagttattacagccagtggtggtgtctgatgtcaattggtcaaatgatggtgcaccaccaccaatgacatttcagagcaatggaccggttctgactcccaatgtttatgttcaatctctcccaatctcttctcttggttgggcagccaatgctgggcaacatgtgattcttgatgttggtgcaaggtcaacatctgatatttttgagtctctgaaagcacctgatcataactgggtaagcactggtgcaccacttgttggctcactggatacagtccctatggcgagcttttccaatataatttcggatcagcgtacacctccatcgtcactcggttgtttcagtaacccagataatacagccatactccctgggcaagattcattcttattgagtgcattaaacaatgttaacataggtgcaagtggatttctggatcaaagagtgaatggtggactcagtggattacagtctgtgggaaatgtgcctcaggtatctgctcaagctactatgaatagtacaaatccaatgattggtcagtataaacatactgaagttaccatcccttctgccttctattcagttctgccgtcagtagtatcttctgatggtgtatcaaagaaaaatcctgtcagccgtcctggaagacatgttggccctcctccaggatttaacaatgcccctccaaagcgacaggatgattccattttagctggcaatggccagcatgttcagaccaatgacggcatctggttggatggctacaggtcatcactggattatgtcaataatcagcgttttgcacattcaaatgttaccactgccagcagtactttcaccactccctttccttttcctggaaaacaagctttcagcatgcatcctagaggtagcgatgaaaaacagtggcaggatttccacctttttgggcccacaaagcaacttccagaacttaattttcagcaagggaaccagcaaaatggtccactggcggaacaattaccagcacaatctgcatggtctggcaattaccttgtgtgactagcttgtaccatgaaggatttgctgagaatctgttgggagtaagtggcgaagattgacacttgaattcggccttgataagtacagccctgtcatgtaatgtttcttttggaagatgcttgtcttggaagcataacaagtgctacccttggaactgggtatggcaggtcttccaggctatgaaggggattttagatgatcccttccattgtctgatgagaatatgtacggagagttctttaacttctcagacccagggttttgacctaatgagtaatctgcaattctgcatacgggcagttactgagatgcgtcaggtaagtccgtggattggttgctgccgtggaaactgaagccttcacgaacgaatggatgaaattctgtttttggtggtactcttgtcgatcagagctatgaataaagttggtgatgactgcttcatgcttgtggatgttctttccagctatattgttcatgtggtacattgttactgcaaagtcattaaatacacttaaggataaatcattatgcagttgctatcatatgatgtgctatggtagcaacgtttcgtgttggtatttgtgtgtgaaccaaatgtattatcagcttgatgagctgatctttt

SEQ ID NO: 24969 - DNA, 1790 bp, Oryza sativa
  ref <308>: DATABASE ACCESSION NUMBER: AK100411
  ref <309>: DATABASE ENTRY DATE: 2002-08-28
gaccaaattaaagaaagcatactaagcttagtgtgtgttgaatcggcgacgaagatgtcgtcgtcggcgacggtggtgccgctggcgtaccaggggaacacgtcggcgtcggtggcggactggctgaacaagggcgacaacgcgtggcagctggtggcggcgacggtggtggggctgcagagcgtgccgggcttggtggtgctgtacggcggcgtggtgaagaagaagtgggcggtgaactcggcgttcatggcgctctacgccttcgccgccgtgtggatctgctgggtcacctgggcgtacaacatgtcgttcggggagaagctcctcccgatctgggggaaggcgcggccggcgctggaccagggcctcctcgtcggccgcgccgcgctgccggcgacggtccactaccgcgccgacggcagcgtggagacggcggcggtggagccgctgtacccgatggcgacggtggtgtacttccagtgcgtgttcgccgccatcaccctcatcctcgtcgccggctccctcctcggccgcatgagcttcctcgcctggatgatcttcgtcccgctctggctcaccttctcctacaccgtcggcgccttctccctctggggcggcggcttcctcttccactggggcgtcatcgactactgcggcggctacgtcatccacgtctccgccggcatcgccggcttcaccgccgcctactgggtggggccaagggcacagaaggacagggagaggttcccgccgaacaacatactgttcacgctgacgggggcagggttactatggatggggtgggcagggttcaacggcggtggtccgtacgccgccaactccgtcgcctccatggccgtcctcaacaccaacatctgcaccgccatgagcctcatcgtctggacatgcctcgacgtcatcttcttcaagaagccctccgtcgtcggcgccgtccagggcatgatcaccggcctcgtctgcatcacccccgctgcaggggtggtgcaggggtgggcggcgctggtgatgggggtgctcgccggcagcatcccgtggtacaccatgatgatcctccacaagcgctccaagatcctgcagcgcgtcgacgacaccctcggcgtcttccacacccacggcgtcgccggcctcctcggcggcctcctcaccggcctcttcgccgagcccaccctctgcaacctcttcctccccgtcgccgactcccggggcgccttctacggcggcgccggcggcgcccagttcggcaagcagatcgccggtggcctcttcgtcgtcgcctggaacgtcgccgtcacctccctcatctgcctcgccatcaacctcctcgtcccgctccgcatgcccgacgacaagctcgaggtcggcgacgacgccgtccacggcgaggaggcctacgcgctctggggcgacggcgagatgtacgacgtcaccaagcacggctccgacgccgccgttgcgcccgtcgtcgtatgatcgatgacattgcatgtgctgtcacctgatgaaaacctcaagaaattcatacacacagaaattaatactacgtgtttgcttctactcgttaattatgaaaatctatgttcaagttttacgtgtatttaacagcgcgcgtgtggagtttttaggtattgcactttgcagattcaggggagtccggttctgtatttttgttagtttgtaaaaatacatacgtagttttgtatccttacttgatctgaatgaacacaagtataatattgtattttgttaattaagctccattttttccg

SEQ ID NO: 24970 - DNA, 1961 bp, Oryza sativa
  ref <308>: DATABASE ACCESSION NUMBER: AK100412
  ref <309>: DATABASE ENTRY DATE: 2002-08-28
gacggctgcacgccctgcacccgttgccaccaccaccgccttctccgccgcgccgcctcctctcgcgtctcccgctcgtgcagggcgcgcgtcgtcgggcgagctgctgccgtctccgtggccgtggctgatcagaactagttggcgttcgatcggaaagtcgctgtcttttggcgactcggtgagaatttgcgccgcggttcaatgtgaaaaattttggcccgtggcgagttggatttggcgccgagtccattcaggtggttaagacttgttcgtgggagagcgaagctgcgcgcgttaagaccgggctccgttcttgcatcgtgcagagcagctgctggtttgagaattgagaggcgcggttgacatggagagttccaacctgggcggcggcggcggcggaggcggcggcggtgggccgccgccgttcttgatcaagacgtacgagatggtggaggacgcggcgaccaaccacgtcgtgtcgtggggccccggcggcgccagcttcgtcgtgtggaacccgctcgacttctcccgtgacctgttgcccaagtacttcaagcacaacaacttctccagcttcatcaggcagctcaacacctacggtttccgaaaaatcgatcctgagagatgggagttcgcaaacgaggatttcataagagggcacacgcaccttctgaagaacatccatcgacgcaagcccgtgcacagccactccctccagaaccagataaacggaccactcgccgaatcggagaggcgcgagctcgaagaagagatcaaccggctcaagtacgagaagagcatcctcgtcgcggacctccagaggcagaaccagcagcagtacgtgatcaactggcagatgcaggcgatggaaggcaggctagtggcgatggagcaacggcagaagaacatcgtggcctccctgtgcgagatgctgcagagacgcggtggcgccgtgtcgagctcgctgctggagtccgaccatttcagcaagaagaggagggtcccgaagatggatctcttcgtcgacgattgcgcggcgggcgaagaacagaaggtgttccagttccagggaattgggacggatgcaccggccatgcctcccgtgcttcctgtgaccaatggtgaggcttttgacagggttgagctgagcctggtctccctggagaaactcttccagagagcaaatgatgcttgcacagctgctgaagaaatgtactcccatggtcatggtggtactgaacccagcactgctatatgtcctgaagagatgaacactgctccaatggagacaggcatcgatcttcagttaccagctagcctccatcccagctcacccaacacagggaatgcccatctccatttatccactgaactcacagagtctccaggttttgtgcagagtccagagctgccaatggcagagattcgtgaagatatccatgtgacaagatacccaacacaagctgatgtaaattctgagattgcctcctccactgatacttcacaagatggcacgtcagaaactgaagcttcgcatggaccgaccaacgatgtgttttgggagcggttcctcacagagactccacggtcatgtttggatgagtcagaaagacaagagtctcccaaggacgatgtaaaagcagaattaggctgcaatggcttccatcaccgggagaaggttgatcagatcaccgagcaaatggggcaccttgcttcagccgagcagactctgcatacctgatgcagtaataccatttgcgcggattcatagttcgtgtgtaaattagcgaagatgtaaattatagcttagatcggattagaggcttgcgtgttactttacagatttcaaccttttattagattacaataggtctttcacaatttatgattctgttctatccgctgactactgtgcataaattttttttagtagaccatatccatttttgtactcc

SEQ ID NO: 24971 - DNA, 2756 bp, Oryza sativa
  ref <308>: DATABASE ACCESSION NUMBER: AK100413
  ref <309>: DATABASE ENTRY DATE: 2002-08-28
gaccggccaccacctcgcactctccgtctcctccgctgcgcccccaacacggcgcctactactcctacaacagaagacgagctcgcctcgccgccgccgccatcgccaccaccacccgcagctctcctcgtcgcgtcgtcccgcacctctcgatctccaacgacgcgggggcttgccggcgcggcgcgagttgacgacgactcgccggctgtagcaggcagcagcagcagtagagagacgagacaggagtgagtggtgatcgccgcggttgggtttcttggattgggctgtggctggcgttggtcggaggagccaggaggaggttccctctcgctttgctcgctcgctcgttcgttcttggctgggtttggtttggtttggtttggtctcggttcagatcttctctccaaagattgggattctgttggtaggggggggagggaagccattttcttgtttcgatggacgctcggtagatcggtaggtagatggggaactgcatggacaccgcggcggcggcggcggcggcgccggataccaacaacgccggtgagtgatgcgccctccttcttgggggttggttgggttccattccattgttgtgtgattcgctccatacttgtgaattgaatggcacagacttggcttcttcttgtttctatgtttgctattgttgagttttgcttcccctttgggtgggtgccccctcacttttggctctcccttttttccttcctagtttggtttggttgtctatagcatttggattgttattgttacatggaaaaaggggtgagagtggtgggatttctaaatttttctttctttctttcctacatttctagagttttgctactagggtttagttaccttgttattgatctcaagcctcagatggtctggttatggcaaatgatacatatgcttggtataataatgattggatttggggggaagtcttgaagtaatgtcttgttgtcgtaatagttatgaaccttctaacttgtgtaggaatataaatcgtttccaattagcatttgcttttcgaaaggaggtttaatttgttcctagagtaagtatatttgcgagctgatagataccggattttgtgtttactgttagatgttacaccttcatacagccattgcatattgctaccgcctaccagagagatgttttaagttttgacaccttaggctgaagtatttgcaagaacgaaatcagacataattgaacacacaattgcattgtgttgcaaccaaggtaataaataccgttcttagcgtccgctatagcggtagctgacctctaccgctagcactacaaggtagtggatcaaatatagcgtattggaatttagtggccgttatagcgcttggcaaccgttatagtagtctgctattggcttgttgcgctgctattgctcttaaatgatattcttcatgcatggacaggagaacttaatgcagtgcgccttctctatatcttacttattttgttatcttataatttttatgctatgaaatgtatgagtatcaaagtatgtaacctaaacttattttaagtgaaacttgatgttagcattcatatataatctaaagttatggttactttttgaattccgctattggaatttagtgcctgcaatagcaaccactatccacaatcagctacccgtacactaatccgctaccaaccctctatttgctagtatttattaccttggttacaaataaatcgatttatgcaacagttatccttatgtatatctctctgtttcttgtctggaaagcagatccatcaaaagctgctagcaagacaacctattcatcttacccttcaactacaaaaagcggttcatcttggactgtaccttcctataaggatcgtagcgaccttcctactcctaggacagaaggagaaattttatcatcgtcaaatttaaaggcattcacactgagtgaactcaaaaatgcaacaaagaactttaagcccgacagtctccttggggaaggaggatttggctatgtctataaaggttggatcgatgagcaaactcttgctcctgcaaggccagggagtggtatggttgtggccgtcaaaaagttaaaaccagaaggttttcagggtcacaaggagtggctggtacgtctgctataaaccaactttctaggtttctctgaggtgctacaatgtttcttaattgtgattgatgtgctgcagacagaggttgactaccttggccaacttcaccatgagaatcttgttaaactcattggttattgttcagatggtgataaccgacttctggtgtatgagtacatgcctaaaggaagcttggagaatcatctatttaggcgtggtgcagatcctttatcctggggaataaggctcaaagttgctattggggctgctaggggtttatcatttttgcacgatgctgaaaatcaagttatatatcgtgatttcaaggcatcaaacattctccttgactcggagttcaacgcaaagctttcagactttggtctggcaaaagcaggcccaactggggatagaacccatgtttccacacaagtcatgggtacccgaggttatgcagctccagaatatgttgcaacaggtcaggaatgatcttacttttgagttcatataattcacaagttggtacagatttattaaatggcagtctgcttactacccttgatgttggtcacttcttcaaaattatgttcaatcagctagaattagagtagttt

SEQ ID NO: 24972 - DNA, 1284 bp, Oryza sativa
  ref <308>: DATABASE ACCESSION NUMBER: AK100414
  ref <309>: DATABASE ENTRY DATE: 2002-08-28
gactcgaagctttccccgtcccggtccctagcagagaagagcttccgctcccgcatgcggcatctgcctctgcccccagcagcagcagcagcagccgccgcgccgcgcgaagcatctcctcctcctcctcctcctcccgccgcgcgagcgctgagccctactgctgtcgcctttgcccagatcccgtcggtggccatggcggcgagggcgcaggcgtggctgttcgcggccgcgctggtcatcttccacggctccgagtacgtcctcgccgcggccttccacggccgccgcaacgtcaccgccacataaacaagcctccaaatcatgtgctatctgctaaatctagaacacacacacgcgcgcggatgacgatgggttgatttaaagtagagcacttcttatcagcaagcagtatgttttggcaatgagttttgcaatgttggaacacctgacagaagctcttctcttccctgaattgaaggagtattggtttgtcagttatgttggtttagtaatggtgattattggtgaagttattcgtaaacttgctgtggtgacagctgggcgttcctttacgcatgttataagaattcactatgaagaccaacataagctgattactcatggggtgtataggcttatgcgtcatcctgggtattctggctttcttatatgggcagtaggaacccaggttatgttgtgtaatccattatccacagttgcattcacattggtgctgtggcgattcttttcaaaacggataccgtatgaagaatttttcttaaggcagttctttggtcgtgaatacgaagaatacgcacagaaagtgcactcaggattaccttttatagaatgaaagtttcaaacttacaaagtgtgcttacctcccgctggcatcatcattgatgtgccagagtacaggactaaacaacatgcaatgagaagataacaaactagccatatggattgcatacaatacaagacaagtcttatttttgtaatctgggttcaaacggatgaattatttcctcagctcatcaatgtgcaaatgtgacaattgttgcgctggtcatttggtgtgaaaaaaagaaaaagctaaagcccctcgttacagataagatttgttaagccatgccattcattcgatttgaagaggaatggctcctgtgtggtgttgattgtctcctgtagttttgttgcgtcaaagtttttccatagcaaatgatgtgtaacattccaggtggaactcctttatttgttccatgaaatctgaaaagcatttgg

SEQ ID NO: 24973 - DNA, 3726 bp, Oryza sativa
  ref <308>: DATABASE ACCESSION NUMBER: AK100415
  ref <309>: DATABASE ENTRY DATE: 2002-08-28
gagtagcgaacgaaataggagagaggagctgcccctgcatgcgcgcgatcatgcatgcacgcatcccctcccgctgctgctccctcctcctcctcctcgcatccgtcaggtcacttcctaaaaaaacacaggaaactacgcaaaaactcccatgattccgaccagccgaacactttccccacaaaaaaaattgcgctgaagttgccgtcagagagtcgccttcacgaacgccattgtgcgagttgacgcgtttcttcgcggaagaaaccaatgcccgcgttggctatatagaaagggtttgggttggcggtggggaggagatcggaggagggggtcgttggattgggacccaattgaaagggaaaggttgaagaggcgcaatggagagctacctgaaggagaatttcggcggggtgaaggcgaagcactcgtcggacgaggcgctggggcgatggcgcaggttggtcggcgtcgtcaagaaccccaagcggcggttccgcttcaccgccaacctcgacaagcgatccgaggccgccgccatgaagcgatccaaccaggagaagctgcgagttgctgtgctagtgtcaaaggctgcacttcagttcatccaaggacttgctccggcgagcgagtacacggtccccgacgacgtcaaggcggcgggctacggcatctgcgccgaggagctgagctccatcgtggagagccacgacatcaagaagctcaagtcccatggcggcgtggaggccatcgcggcgaagctgtgcacctcgccggaggacgggctcccgaagtcgaggcgccggcaagccgtccgggaggagctgttcggcatcaacaggttcgccgagacggagtcgcgcagcttctgggtgttcgtctgggaggcgctccaggacatgacgctgatgatcctcgcggcgtgcgccttcttctccctcgtcgtcggcatcgccaccgaggggtggcccaagggcgcgcacgacgggctcggcatcgtggccagcatccttctcgtcgtcttcgtcacggcgaccagcgactaccggcagtcgctgcagttcaaggacctcgacaaggagaagaagaagatcacggtgcaggtctcccggaacgggtacaggcagaagctgtccatctacgacctcctcgccggcgacatcgtgcacctctccatcggcgaccaggtgcccgccgatggcttgttcctgtccggattctcgctgctcatcaacgagtcgagcctgaccggggagagcgagcccgtcgccgtcaatgccgagaacccgttcctcctgtcggggaccaaggtgcaggatggttcttgcaagatgctcgtcacgacggtcgggatgaggacgcagtggggtaagctgatggccacgctgagcgagggcggcgacgatgagacgccgttgcaggtgaagctcaacggcgtcgccaccatcatcggcaagatcggcctcatcttcgcagtcgtcacgttcgccgtgctcaccgagggcctcttccggcgcaagatcatggacgcctcgtacctgagctggaccggagacgacgcgatggagctgctcgagttcttcgccatcgccgtcaccatcgtcgtcgtggccgtccccgaaggcctcccgctcgccgtgacgctcagcctcgcgttcgccatgaagaagatgatgaacgacaaggcgctcgtccggcacctcgccgcctgcgagaccatgggctcggcgaccaccatctgcagcgacaagaccggcacgctcacgaccaaccacatgaccgtcgtcaaggcctgcatctgcggcaagatcaaagacgtggagagcgcctcggacaccaagagcttgttctccgagctgccggagtccgccatgacgctgctctcgcagtccatcttcaacaacaccggcggcgacgtcgtcttcaacaagagcgggagtcgcgagatacttggcacaccaaccgagacggccatcctcgagttcggcctctcactcggcggcgacttcctggccgtgcgcaaggcgagcaccctcgtcaaggtggagccattcaactcggccaagaagagaatgggagtggtcatccagctccccggaggagcaatgcgtgcacacagcaagggcgcgtcagagatcatcttggcatcttgcagcaagtacctgaatgatcaaggcaacgtcgtgccactcgacgatgcaaccgttgctcacctgaacgccacgatcaacagctttgcaaacgaggcgctccgtaccttgtgccttgcctacgtcgatgtcggtgacgggttctcggcgaatgaccagattcctgaagatggctacacctgcattggcattgtggggatcaaagatccagttcgtcctggtgtgaaggaatcggttgccatctgcaggtcggcagggatcatggtgaggatggtcacaggtgacaacatcaatacagcgaaggcgattgcgcgggaatgcggcattttgactgaaggtggcattgccattgaaggaccggatttcagaaccaagagtgcagaggaactgaatgagttgataccaaaaatacaagtgatggctagatcttcaccacttgacaagcacaccttggtgaagcatctccggaccacttttgatgaagttgttgcggttactggtgatggcacaaatgatgctcctgctcttcatgaagctgatattggacttgcaatgggcattgctggaactgaggtggcaaaagaaagtgctgacgtgattattcttgacgacaacttctccactatagtcactgttgctaaatggggtcggtcagtgtacattaatattcagaagtttgtgcagtttcagctgacagtcaatgtggtcgctctgatagtgaacttctcctcagcttgcttgacagggagtgctcctcttactgctgtccaactgctctgggttaacatgatcatggacacactaggagcactggcattggcaactgaacctccaaacgatgaactgatgaagagaactcctgttggaaggaaagggaacttcatcagcaacattatgtggagaaacatcctgggacaggccttctaccaattcattgtaatatggtatctgcagacagaagggaagtggctatttggactaaagggagaaaattccgatctagtcttgaacacactcatcttcaattgctttgtgttctgccaggtgttcaatgaggtgagctcaagggagatggagaggataaatgtatttgaaggcattctagacaacaacgtgttcgtcgccgtcctcggcagcacagtcatcttccagttcataatagtacagttcctgggtgatttcgccaacacgactcctctcacattgaagcagtggttcaactgcattttcatcggtttcatagggatgccgatcgctgctgcggtcaagctgatcccagttgatttttaagtaggaaagcagaactaattcaagacacgggactgaagtcggtagggattaaaggcagtaccatgggcataacaaagttctctttatgcgcttgtttggatgtgaacctttgcccccccccccccccccctttttttcttgcagagtatgatccaagattgtatggtgtttaatggactcgtgtagatctttccttcatgtcattttcctcatgttctttccttggaatgttggaacttgcaattgtatatggatcgcttgataagtttgacatttgtttgattcc

SEQ ID NO: 24974 - DNA, 2750 bp, Oryza sativa
  ref <308>: DATABASE ACCESSION NUMBER: AK100416
  ref <309>: DATABASE ENTRY DATE: 2002-08-28
ggtgcaccagctcatccattcccacttccccccacaagcagcagcagcttagcgccgagacatacagcgaagcaaagcggcggcttaatccgcgctaatcacccactaatactcttgtttaatcactcaggcctctcctcgcctcgcctcctccgcctgcttaaactaatctctcccccctcgtactcccgggccgggagggcgacgaggaatccatccagctcggagcacgaggtcgcgcccaggctgggatccgatcgggcggtcgatgccggcttcggcggcggcggaggcaggctggggatggcggggcggcgagctatgaggccgagcggcagcagcatgcgtggggtggtggcgcggctggccgccgcgcggtcgccggccgtgtcgttcctggtggcggcggcggcgggcgcggcgctcgtcggaggggtgtacttctggctggtggtctcgtcgttccgcctccccgactcccgcgccgttgggtgcttgcctgatggcgaggggtcgtgggcgatcgggatgtactacgggaagagccccctcgagctccgccccatcgagctggaagggaggagcaatgggaacagctcggcgtggccggtggcgaaccccgtgctgacctgcgcgaccccgacggaaggcgggtacccgagcaacttcgtcgctgacccgttcctctacgtgcagggggacacactctttctgttctttgaaacaaaaacagtaagcacaatgcaaggtgatattggtgttgcaagaagcttggatcaaggtgcaacatgggaatttcttggtattgctttagatgaggcatggcatctgtcatacccgttcgtgttcaaatatgagaatgagatttatatgatgccagaggggaacaaaaagaaggagctacgactttatcgagctactaagtttcctcttgaatggacattggagaaggtgctcattgataagccacttattgattcctcattagttcaatatgatggactgtggtggctgtttgcctcagattttacacggcatggtatagaaaagaatgcagagcttgaaatttggtacagcaactcacctcttggtccttggagtgaacataagcaaaaccctatttacagatctgacaaaagtttaggagctcgaaacggtggaaggctattcatctttgaagggtcattgtatcgtccagggcaggattgcagtggtacctatggacggaaggttaagctgtacaagattgaaaagctaactaaggaagaatacaaagaggttccggtaaatcttggaatcgaagaggcaaagaaagggaggaatgcttggaatggtatgaggtaccatcacatagatgcacagcaacttgcctctggtggatgggttgctgtcatggatggtgatcgtgtcccttcaggtgattcaacaagacggtctctatttggttacatgggttttttggtagctgttgctctggtcacttttgtaggttttgtaaaaggtgcaatcagttgctacattcctccaagtttttgggttcctctaactaggagaagtgagttatctcgtattttacctgtgcatcgcttcaacctgaaaatccgtagatattcaaccagtattggcaggaatatctctgctaccaaagcaaggctcagtgagaaaacatggtcaaacacactattcttttgtgtgattgctctcataggtattgttaatgtctgcattgctgtgcatttcttacttggtggcaatggcgctgaagaggcatatacacatcaagggcagcactctcaatttacaatggtcacaatgacatatgaagctcgactctggaacctgaaactatttgttgaacactactctagatgtgagtcagtcagagagatagttgttgtctggaacaaaggcaaccatcctaccagcgacgcctttgattcaacagtccctgtcagaatacgtgtggaagaaatcaactcccttaacaaccgatttaggggtgaccctttgataaagacaagggctgtcctggaactggatgatgatatcatgatgacttgcagtgatgtagagaaaggattcaaggtatggagagaacaccctgagaggatggtgggcttttaccctcgaatgatagacggtgatcctttgcagtacaggaatgagcgatatgctcggggcaagaagggctacaatttgatcctcacaggtgctgctttcatggacagtgagttcgctttcagtaaatactggagtcaagaagctaaggaaggcagagactatgtccacaagaacttcaactgcgaggacttgctcatgaattttctgtatgcaaatgcaagctcttcgaggactgtggagtatgttcaccctgcttgggctatcgacacttccaagctttcttcagttgctattagccgagacacgcagaagcactatgacatcagaacgaaatgcttggcgaagttcgcctccatatatggccctctcccccagaaatggctatttggcatgagagaggatggctgggacaaatagtctcgacaaggcggaatagacagccaacacatgcaaattgttgaatatttttgttcctacaacttcctttttggtagaagtgacttgtttagtgatgtaatttgggtagaagccaagaaccttgtaaatcatgatctgttcaaagtggatgattctctgtagcttttgatgaacatgttaaaatagccaaattcaatgcagttttctttgtg

SEQ ID NO: 24975 - DNA, 1563 bp, Oryza sativa
  ref <308>: DATABASE ACCESSION NUMBER: AK100417
  ref <309>: DATABASE ENTRY DATE: 2002-08-28
ggtcattcgctgatcgcatctccgtcgtcacgagcagccgccgcctccgcctctcccacccgcgagattccgccgtcaccgaccgcaagctgcacttccctcttcttctaactgatgtcaggcgacggccctcgatgggtatgtttttggcatcaaaccaaaacggccctatacgagatgaaggaaaatgcctgacctgccgaccatggacgacgacgacgacaagatgggcactcacgcacaggtgcagcagctgcccgacgagctgctcttggagatcctgctccgcctgccgccccgcgccatcgcgcgctgcctcgccgtctgctcggcctggagctccgccgtctccgccgcggccttccgccgcgcccacgccgaccgcccggccgccgtctgcaaggccaccgccacggcgatcgactgctgcgaccgcgacgccgtcgtcctcgacgcgttcctcggccgctggcaccgcggcaacgtccacaccacgccgcggtctccgcgcggcctcgtgttcccggcggccatggcccccgagcccgacaccccgtgggtactcgatacgctggtcgtcggctcctgggacggcgtgctctgcgtcgagcgaggtgctcctctgctccggggaagccgctgggacgccggcgtccatcactggcccaaatccggccggctccgggagtacgtgctctggaacccactcgccatgacccgcgccaccgtctctccgccgcccggccgcggcgctgtcatcggaggctacgcccacccggccaccatgcgcttccacctacttcacgccgccggcgaggccgcacgccgtccaggtagcctcggcctgttcgtcccgaccgtcttccgtgtccagcgagtcggagacggcgcctggcgcgaggttcccctccctctcctggaacaacaagacgatcacgcgcacgcgcagctgcagatgcacggcgctcgctccgtcgccctgcacggcaacctgcactggctggtgcagcggggtggatcggccggacccggacggctgcaggtgctcgtgttcgagccggcgcgcgagaggttccggctgatggaggcgccgccacggcgccatggcgaggaggacgacctggcaagatcgcggatcgtcgtcctgtccaacggcaagctctgcgccgtggccgtgcgcccggccaccagcacgatggagatgtgggtgctcgactcctcctcctccgacgcgccgcggagatggcggctcgacgcgtacagcctccggcgaaggaagtggacgagggtgtgcgccgcgcgccccaggagtggttccgtgggcgtggcgctgctgccgcaccgggagagcgttgctgatgatcagcccagcttcggcgaggcgtcccggctgctcgaccacaccatcgacatcgacgtcgatgaccagtacttgtctatgaacccaattactttgttttgttactgaacaccgattgagttatttatatcagcttagttttattaattttaggaaatgaataaaataagaactatcttataaagaattaatttgttggtggc

SEQ ID NO: 24976 - DNA, 1282 bp, Oryza sativa
  ref <308>: DATABASE ACCESSION NUMBER: AK100418
  ref <309>: DATABASE ENTRY DATE: 2002-08-28
gccccctcctctctctcacacacacttagaaaaactcgtcggctccctcctctctcacatccgcgcgccgccggctccctcctcgacgccgacgacgaccacgacgccgccggctccctccgccgacggctccctcctctcccacgtccgcgcaccgccggctccctccgccgccggccacgacgacgacgacgaccgcgacgccgccggctcgctcctcgccgacggctccctcctctcccacgtccgcgcgccgccggctccctccgccgccggccacgacgagcgacgatgacggcactccagatccgcgcgccgccggcttcctcctcgccgcctgcgccagccgcttcccctcctcgctccctccgccgccggccacgacgagcgacgacgacggctctccagatccgcgcgccgccgtcttccctcctcgccccctccgccgccggccacgacgaacgacgacgacggctcgcctcctccaccgtcggctttcctcctcgctacctccgccactggccacgacgggcgacgacgacggctcgcatccggctgccggctctcctcatcgacgcgacgacgacgacgatggcggcgccaacggcaacggacggaggggagcccaagccggcagcgctcgtggtgaggctggcggcggtgccccgtggttttttttaatttttctgagattattttcgcaggcgggccaaggaggcgactgcaaaaatgttctattttcacatgcgagatggtagcagcgatcctctctcccgcctgcgacacttccgctgttttttgcgtgtaaacacagcagcaactggagccacggaggagcagctagcagccggcaataattagccatacgtgaatcgttggctaattgcggaattaaatattaatgcgagcgttactagctccgtgcaaggggtgtccttgtcgaaggcgaaatgtaggaaaatggcatctgtcggcaccaaatcacgtgtctacacgttgaacacgttatgtgcaatctcacggtagtaccctgagatatgctaccgtaagaagttgtaagataatatcgaaccaacaaacggaaaagccctattagagggaacgcgatgctggtttgtcctagactcgacaaatcagctaggacgtcatttaacgccgtagagacctagagaccagagatgataaagcaatttagaattgaaggagaatagatgttgtcatagataggaaggagaaggaaggtgtggaatatagaggctatggtaataaattgattttgacg

SEQ ID NO: 24977 - DNA, 2394 bp, Oryza sativa
  ref <308>: DATABASE ACCESSION NUMBER: AK100419
  ref <309>: DATABASE ENTRY DATE: 2002-08-28
gagattaggccggatggggcgagggagaaaggacaaaaaagaaaaaagaaaaggaaaaaaaaagaaaagatcaaatcaaatcaaatcccccgtcgaggccaaaccctaatcgccgcctggcgatggatggccgacggcggcgcagcgggaggccggatgtttcctacggcaattcggatggaatcgcccacaaccgatccgtgattttgggcaccatccacggctactacaaggaggcgctcgccgtgctgccgctcgacgacttgccggagcttgccccgcgcctcgttggcgccggcgtctgcttcggcttcggcgaccctaccaccaacatcatcgccaacaccctctcctccttcctccccgacaagcctgatcccgatcaccgggccaagaagcacaagcgcaaggcaagcatcaagacgccatcggcagcagcgaggtcggatgccgccggcgacgccccctcccctccgccggagacacgaaccatcgccgagcgatcgctggagggcctcatcaccttcctcacatcttacttccgctacctccccacctgggatgcgctccgctacctgtgcctcgccaacgccgacctcctcgtcgccgtccgcctcatcgagcttgatcgctgctacaacaccaaggatgaacggttccacatctcctcctacgctgccagggctgcccttacatgcgcagcatcatcggcgaggcagcctgacgtcgacggcttcattgctggttcgttttcgctggcgtctcatcttgaattcgtcacccagaccgtgctagcagatcgcagctatgtattgtctgttgagaagatcttgttgctgtctggaatgctgaagaagaagccgcgcatgcttgacaagtctgacaatccaatgatttttgctgatgaacggcggcttcgtaactgccataccgatgctaatgctagtggtgatgctaattgtgagaaggtgccaggtggtttgacaatatcacttcgggctgttctacttgacaagattcatgccaagtacctcaaggcaatctctcgattacctatgcaagatgttcgggctcgttaccacttaccaccgtgcccttgtcaacggtggttactgctatggcccattcagttgtgtgaccaacatcatcgtcaacactctctggtatgactctactttccctgctatggagaaacttgaggtggacatgatctgcacctccacctttgttcgtgtggagtcccggtcccttcgtggccttatcaagctattgcttacatgcattcctgagatttctgagcatgatgccatgatatatctgctaaagaataatctgaaagttcgcaaagcaattgaaatggcaggagcggaagggtggaaatccagctgggatgtcagtgcctacaaggctgcagcggatgcatcgtttcatcctgagcccgaagcttatgtacagttttccactcaatctctacctaaggtgcaggctgccgttaaatcactattgcgtgcttctaccccactttcctcgaatgatgttcttcagctagctacgttgttgccatcttcaaactgcatctctgctaaatctttggagacaattgttgatctgtctacagatgcattggatatgtttatagcgttcaaggaaaaatttgtcactcaacagggtttttttcatagaaagattgaagctgcactaaggaaaaggggatatctatatgatcttcaagtaatctgtgttgcaaatgagcgtgtgggcagccagatgaacttcttggacttcaaatgtccatattcacatgtaaactttttggcaagaccaaaagttggaagtggacttaagttattctttgctgaattcagtaatgatgatgatgatgtatccttttgctgtaccgtctcaagaaaatcaaaacacgctcgttgttgttattgtgaatatgaagggaccaggattatgcatcctgcgcatccgattgaaaattattgtggtggcgacatggacttcatagaaatggcgcatggcactcataagctgaccaatgcaagaatcattagttgtgggaagtgcgcaggcaatagagtaggcatgtgtggggacgattatatctatttcgatcctacccgagatgctaagttcgcccaatgcatgaaccggactgcttcaagggcgaatataagctggagtgacattttaaaggtgaatacaagctagagtgacattgagaggcatgaaccagaactgctttatgggtgaatgcaagctagagtgatattgatagtataggtgatgtgtattccgatgtcttattttaatgaagatatctttttttattataattttatgtggacttgatggttatttataatactgcagtgatggcttaaaatg

SEQ ID NO: 24978 - DNA, 1853 bp, Oryza sativa
  ref <308>: DATABASE ACCESSION NUMBER: AK100420
  ref <309>: DATABASE ENTRY DATE: 2002-08-28
gactgagagagggccactctttcccctcgagttcttcaccggcttctttcccctcctctccggaccagggaagcagctaactgtctgcgcaagaaaggtggttcaagcacgatgggacggaaccatctttgcctggtcacttgcttgtggattctgtcatgcgcagttctgcttcatgcttctcctgatggattgctgagaattagcctgaataagaagagattggacaagaagaccttggacggtgcaaaattggcaagggaggaaagccatcgtctgagagccgacggtttaggtgatgacatagttcctttggacaactacctggacacgcagtactttggagagatcggcatcggcactccaccacagaacttcactgtgatattcgacactggaagctccaacttgtgggttccatcagtgaaatgttatttttcgatagcatgctacttacaccacaggtacaagtcaaaagggtcgagcagttacaaaaagaatggagaatcttgcagcatttcctatgggtctggatcaattgctggtttcttcagtgaggatagcgtgctagttggggatcttgctgtgaaaaatcagatgttcattgagacaaccagggaaccgagccttactttcatcatcgggaagtttgatggaattcttggacttggatttccggagatctctgtgggaggagccactccaatttggcagggaatgaaagagcagcaactgatcgagaaggatgtattctccttctggctcaaccgcgatcctgatgcaccgacagggggtgagttaatctttggtggtgtagacccaaatcattacaaggggagccatacatatgttcctgttacccgcaaaggctactggcagtttgagatgggggatcttcttattgatgactactcaactgggttctgttctggtggttgcgccgctattgcggattcagggacttcattgctcggtggcccaacaactattgttgctcaaattaatcacgcaattggagctgagggaattgttagtatggaatgcaaacaagttgtgcgggactacggggacatgatcctcgagatgctcatagcacaggcaagccccatgaaactgtgctctcagattggtctctgtgcatttgatggtactcgttctgtcagaaacaatatagagtctgttgttgataaagaaaaggtgggctcagatctttcctgcactgcttgcgagatggctgttgtctggatacagaatcagctccgacataaccaaacaagggagctcattttgcaatatgctggccagctctgcgagcgtctcccaagccccaatggcgaatcggcagtcgactgcgatgagatctcaaacatgccgaacctttcattcaccatagcaaacaagaccttcaccttgacaccagagcagtacgtagtgaagctggagcagcaaggtcaaactgtttgcatcagcgggttcatggcgttcgacgtgccacctccacgcggcccactctggattcttggagacgtgttcatggctgcataccacactgtcttcgactttggcaaaaacaggattgggttcgccgagtctgcttgaattgcttggctagggccttcaggatcatacaacatatcaagtattgtaatgtttgttaggcagcttgtttactcggtattgtaacctgggaatgtctaaaggtatagtgcattagtagtagcatgcaaaaccttgtagaggaataaacgttttcacgatggagctgtatcagctatggatatgcagatatggatcttggatggtgcaatgcagatgtaatgagcaaatgagcacgatgagaattagggcttttt

SEQ ID NO: 24979 - DNA, 2398 bp, Oryza sativa
  ref <308>: DATABASE ACCESSION NUMBER: AK100421
  ref <309>: DATABASE ENTRY DATE: 2002-08-28
gattgccgccgccgcgccaaccttctggtaacggtgccgcctcccgttatggacgccactgcacctcctctattgagataagctacccatggagggcgccgtccttgttctccaccaggtcgccatcctagcgctgccagcggcggagacggaggcggccattgctgctgcgccaaggaggaggttttgcgaacggtgtgagctccatatccatatccaagggcggggctgtagtgaggaggtacacccatggagcatgcggaccggacgaggagggaatcgcgcggctggtcaaggcaagatcccatctctcttttaatctttgatctctgagattgctactaatctgagagatgggcctgctcgctaacggtgatatattttctgaattttgtgccaattccaggagtgagtgagtacatccctgaaaccacctgattccttgcatcaattcatcccttctgtttgaggttttgagtggctgtggcttttgatgctatgtgctcttgatttgactcgatttttgctttgttttggtgcatacagcaagatcatagagatgagaagcaattgactagaagctacggctcgctatctggcagcttgcgcagacaaattcccatatgcatgctggcagagtggcagtaagttttcccctaaattttatcctagaaacttcaatgtttagttgccaactgaaatatgtgcaatgagttattgttcatttcacgcatcttgctggtaaaacttgctattatctcatttttgttcccgggagcgcaaccttgggagggataaggtcagcttatggctctctggtcattttgtaaatcttgctaagtattttttttttgttattgatggcctctttagcacgcatctagtttgtcgccattttcgtttctcttgaagctaaaagcgttgcaacaacagcttgcttgctcgagacctattatcatagccaaaatatcaaaactggaggtttggagatgatcctatagtggctggaaatgcagttggttacagctggtaagattaattattttttattgtgatttgccatctccaaattatcctgctccttgcgataaatcaatctccaatggtagaattttttctactattctgtcaataaaaacaatggcacatcaaaatctccacgtatttcttgatgatggaaaataagcatgtcctagattatgcgaacatgacatcagttgtttgctataaatgttgcacatgcattgcacttgcacgattaggcgtatatcttgaatgttgatctgacctccttgtcaggatttgctcatttgctatgagatttaggtggtatttggatcagtgacttaattttagtctctgtatttagacactaatttagagtattaaatatagactatttacaaaaactaattacataaatgaaagctagtttgcgagacaatttttttaagcttaattaatccataattagataatgtttactgtagcatcacatatgctaatcatgaattaattaggctcaatagattcgtctcgcgaattagtccaagattatggatgggttttattaatcttctatgtttaatatttataattagtgtccaaacatccaatgtgatagtgacttaaaagttttattaccatctaaactaaagagggtctcaaactttcacatgcaatggatttctgaaaagtttaggctactgatactcttctgctatattatctatttctacacaaatatcaaaagagctctcatgccactttctgaaagcactaataatatgcacatttcatttatatctgaatttgttgtaagccaatggcaaatttcatgaggaggtaagcagctaatatattacagtatgcttgatccctcggcaatatattccatgtggccagtacacgtacccagattctaattaccaaaaaatgttaaagtattgagtccaaaaacagaccaaaattatcagaccgaatgttctggttatattttttaattagctgacctttgcatttttagtaagtatactgttactgtacactgagtcactgattgatccctcagctcaatcataataaaaagaaatgaatgtcagtttcccgagatatgttcaccaaagtccagaatgttgctacacatgatttcacatgcatgacttttcaatggatttgatatggataatgtcctccgcttaacttttgtttttttatttcagatttaccatttggattgcatctcggatttacccattagatttcatctcagagtttgtaaggccttcaactgttaattaacttctggtaggaaggttttctatactgatgtatgcttctcaaattgaatgtaaaagtcttaatcattgcaataataaaatcttaattgttttttgtc

SEQ ID NO: 24980 - DNA, 3516 bp, Oryza sativa
  ref <308>: DATABASE ACCESSION NUMBER: AK100422
  ref <309>: DATABASE ENTRY DATE: 2002-08-28
gattggccgttcgacacgcgaaaaccaacccaatggtggcggccaaggtgtcgacccctgccggcggcgcggtgcgcgacgggctccggcggctcacgcagctctcgctcgtctccaaggtctgctcggagctggaggcgcacctcggcgtcggcgaccgcgtcctcgcggagttcatcgtcgacctgggccgcgcatccccttccgtcgcagacttcgacgccaagctcaaggcccacggcgctgacctgccggactacctcgcgcgcaccctccacaccgtcatccacgccatccctacccacgccgacgacgcccccgcccccgccccccaaaaccctgcctcccgtggcaccggtgcaagggtttgcgggaaggacaaggcggaggagcgggtgagagatggggatccggggctgtaccaggtgtgccgcgggaaggtcaccggcctggcggacgccgggtgcttcgtccgcctcgacgacgcgcgcggccgcgaggggctcgtccatgtctccgagatgcccggccgccgaatcgccgtgaagcgtgggcaggaggtgttcgtcaagatcgtgtccgtgcaggggcgcaatctggggctgtcgatgcgggacgtcgaccaggacacggggaaggacctcctaccgttgcagcgtgctaggggggaggatgatgtgccgaggccgatggcgaatccgtggaccgatcgagccgccgccactaggagaaggacgggggtgtcaggaattgtgatccccgaggacaaccagactggcacggcatcgtcgcggcggccgattaggcggatgagctcgccggagaggtgggaaatgaagcagctgattgcttcaggggttctgaatgcgaaggattacccggcgttcgatgatgaggatagcgaggggatgaattaccaggaggaaggtgtggaggaggagcttgagattgagcttaatgaagatgagccagcattcttgcggggacagggtcggtccacaattgatgtgtccccagtgaggatttccacgaaccctgatgggtcgctgagtcgagcggcggttctgcagagtgcgcttatcaaggagtggcgtgatatcaggaacgaggatcaaagagcattggttgactccatcccaaaggatctgaatcggccatgggaggatcctgtgcctgaggtcggtgggcggtatctcgcacaagagctacgcggtgttggattatctgctgaaagcatgccagagtggaagaaagaggcttatgggaagactgtaacatttggtcagacttcaaggctttcaatcctggaacagaggcagagtcttccaatattcaggctgaagaatgagcttatcgaagctgttcgtgacaatcaagttctggttgttattggtgagaccggttcagggaaaacaacccaggttacacagtaccttgctgaggcaggctatattacgagggggaaaattgcatgtactcagcctcgcagggtcgctgcagagtcagttgccaagcgagtatcggaagagtttggttgccgattgggagaggaagttggttactcaatacgttttgatgatcacactggaccagatactgtcattaagtacatgacggatggcatgctccttcgtgaaattttgttggacactgacctctctagttactccgtggtcatgcttgatgaggcacatgagaggactatatatacagacattctctttgccttactcaagaggctaattaggcgtagaactgatctcaagttaatagtcacttccgccactcttgatgcagagaagttctctggatatttcttcgattgtaatatttttacaattcccggaagaacatatcctgtggagatactctattcaaaacagccagagagtgattacatgcatgctgcgctgctcacagtatcacagatccatctgactgaacctgaaggtgatatcctcttgttcttaactggccaggaagagattgatcatgcctgtcagtgtctctatgagaggatgaagtctctaggtaggaatgtaccagaattgctgatatatgcagtgtacagtgctcagccagctgaaatgcagtcaaagatctttgaacctactcctcctgggaagaggaaagtggtcgtggccactaacatagcggaagcatctattacaatagatgggatatattatgtaattgacccaggatttgcaaaactcaatgtgtataacccaaaacaagggctggattcactgatcatcacaccgatatctcaagcatcagctaaacagagggcagggcgtgctggacgtacaggcccaggaaagtgttatcgtctatacactgaaagtgcctatcgcaacgaaatgccccccacaactactccagaaattcagaggatcaacttgggggagacggtcctcaatatgaaggcaatgggaataaacgatctactgtcatttgacttcatggaccccccagctcctcaatcactcataactgcaatggaacaactgtacaaccttggtgccttagatgaggagggtctccttacaagagtagggagaaggatggcggagtttccacaagaaccaccactttcaaagatgctccttgctagtgtggacctcggatgcagtgatgaaatactgaccatcattgcgatgattcaaactgggaacatattctaccggccaagggaaaaacaagctcaagccgatcggaaaaggggcaactttttccaaccagaaggggatcacctcaccctgctcaccgtgtatcaggcgtggaaggcaaagcagttttcaggtccatggtgctatgagaattttgtccagctaacatccctgaggagagcacaggatgtcagaaaacagctccttgagattatggacaagtataagcttaacgttgtctctgcagggaatgatctcaccaaggtgaggaaagccatcactgctggcttcttcttccacgctgccaggaaggatccccagggaggatacaggaccattgctgatcatcagcaggtgtatatccaccctgccagcgctctcttccagcagcaaccagagtgggttatctatcatgaagtcgtcatgaccacaaaagagtacatgagggaggtgacagccattgacccaagatggcttgttgaactggcaccgaggttctacagatctgcagacccaacgaagatcagtaagcggaagcgccaagaaaggattgagcctctgtatgacagatacaacgagccaaactcatggcgcctcagcaagcgccgagggtaatttgtctgtatatagtttttacttccactatagctgctctttatgcaatgtaagctgagtacttgtatgtaagtgtaaatatactctgctgataagttccaatacatattgggatattaagcttgaccatcttgtttctcttttcatttaggaagcagatgctgaatgaggttgacaattttgactgtttctatattagttgatcctgaaacattactatctttcgctt

SEQ ID NO: 24981 - DNA, 2818 bp, Oryza sativa
  ref <308>: DATABASE ACCESSION NUMBER: AK100423
  ref <309>: DATABASE ENTRY DATE: 2002-08-28
gtctcccaaaacaaatcaatttccttcctcccgaccgagcaagggggcgaaaggacgagctacggaccgagccatggaggaattcaaggctcgctccttcgtcgccttgtctccctcgggtgaaatttcatcaatataggaaaatagattataccatcagtttttgcacacgcggatgaaatttgactaggagaggcaccatggagaaagtcgaggtcgatgggaacttcattggtacgggtaattggaagctgcatggagcactatgtaagcaacttcacaaagtagttcttgaagtattggatgttattcctgtccttgaagctacaaggcctggaaacagttctggacttcttgcattgagttccttgcgcatagctgttgagaaggccaagaatctacttcagtattgctcagagtgcagcaagctatacttggcctttacagcagaaaatgtcctggcaaaatttgagaaagcaagatatgcgcttctggaaagtcttcaccaattggaagaaacacttccagaagcagccagttctcagatactagttatcgcaaaagatctggagaaagcagtttttaccttggatctgattgaaaagcaagctggtgtggatgtgaatcaattagttcagaatgaggcaaaatccaatggctttcttcatgacaatgaacttgaatttttccgacaaactgcatttagggtcggcgttgcgtcatcggcaacagctcttaccgagagaagagcacttagaaggcttcttgagagggctcatgcagaggaagacataaagaaagaatcagttgcatcttatctactgcacctaatgaggaaatactcaagcatttttaggagcgaaacgacggatttcaccaacacatccatgtgctcaagcccttcttgctcttcccgttcattgtccagctcgattgatctccatggaaatggtcatgttattgaaaagtcgatatctagggttggctccttcaatctcaggcagatcaaaggcttatcaggtagcatgccattgccacctgaggaactaaggtgcccgatctccttgcaactcatgcatgaccctgttattatcgcatctggtcagacatatgagcgggcttgcattgagaaatggtttagcagcggcaacacaacctgcccaaagactcggaatgaattatcccagctctccatgacgcccaactattgcatcaagggtttgatagcttcatggtgcgagcagaacggggttctagttccatcggcgccgcctgattctcccaagctcaagtacctgaggatatcatccttgaatagtagcaaatgtcttgtgaccaatggcgttagcacggtcttgtttgaagacacatgcgcggaggatgatattaaggatggtggtaaagttgcttcggaggagtgcactcggcagaactccggagaggctccatctgagatatgtgaagttgatcaggcctcaccagaaaaacatcctcatgagaactccgagaaggtagcagaggcgacatgtgagctttggctgcgtgtgctgagcaaggacgacgatgagtgtgtcgacgagcaacgtgaggtgatcgagcagattagattccttttgaaggatgacaacgagcttaggaaatacgcgggtgctaatggtattaccgagctactcatccactttgtgaagaaggcagtctgcagagatgatgttcagtgccaggtggttggaacaatggctctgttcaaccttgctgtcagcaatgataggaacaagaaacaacttctctcaggtggagtcctccccttgatggagcagatgatacagaagcctgaaacctacgaggctgccgtcgcaatgtacctgaacatttcctgcctcgccgaggcgcaggtgatcatcgggcagagcgaggccgcgcctctcctgatcaagggcctgcaaggagacggcttccggatgagcaagacctgctgcctcgacgctctcctgacgctgtacaacctgtcgctgcaatcgtcaaacatcccgaccctcatctcctccggcatcatgcagagcctccacgacgtcctgacgccgtcctccccgacgacggagaaggccctggccgtgctgatcaacttggcgctgacccgcgccggcaagaaggagatcatggccgactcggacatggtgggcgccatcgtcgtcatcctcgagaacggggaccccgccgagaaggagaaggccgtgtcgtgcctgtggatcatctgcagcggcgatgacggcggcagccagatggtgctccaggaaggcgtgatcccggcgctggtgtccctgacggccaacggcacgggcaagacgaaggataaggcgcagaggctgctcctgctgttccgcgggaagcggcagcgggaggtcgagcagctgcagccaagggtgcagctgcacgaggtggtgagccaggcaaccgcgcagcacgagcagcagcagcagcagcaacaagaagaaagcagcgagccaggcagcgacaagatgtcgcggctgcgcaattcaaagtcgaagttgagaaggttcacgagggccctggctaggttgctcaagaaatggggcatccgctgatctgatctactacagaggaaagaaccacgtcggctagtgtgaactttggcaaatgcaatatcaatgttatcttcccgtgtgggttgactcactcgttttcgtctccttcgcattgccgcgatatccatactcgtctcacttatgcgggcattgaccgtctctctgtacctattaaccttgtgctaaggcaaaattagtaaaaagggtttaagctt

SEQ ID NO: 24982 - DNA, 2967 bp, Oryza sativa
  ref <308>: DATABASE ACCESSION NUMBER: AK100424
  ref <309>: DATABASE ENTRY DATE: 2002-08-28
ggtccctcctcttctctctctcctcctcctctctccaaaaccctaacccctcctcgatccaagcagctcgacgggctcggcggcgcgcctctcgcccggcggtgagccgattcactctccacccccgctttacctcgagacgatccctgggcgtgtttttctttgatttctttcccctgggtttctctgctgggggattcgcgtttgagccgcgagtaggtcgttgggtggagtggatcgggagccggggtctttgtccgaaaaaggcatgaccttggccttctaattggaaaggtgtgaagcaattaagtatggcttcaagggcggtcatcagaagaaggaagtatcttttggatcatgttaacgcacctaccctctcattgtcccccttctctaccttccaacatggaagatctggttctgaggatgaatcaagaatcggacagcgatttcttgagcgaagctctggggattccaaatgggagcaagggcagcatggtgtgaaattgataaagggagatctactagcccttggtaatgggcttctgcggcgcccagcccatgggatttctctacctgcttatggaattggaaggaaggaatttgggttgcctatgggtgctagacatttgctgcagtcagtccgcacagcctcaactgcaacagctgggcaacctaagttggatattgaagatgaacagagtgaggatcagaaacagaacaaaaggaaaaaggaggcatccccagaagaatgtgatcaggctgtggaaggcctaagcagtgcaaaagctaaagccaaagctaagcaggtacaagaatctgtaaaggctggccaatcaattgtacgaaaattctgggcgaggcttctgggtattggtcctgctctccgagctgttgcttcgatgagcagagctgattgggctgcaaagctgaagcactggaaggatgaatttgtgtcaacgctgcagcattactggttagggacaaagctactctgggcagatgtgaggatttcgtcaagattactggtgaaacttgctggtggaaagaacctttcaagaagagagagacaacaactgacccgtacaacagcagatatcttcaggctggtaccttttgctgtgttcatcattgttccattcatggagttcttacttccagtgttcctcaagttatttccaaatatgcttccctcaactttccaagacaagatgaaagaagaggaagcgttgaaaaggaaactgaaagcaagaatggagtatgccaagtttttgcaagatactgcaaaagaaatggcaaaggaagttcaaacatcacgtagtggagaaataaaacaaacagccgaagatcttgatgaatttttgaacaaggttaggagaggtgaacatgtctcaaatgatgaaatcttgaacttcgcgaagctgtttaatgatgagctgactttggataacatgagcagaccacgcttggtaaacatgtgcaaatatatgggtattcgacctttcggtactgaccactacttgaggttcatgcttcgcaaaaaactgcaagacattaagaatgacgataagatgattcaagctgagggtgttgagtctctctctgaagaggaacttcggcaagcctgtcgtgaacgtggtcacctaggtttgctgtcaacagaagaaatgcgccaacagctccgagattggttggatctctcacttaatcatgctgtgccatcctctcttctcatactttcaagagcttttaccgtatctgggaaaatgaagcctgaggaggctgttgtagcaaccttatcttctctaccagatgaagttgtggatacagttgggaccgtattgccatctgaagattcggtttctgagaggaggagaaaactggaattccttgagatgcaggaagaacttatcaaggaggaagagaagaagaaagagaaagaagaaaaagcgaaacaagagaaagaagaaaaggccaaactcaaagaaccaaaggctgctgaagaagatttggctttgaaggaaatgactggtcctactgctagggaagaagaagaactgagagaagcaaaacagcacgataaggaaaagctctgtaattttagtcgagcactggctgtactggcatccgcatcgtctgttagcaaggagcgtcaagagttcctcagccttgtcaacaaagagattgaactgtataactctatgcttgaaaaggagggtacagaaggtgaagaggaagctaagaaagcttacatggctgctagagaagagtcggacaaggctgctgaggttgatgaagaagaaaaggtctcatcggcgctgattgagaaggttgatgctatgctccagaaattagaaaaggagattgatgacgtggatgcacaaattggaaaccgatggcaaattcttgatagggatcttgatggcaaggtgactcctgaggaggtagcgtcagcagcagcttatctgaaggatacaataggaaaggaaggcgtccaagagcttgtcagcaacctctctaaagacaaagatgggaagatccgtgtggaagacattgtgaagctggcatcacaaacagatgaaaacaatgaagatgaggaagaaggacggcagtagatggaaatgcgtctggaagctttttggcctgttgagattgataccgtatcatttcagtcgaggcgaaacctttctagtatctcagctacttcatggctgtgtcgtgtgtaaatcaaaagcgacgcggccattttttgtgcatctcttctctgagcagagtagcaaactttgatcagtggcccgtgatttgccagggaagcttgctgtaaagatgtggactttcatatagttaggctcagcgctctagatcggcaggtaaattgcaaccgaaatttcaactggttgctgtggaagtggaaatacggattggctggatttggatgctaccctctagtcaccatattttagatct

SEQ ID NO: 24983 - DNA, 2901 bp, Oryza sativa
  ref <308>: DATABASE ACCESSION NUMBER: AK100425
  ref <309>: DATABASE ENTRY DATE: 2002-08-28
tgatgacaacaattagtgacggtttttcttttgtgacacatatagtgtaggtttacttccagcttcgtcgattaccagacggcaccggcgtcgcgcgagcgagcttgatcttgcgccttgtgcctgctagctgcttcggcggcggcggttatcttcttccggtgattaatcctatatacctactatttgcttgcttaagtgacgcccatatattgcgcgcgattaatcttgatatgtaaagtgttctcgatctgttccgctgctgttcgtcgtctcaggctaaatggacttggaagttttcctggccattctttactcagattgtccggattcattacattttgagtatctggcctgcaagtgctgtttatgaaaatgatcaccctattcggcattttcagatttatgtaatgcaatatttttctgtgtttctaaaatttgccaccttgtgctcaatcaccagctccttccgatcttctaattgcccggccttcattcgaattctctagacacatcttaattgaacttaatttaagctagcgctctgttcactcaaattattttctaatttaagtcgtgttatttctctcctaatcattttatatgttaaacttaataatatttgtctttgcaataaaagtagtaatagttcactaaacacttagctaaacgtctaaaaaacagttggatcaaatggaattatcaaaattccctgcataccaatttacatgctttagttatactctcgctttaaatattgcactctgtatttttttcattttttaaagactagaaagaaaagacctttgcgttgcaaagggtgaaggctatttaatcttattattattatatgatttagttaaggtaaaattcaatatggaaattcgattggatataggagtatatattttagaaaaccatgagcttcagttagcaatccgatcgtttaaagttagcatgcatgttttttttataaagagatttcttatatgactcctatatttccaaaagcgaacaactgtaaaaccgactcaaatatggaaattatttccaaaagcaaacgagattaaaaaccaactcaaatacggatgacgtaccgaagtaccggcaaaaacatctttaatttttataatagtagagaagagatagagatgtgtaaattatagtgcatgtaataaagtatcatctttcataattaaaccatgattgcaaaagaaaacatattgatgaaaacaatattacctaccatttatctaaaatatatttagaaagtttcaagataactcttttttttaaaaaaaaaaccaatttcgataccggaacaccaaattgtaggtgctaaaatcaatgatttataatttagaactgcattagaaaatgttgaggtgcacatatattaatctgaatcatatttatatgattctcatgaattaaaagtttaagattcaaattgaacaaaactattaatacgtcacaggcaatcattttcccgccatttagttttacacaaaaccacgagttgcgtagtcgtttccgctgtggccatttattagtgcagggcatgctgcccatagcctctgatagactgacaatccatgtgcctatttctactacctcgatcaacgatctgatcttaatcatcttctccataatttgcagatctgtaacagccccgatcaagaaaggatccaacccacctaggaggactaacctgaacgtgctaatgagttcaaagctagtaacatcacctctgaaatccatggagcagggccatctagagcaacctctgcgcgatccgcaggcgccggcggagcagcatgacatggggttatctcccctgacgctcctcggcttcgccttcctgaccttcaactcgggaatggcagtgtacagatcagatagagacttggcaaccatcttcttcgtggtcttctcctacgttgacctcgtatcgctcttctacttcctccgattatttgagaagacgccgccggagtcgcctcgccgccaccacatcaagacggcggtgtggctcctgacgacgatgctcaccgccgtgttttcatataaagtggcggccatcatgcctttcccggttcaggtgctggtttgggccatggccgcagcaactgtgcttggagggttctacgcattcttcctccactccgatgaaaaaaagcctattgaggtaacgtaacataagtattattactccaaattgaagtttaaccatcatcatgatgtatgtatatatagggactgacagaatgaaagtttaagaacttcatcatgagatgtgatcgatcactggaagaatatttcacagaaaccaaacgaaagggacctattgattgattaccttgtgccaattctgctctaatggctctgaaacagatgtgcccacggaactgcataaatttcaagagtggtctatgaaaattggagaatgggaggaattgcacacatgaactgtcttgccagagtggagatgctatggtaatgatatactggaactcctttttatgggctccataatggccgcacttggcatccgactatctgagcacggaaattttcagtggcaaaaccttactgcgaatagaagcaaagcactgcaaaatctagagctttgcatgggtcaagtactcaagtttatgacctttttcagacaagggatacaatctggcttggcccaaagaacacattacagagacagagacaatgggctccataatcttccattgaaaagaaaaataagaaactggagctggagtgggagatgtttcaagaagaattgagccatcaatctctctctctctggtttcctactggccctggagcctccatatgcaaacattcttttaataaatatgcaaattttctgcactaaaatccgccacg

SEQ ID NO: 24984 - DNA, 2576 bp, Oryza sativa
  ref <308>: DATABASE ACCESSION NUMBER: AK100426
  ref <309>: DATABASE ENTRY DATE: 2002-08-28
gagtccctatccactctccttcctagcagcagcagcagcagcacacagcgcggcaagaaacagggagcttcagggtgagaggagctagaatgatgggccccaaggccaacgccgccgccgtcggcgacctcccggagtacgccgaggtcgatcccaccggccggtacggacggtacaacgacgttcttggcaagggcgcgtccaagaccgtgtacagggcgttcgacgagtaccaggggatggaggtggcgtggaaccaggtgaagctgcacgacttcctgcagagcccagaggacctggagcggctctactgcgagatccacctcctcaagacgctcaagcaccgcaacatcatgaagttctacacctcctgggtcgacgtctcccgccgcaacatcaacttcatcaccgagatgttcacctccggcaccctccgccagtataggcagaagcacatgagggtgaacatatgggcggtgaagcactggtgcaggcagattctgagtggattgctgtacttgcatagccatgatccacccatcatccaccgggacctgaagtgtgacaacatcttcgtgaatgggaaccagggggaggtcaagatcggtgaccttggccttgccgccatcctccgcaagtcccacgccgtccactgcgtaggcacgccggagttcatggcgccagaggtgtacgaggaggagtacaacgagctggtggacatatactcgttcgggatgtgcgtgcttgagatggtcaccttcgagtacccgtatagcgagtgcacgcacccggtgcagatctacaagaaagtgatctctggtactaagccggaagcgttgtacaaggtcaaagatccgatggtgaggcagttcgtcgagaaatgcctggccactgcatcccggaggctctcagcgagagagctgctcaaggacccattcctgcaggttgacgatttggtcttttgtccgggtgatggagattacagcctgatgaactatctgcggcagccttatttagaacacgcttatagtaatgtctccatgatgagtaatggattatctgaaagcattgacgaggatacaccaacggaagatagatgggattgtgaagatgatgacattaaagctgatggtattgacttgttcaatgggcatgaagatgagcctcttggcaatgtggatatcacaatcaaagggagaaaaagtgaggatggaagcatattcctcagattacggattgcagataatgatgggcatgtacggaacatctattttccttttgacatagaggccgataccgcattgagtgttgcaactgagatggtagccgagctagatataactgaccatgaggttactcgaattgctgagatgattgatggcgaggttagtgcactggtgccagattggaggcctggcccaggcatagagaaatctcaagacactacatactgccataactgcggatcaaatgtatcgtcatgtggttcactttatgcctacatgtcatctgctgctcgaggttgccagtgtgcagagctacatgggcggtttgaggagataacattccaagccaatggagagcagaccgatttgcaggactccggaggcagctctgatgatggaggtggccaaacacaacatgtcaaagatcaggaagccgtacacagtaatgggtttgtacaaatgggtagaagaggtcctcgtgaccagttttgttttagttcattccaggaacagtcttgctcacctcggcactatgagtatgacactagcctccaagcaaaagggttcgacatgaagcatgaagtaaagatggccaaatacaaagcacggaaaatggcacatctaaggagagctattcatccatctctggactttgacaacttgaatggagaaaggaggatgaagtcttcactgaacaagttacagtcttttcatattggtaagaatcacaatttccgcataccgacctgcgagcgaagcccaggcgctagagacgctgaggaggaccctgacatttttaatctagcgtaccatagccggcaccccgatccaggagcccaaagggcccggcattgtgaggttgatgcacagagcagtccggatctcatgtttacagctaggagttactacacaggagctcagctgccaacaaatctcccaagaacaaaatctgtaaccctaaatgctgttgatgcctgaaatgctttcttgccgtgtaaattccatagagtatagagtgtacattgctttggttctttttgtatgcaataatatgaagtatagctatgtaggcaagaaactgaaatgcatctgggtcatctgtggatatgccagagctgtgtgtaacttcctagcttgagaatttagagggttgccttttgtcttggaaagaaaagattacgttttttggatgataaaagagggtctcttgttaggatgatcaggtgcaatctgctacacatttgcttccctgatgcggcctagtttactcaccatggcatctgccaaagagatatattcctgtacaccatgatccaacaagccaaagcaggattgaattttcatatcttt

SEQ ID NO: 24985 - DNA, 2427 bp, Oryza sativa
  ref <308>: DATABASE ACCESSION NUMBER: AK100427
  ref <309>: DATABASE ENTRY DATE: 2002-08-28
gtggtcacgatttgcccccaaattcgcgatccccccttcttctccggctcagattccggcgagccctcgcccccgacccccaaattggccgcggatccgagcccccctcgccgccggcttccgatcggatagtatggtgttttcgcacaacaaaaattccaaccagtttgaccctctttcttatgttaacctgagtggactagatgctgacagtcaatctgtttcatttactgacatgaactcaagagatgctccttcaaattcacatgttacagatgttggaaaggagaatatgttgaataacccagaggaatcaaagatagcaagcactggtctgaagcctggttctccaatttctcctgagaacttcagtttttcttctctcccaggcagcagttgtcatttgtctacgctggatcatggcaagcgacctctttctgatgtcaggccattccaggttgcttgtaagcgtccgaagcaaatagacgaaaatacctggtcaacgagcacgtttgagacatccttttcagatttagctgatgagaccagagagccagattacatctatcataatagtggtatctcagcctgcaatactagttccagcatcccttactctaatctcgagcaattaattggagaggagaacttatacttacctgattgggtgactactttccctggttatactggagatttttggccagcacctgtggctgatcaggttgatgacattgactctcctatccatgaccacctcccaagaaaagctgtggcaattggacctgaccaccaggcagacattccagaatggaggcctaggatttcgatgaccgtgccctacggttctggttcttgtgctgatctgtcatacagttctgtttccacttcagggtctgctcccagggatgaggacagtgaaagtgataagtggatcaagcactgtgtcattgaaatgccatcctcatgttctgttgcttgggttggagaccatggaagagattgtgggtgcagtgatgagggttccattagatgtgtaagacgacatgttttggaatccagagaaaacctcaaaagaatatttggagaggacaaatttcgtgagttaggtctttgtgatatgggagaagatattgctcagagatggacagatgaggaggaaagtctcttttatagagttgtttactctaatcctccttccttgggaaagaacttttggcattttctcccacgagctttgcctggtaaaactagcatggagcttgtcagctactatttcaatgtcttcatgcttcgtaagagggctcagcaaaacagatcggagccattgcacgtggacagtgatgatgatgaggttcctgatgagccttctgtaacagaggatgaggattctgcagttgagtccccagcacatgattattacgtgaacaatcccatgtccccagagtctgaagactccttccatgagaaggtagctgatagtttatctgggctcagagatggaccaagccagaagcctctgggatccaacacagataatcctggaggtgatgccgacgtccaagacgagtcatgcacatcatttgaggaccataatggagcgcatggatctaatggtgttcaatgtgctgagtttcacatgatgctgccaaatgctgctctagaccactacagtgaccgaggtgcgtgcatgtagcggatgccaggactcatgagcatataaacataggttattagatgttgacatcatgacagagcctctgaagatatggctgatgagggagataaagatgatttgtatattggggttgtcaattgtcaatgctttgttgagaatgttgtgatgaacagtatgacagcaatacaaataaagtggatggccttggcgtttgccaaatttcgaacgccgagatggttttgatctttgctgaagttttgaaatttgaggggactgcacagccaaaaaagttaaagaccaagtcaagagttctgcattgagaacagctgccttgccttgggaagtctgttcctcaaaatcctccaacctgtcgtctgtcttggtgatgctatggtcgccagaagactcgacgggagcgatctgtatagtggtcaagtagctcagtatttttcaaagccattttgtaaagtagcatttggggaccaaactgagcttttgtgcgacgtcgtcttatattcattcattgtgtactcgtcatcttttgctcgtatgtgtacaacctattgcattctgtagttggagttggagagcttctagttaacccttttactgcagaaaatgtcgtactcatatagttgtatcaattctgacctaaggcatttgagttgtaagcagtgaatagggtaagtgatctgaatgggagcattacagacaaggaaaacgaagaaaccagatataatttctgaagc

SEQ ID NO: 24986 - DNA, 2766 bp, Oryza sativa
  ref <308>: DATABASE ACCESSION NUMBER: AK100428
  ref <309>: DATABASE ENTRY DATE: 2002-08-28
gacttcccaccacctcctctccttccctcgctctgctctctccatgcccaggcccgcctcgcctcctcacgcgagccaccgctgtcgccgcaccatcatactgtcgtcgccatcctcctctcgctccggtcgatgcatccgccaacgaggaggccgggaccgtcggatccggtgaccccggcctcattgtcggtggatccggccgcccggaggcgaggggagaccggctatcaccctctctactcttctccttctacgtccggcaccgctacaacgacggccgcgcggatcgcgtgaggcaacgggtggctgctcccttctcttctcccttctatctccactattcctttgcagatcggcggaggcctgcaacaacaacggccgcgcgggcgagcaatcgaggaggccgggaatcaccagatccggaaggacggcggcccgattcggagagggagcaacccgatctgtgtcattgaggctcattgtaagtgtcgacggcggccgttccttcacagtgatccagggtcgttgggtctgttgagctcggtatcgacggcagcagtagctcgggcaagatggaagaaacgtgttagacacggcctcctccgagagcatacaccagcgacgtgcaggaggccgaggccaaagccgatcttccccaaccccatctggcattataacttgtaagtttttgttctttttggtgttcttggtagaccgatgaaaatggtgatggtctatcgtgcaaattgatgaaggtagggatgatatgatgtgtatattgagtatgaatgcatatgcacttttgcgtgtgtagatgtaatacatgttcttgagcactttacaggttttgtggtggtgtttattactgactgacaaaaatctgagatgcatgttcagttatttacagtgatacacatgaatgcggatagatagaatgctattgtttttctcttctatgagacctcttaagtactaatctattgaattgtttgatactatatcatatttcatatgtattcatctattttgattcaaagatatacgagatcccaacaacgcatccactatcgaccaggtacaaaagcttgatttgttgaatgcttgcttccagcaatgtatcatgctctctatttccattggtgatgtgtagggattgggagcagattcattcgcaggtcagcaagctagctgaaaatttggtgagaggcgacagttggtagcgagaaggtcagcctgatggtgcagaactctggcttgaggaagacatgcttcagtgtttctccatgcaccgacaacactatcatcctgccaccacaacacacaaatctggcgatgcttccacctgcatctgcatgcccctggctccctgcatacaagaaaaaagagtattcttttcctgtctcggtaatgcacttggctaagaaagttggtgggcagtaagctgctcatgcttcttgatcaccaagttgctcatgctccttgatcagaacataaatgtttcttatctgtaggttaattaaagatgcacatgagaaaggctcgattatgcctggtgttatggtgctgaattgctgatcaaaaaaaccggtggtaatgttgtaccgttttggtattggttgatatttcacaaaggttgcaggcctcttgctattgacagatgagtgagcaaacatggatggtgatggtattctgacatctcaatgtgaaccagtcaaccagtacagagttgatcgctaatccatgtcatggactctaaaagcaaatggtaagcttggtgtgatgcttgctttggtagatggagctgagttcttcagtaatagatgtgttcatggccttcaggtgaagtatttctagaactaattgcactgctgcatgttaatattaccctaaatttctgaactacaactctctgtcatttgaggaaccaaaattcaggcattgctatatattacatgtgattaaccgagtcattttttctgccatatatgatatattcatatcaagaattttatagccttaaattttctcttacccacgcaatatagattcggtttagcccatgtatgactatgatttgaagactgcaaatcgagaagtgaagcctttggccaaataagacagaacttgactattcactaaactttcattttgtttgatttattttgcaggattttatggcaggaaagctcccataagcttcttgggaggtgcctacttgaatgactgggagaaccatctaacaacaatatttcattaggttagactgcagcagtaatgaaaggtgctgatgatggatcatttaggatattgtgtgctttgccagcgtttcaggtccggatgcggcatccacgtgggcaggccgttaccatgaagatcatgccatcggattagttgtccatgtgcatagatcaaagaaaaaaagaaggtacagatggcaagtatatactgaagatctatatctgtggtctactacagctcaactgttgtaaacaatacctgtgatgcatcgttcttccaaagtttcatagatggcctttgcattaaatagtatatccatatctttttttagtgaatagtacttgcaattttgagtgtgtgctttccatctcataaggtttccatgtttcataatgtcctcttgagtttaatttgagttttcaactattggaggaactataaatagcactagctaaatatgttgcacacgtgattcatgtattcagctcctttactaccatatataagtttttggcacattggatc

SEQ ID NO: 24987 - DNA, 2200 bp, Oryza sativa
  ref <308>: DATABASE ACCESSION NUMBER: AK100429
  ref <309>: DATABASE ENTRY DATE: 2002-08-28
gactcacctcacaggctcacacacaggcacacacacacttcccgatggagcccaccggcacgatcgtcttcgccaccgtcggcgtcaccaacttcggcttcgacgtcttctccgccgccgtgccactgccgccgatggaggaggacgccgagcgccgccacacggacggcgtatccgtgaacttcaacgcgcagttcgtcgacgatggcggggaggaggtggcgttcgtgtcggagcgaggcggcgcggcggggctgttccggtgccggccggggcccgagcagcgggccgagccgctgccgacggtggaggggagcctgttccatgaccgcccgacggtgaggggcgggaggttgtacttcgtctccgcccacgagcagccgccggcgccgttcaggagctgggcggcggtgtacgcgacggagattgggagcaaggagacggtgcgggtgagtcctccgggcgtcgtggacatgagccccgccgtgtcggactccggggagctcgttgccgtcgcgtcgtacggggatcggccgtgggcgttcgacttccgcgtgctggaaacggaggtcgccgtcttccgcgccgccgatccagccaggcgcgtcgtcgtggtggggcgcggtgggtggccgacgtggcacggcgagggcacggtcttcttccaccgcgtcgccgacgacgggtggtggagcgtgttccgggtggacgtctcgcctgagaccctcgagcccaccggcggcgagaggcgagtgacgcctcccgggctgcactgcttcactcccgccgcggtcggccgcggcggcggcgggcggtggatcgccgtggcgacgcggcggaaggggcgcgcgcagcggcacgtcgagctgttcgacctcgagacggagagcttctccccgctcaccgagcgcctcaacccggagctccaccactacaaccccttcttctccccgtccggcgaccgcgtcgggtaccaccgcttccgcggcgccggcgcgcggggggactcggtggtgccctacctgcagccggtgcagagcccggtgagctcgctccggatgctgcgcgtgtacggcacgttcccgtcgttctcgccggacgcggcgcacctcgccatgaacggcgacttcttcaagacgccgggcgtcaccatcctccgatccgacggcgccaagcggtgggtgctcacgcgggagcccaacctgttctacacgtcgtggagccccgccgagagcggggtcatcttcacctccatgggccccatcttcgagaccaccaaagcgacggtgaggatcgcgcggctggagttcgacgccggcgagctcaccaccggccgcgacgaggtcgcggccacgctcaaggtgctcacccggccggaggccggcaacgacgcgttcccggcggtgtcgccgtgcgggaagtgggtggtgttccggtcaggccgctccggccacaagaacctctacatcgtcgacgcggcgcacggcgaggacgtcggcgccggcgaggggacgatccggcggctgaccgacggcgagtggatcgacacgatgccgagctggtcgccggacgggagcctgatcgcgtttctcctccaaccgccacgacccgacgaacgccgccgtgttcagcatctacctggtccggccagacggctccgggctccgccgcgtccacgtcgccgggccggcggggagcgcggcggcggacagggagcggatcaaccacgtgtgcttcagcccggactcgcggtggctgctgttcacggccaacttcggcggcgtgatggcggagcccatctcggcgccgaaccagttccagccgtacggcgacctgtacgtgtgccggctcgacggctcggggttggtcaggctcacctgcaacgcctacgagaacggcacgccggcgtggggcccggcgagctcgccggcggcggggctggagtcgctgtcgctgggcccgggcgccggggacgagtcgctgggcgagtttgatgagccgctctggctcacttgcgacgtctgagctgagggcgacagatgatgatcgatgagctgcacttttaattagaataaaatctgtggtgaatttgatcggttgataataacgggacgagcctgattgtgtgggctagtacgaaccttgttgggaataggttttttatgcatgaaaagggaataaatgaataatgattctgggt

SEQ ID NO: 24988 - DNA, 2051 bp, Oryza sativa
  ref <308>: DATABASE ACCESSION NUMBER: AK100430
  ref <309>: DATABASE ENTRY DATE: 2002-08-28
gaaattccccaccctcaaatccccccctacccacgggccccgatcccacgcctccccctaaccctacccatgctcacgctgtcgcgcccctgaccctcaccacgcctccccatacggatcgcctcatggaggccgccgttgctgctgcggctgcggccgccggggcggtgacgacggcggtcgcgcctccgcccggcgcggcggtcagcaacggggtggcgaccgcgccgccgccgttcctgatgaagacgtacgagatggtggacgacccggccaccgatgccgtcgtctcatggggccccgggaacaacagcttcgttgtgtggaacacccccgagttcgcgcgcgacctcctccccaagtacttcaagcacagcaacttctcctccttcgtcaggcagctcaacacctacggatttaggaaagttgatccagataggtgggagtttgcaaacgaaggttttcttagaggacaaaagcatctactgaagaccatcaacagaaggaaaccaactcatggaaacaaccaagttcagcagcctcagttgccagctgctcctgtacctgcttgcgtagaagtggggaagtttgggatggaagaagagattgagatgctcaaaagggataaaaatgttttaatgcaggaacttgtcaggctgagacaacaacagcagacaacagatcatcagctgcagactttgggcaagcgtcttcaaggaatggagcaacggcaacaacaaatgatgtctttcctggctaaggcaatgcatagtcctggcttcctagcacaatttgtacagcaaaacgaaaacagcagaagaagaatagttgctagtaacaaaaagaggaggctaccaaagcaggatggttcgttggactctgaaagtgcttcattggatggacaaatagtaaaatatcaacctatgatcaatgaagcagccaaagcgatgctaaggaagatcctaaagctagattcttcacatagatttgaatccatgggcaattcagataatttccttcttgagaattatatgccaaatggtcaaggtcttgacagctcttcatcaactcggaattctggtgttacccttgcagaggtcccagctaactcaggtttgccatatgtagctacaagctctggactttcagctatttgttcaacttcgactcctcagattcagtgcccagttgttttggacaacggcatacccaaagaagttccaaacatgagtgcggtgccttctgttccgaaggctgtggctccaggcccaactgatatcaatattctggaattcccagatttgcaagatatagtagctgaagaaaatgttgatattcctggagggggctttgaaatgcctggtcctgagggtgtattctctttgcctgaagaaggtgatgatagtgttcccattgagactgatgagattttgtacaacgatgacacccagaaacttcctgctatcattgattctttctgggaacagttcctggtggctagccctctatctgttgataatgatgaagtcgattcaggtgtactagaccaaaaggaaacacaacaggggaatggatggaccaaagctgaaaacatggctaaccttacagaacagatgggcctcctgtcatcacaccatacaggatgatgaggtacaataggacatacttagccaccatttgtcaaggtaccctgggatctcggtaataaactcccacatcatcacctacccttatgtctatgttatgttctatcattttgctgaaacaatactgaaacgtcaccctatatgtgggaggatactaatcttccacctatgaaacacggtttacccgaggggtttacctgcttgtatctaggtttggcaggcgtaagaattgatcaatggtaacttgtcaaatctgtatgatagctactttgtgttgtagctactgatagctttttttttttgttcttgcctgctctatctgattgcaactaacttctggtagtactggcagtctgccacactgtattgattccaaaattaagtaactttgactgtttcagattc

SEQ ID NO: 24989 - DNA, 1721 bp, Oryza sativa
  ref <308>: DATABASE ACCESSION NUMBER: AK100431
  ref <309>: DATABASE ENTRY DATE: 2002-08-28
ccccccttctcttcagtctcttcctcctaatcttgatactagttgatgggtggttgacgtttcatcgagctatcctagctcaaggcttctctatccctttctactctcccactcctctctaaccactgtactatatactagcactgaagctggacactgatacaaaattccgtactaatattgacaactgactacctatactggtgtggcaccattatatacctcttctcccgcctgccattactaaccaccagccggagctacattgcttcgagatgatgggaattcagagaatttgcatcgttcttgggatgctttttatacttgtgagagagggtggagctgtgacattcacgttcgtgaaccggtgcacggggacggtgtggccgggcatcctgtcgaacgccgggagcgcgaggatggacccgacggggttcgagctgccgcccggcgcggcgcgcgcggtgccggcgccgaccggctggtccggccgcctgtgggcgcgcacgggctgcacgcaggacggcaccgggaaggtcgtgtgcgcgacgggcgactgcggctcgggcacgctggagtgcgccggccgcggcgcggcgcccccggccacgctggcggagttcacgctcgacggcggcggccgcaacgacttctacgacgtcagcctcgtggacgggtacaacctgccgttgctggtggagccctcgggcgccctcggcgcgacggcgacgacgtgcgcggccgccgggtgcgcggccgacctgaacgcgcggtgcccggccgagctccgcgccgtgggcggcgcggcgtgccggagcgcgtgcgacgcgttcggcaagcccgagttctgctgcagcggcgcgtacgccaacccgaacacctgccgccccaccgcctactcccaggtcttcaagtcggcgtgcccgcgctcctacagctacgcctacgacgacccgacgagcaccttcacctgcgccggcggccgcgactacaccatcaccttctgccccgtcgccaccccaagcctgaaatctgcgggaggaacgacgacaccgacgacgacggtgccgggcgtgaccacggacgccccaccggacatggcaaggccgataggcagccaaggcggcggcggcggcgggggcgccggccaaggcgtgatgctgggcgacaactcctggctcgccagcctcgccatgggcgacgcgtcgtcctcgcggagagcctcgcggctggccctcctggccgcgccccctcgcgctgctcacgctccacctgccgcggctatagcggctgatcacgtacgcgaaaaccacccgaaatttttttggtcaaaagggcagggggatgcgggggacgtcgcacgattgcacgggccaccaccagtccaccaacacatcattaccaccaagagcgcgcgaacgccgaaacggtgtgcgcttcggtcgcttctgctgctgccgccgcggcgccggcggcagcgggtggccgtgcgctcgagtggtgtgtttgccggtgtcgtgcacggtgtggggccagcgagctcggtgtgtgggggcgatcgggtgattcggtttggccaagatcggcgtagcgccattgtaaaatccatcagattttttttttttgggttcttctttcttttggtttgcgcatttgtgtctcgcagaaaagaaatgtacaagattaatcccacagattaagaagcaaaatgattatgaacg

SEQ ID NO: 24990 - DNA, 2164 bp, Oryza sativa
  ref <308>: DATABASE ACCESSION NUMBER: AK100432
  ref <309>: DATABASE ENTRY DATE: 2002-08-28
ggatggaaaaaaaaaagaaccatttgcaaattgcaaaaacgtcctttctccagttctcctcccctgagcttctcccaacaagaacacccacttgctctcttcccctctctctctcgcccctcgaattctggcggcgaagcgtacatggacaaagcggaggagggccagtcttcggagcccgccgattccgcggcaccagcccaggatgacagtgtgcaaactgcatctgggcataattcgcgaaggccaaacctttctttgcaaataccagctaggaccctggataaccaaataggcacttcagcgagaattaatatatcccctagccccagctcaacgagagcaggattgcccccgaggcctaattcaactagaacaaaatcttctctgaagagcatcattccgcaacagagtttcagggcgagaagttcagcacaggaaggtgatcgggcgatccttctggttcctgggacaccatcagaagggcagcaggataatacatcaacgttgagatcattttcttttagaaaagtcataaactcattatccgcaaaacgtacacattctttgccagtcacacctatagcaacttcagacaaaacttcttctccggcaaatcagatcaacaacctaccaaccacagatgatcaagatgttcaagcaagaattaggcgctcactttcagtaccaggaaatcgtaaaaacaggagtttgaggagggcggattcattaggtgtcatccgtgtgattccaacaactccccgacctatcccagttaatacaactgcatcaagtgatgggattgaggagacagtggatgttcctggagatggaggcaaagatatccctgaagaagaggcagtctgcagaatttgtctagttgaactaaatgaaggaggggaaacacttaaaatggagtgcagctgcaaaggggaacttgctcttgcacaccaagactgcgctgtcaaatggtttagcatcaagggaaacaagatatgtgatgtttgtaagcaagaagttcaaaatttgcctgtcactttgttgagaataccaactcaaactgctaataggcgagtaacaaatggtgctcatcaaagagcctctcaacaatacagattttggcaggacattccaattttggtcatggttagcatgcttgcatacttctgcttcttggaacaacttctggttacagatttgctgtcacacgcactggcaatttcgttgcctttctcatgcgtgttgggcctcctttcttccatgatagcatccaccatggtaaccaagagttatctatgggcctatgcttcgttccagtttgctattgtgatactgtttgctcatatcttctacaatgtgttaaaagtaaatccagtccttgcggtcctactatcctcattcactgggtttgggattgctatcagtgcgaactcaatgctagtggaatacttgaggtggagatctaggaggaatcaacagctagctcaaactgtcgatgatggtcagcgacaagaacctggaagtaatgctgtaaatgaaaacaatggtgatagacagcaagcgcagcatcgagaatctggagataacattgtatgacaattcagattaagaagcgcaatgaatgtgaatagctagctttgatatgttcagtaggtttagctagtcgaacttcagaatcacctatgcaagaataggaaacatggagcaaatttccaatggcgacagcataagatgataagaggctatgtgacaagtgagaacatggagaatgcggcggatatagttaggcaacacagagagctgaaccaaactatccattgtacacggtattaatttagcagtttgacatcataaggtgtggtttgttcagtgtaagtttagtagttctggtcgtctggtattacaaaattacatcacgaaagtgagtgcagctagtggctagccatacagatatatatacaggtataggtatgtgaaatacagttataccagcttttacagttctgtagtctgtgtgaggagaaatgtgaaggcagagaattttagataatgacatatttcagagttctgaacttagaaattattcgggtaaaaaaatagagaagaactgtatgcagtgcgtggggattgaattgaaatgaaatatggaaatgatgttcgcttc

SEQ ID NO: 24991 - DNA, 1970 bp, Oryza sativa
  misc_feature (835)..(835): "n"=any one base of a, t, c, or g
  misc_feature (865)..(865): "n"=any one base of a, t, c, or g
  ref <308>: DATABASE ACCESSION NUMBER: AK100433
  ref <309>: DATABASE ENTRY DATE: 2002-08-28
gactgtatataacagattaagatcgatcgatcggacaattaattaatggagagcaacggcggaggaggaggatctcccaaggaggcagcggtggtggtgccgtcctccggcgacgccaccctgggcgggcacctggctcggcgcctcgtgcaggtgggcgtgagcgacgtgttcgccgtgccgggggacttcaacctgacgcttctggaccacctgatcgccgagcccgggctccgcgtggtgggctgctgcaacgagctgaacgccggatacgcggccgacgggtacgcgcgggcccgtggcgtgggcgcctgcgccgtgaccttcaccgtgggcgggctgagcgtgctgaacgccatcggcggggcgtacagcgagaacctgccgctgatctgcatcgtggggggccccaactccaacgactacggcaccaaccgcatcctccaccacaccatcggcctcccggacttctcccaggagctccgctgcttccaacccctcacctgctaccaggcagtcgtcaacaacctcgacgacgcccacgaccagatcgaccgcgccatctccaccgccatcagggagagcaagcccgtctacatcagcgtcagctgcaacctccccgccgtcccccaccccaccttctcccgcgacccggtgccctacttcctctccccgaggctctccaaccaggccagcctccacgccgcgctcgacgccaccctcgccttcctcgacaaggccgtcaagcccgtcctcgtcgcggggcccaagctccgcgtcgccaaggccggaggggccttcgtggacctcgccgacgccagcggccacgcggtgnccgccatgccgtccgccaaggggctgtgcncggagacgctgccgcgcttcatcgggacctactggggcgcggtcagcacggccttctgcgcggagatcgtggagtccgcggacgcctacctgttcgcggggcccatcttcaacgactacagctccgtggggtactcgtgcctgctgaagaaggagaaggcggtggtggtgcagcccgaccgcgtgaccgtcggcaatggccccgcgttcgggtgcgtgatgatgagggacttcctgtcggagctggccaagcgcgtccggaagaacacgacggcgttcgacaactacaagaggatcttcgtgccggagggacagctgccggagtgcgaggccggggaggcgctgcgggtgaacgtgctgttcaagcacatacagaggatgatcggtggcacggagatcggggcggtgatggcggagacgggggactcgtggttcaactgccagaagctgcggctgcccgagggttgcgggtacgagttccagatgcagtacggctccatcgggtggtcggtgggggcgctgctgggctacgcgcaggctgtccaaaaacgggtggtggcttgcatcggcgacggcagcttccaggtgacggcgcaggacgtgtcgacgatgctgcgttgcgggcagcggagcatcatcttcctcatcaacaacggcgggtacaccatcgaggtggagatccacgacgggccgtacaacgtgatcaagaactgggactacgtgggcctcgtcaacgccatccacaacggcgaggggcggtgctgggccacccgggtgcggtgcgaggaggagctggaggcggccatcgcgacggccacgggggacaaggcggacagcctctgcttcatcgaggtggtggcgcacaaggacgacaccagcaaggagctcctcgaatggggctccagagtctccgccgccaactccaggccgcccaacccgcagtagtaccgccattaccattcatcctcgatcccggccccatttgcacctacctgctgccttttatatataaatttcgataatattagtatactatatatatagatcatatagaatcatcgtacgaataaatgatggagtgaataaagctacaatttttaattatt

SEQ ID NO: 24992 - DNA, 3173 bp, Oryza sativa
  ref <308>: DATABASE ACCESSION NUMBER: AK100434
  ref <309>: DATABASE ENTRY DATE: 2002-08-28
gggttgcatgcgagcgtgatcacgaatgccaccggactggtcgcgcctcggactggaggaggcgctcgccgcggcggcgctgctgctccgatcgtgctcccctcgccgcgctgtcctccgccgcgcgcgcgcggtccacgcgctcctcgtggtctcctgcacgccctcgtcgcccgcgctgaccaccttcctcgccaaccagctgctctccctctacgcccgcctctccgccgtccccgacgccctcgcgctcctccgctccacgccgcgcccctccgtcgtctcctacaacaccgtcctctccgcgctctcccgcgccccgcgccacgcgcccgagggtctccgcctcttccgccgcctgcacgcgtcgggcctccgccccaccgcacctagcctctgcgccctcctgcgcaccgccggcgaactgcgcgaccgtcgcgcgggggccgccgcgcactcgcaggccgcgacgctcggcttcctcgcgagcgacatcgtgcccactgcgctgctgcagatgtactcccagtgcggcgcgccgagggacgccaaccaggtgttcgacgaaatggcgacgcgggatggggtggcgtggaactgcgtgatgcactgcaatgtgcggtatggctaccttgaccgcgctctaggtcagttttgccggatggtgaggggtggattgccacccaccgagagcacgctctcgtcagtgctgagtggttgtggacgagctggggattgcctccgagggcgtgtgctccatggatgggtggtgaagttggaggagcttgatcctgacatgccactacagaacgcgctgctcgacatgtactcaagctgtggtgatctggatactgcactgcgcgtgtttgagagaattgagacgccggacttggtgtcatggaatactctgattgctgggttttctggagttggggatgggtgcagcgctgtgcatgcctttgtgcagctgaaggctgtacagttcgatgaacgagttgtccctgatgagtacacgcttgcagctgtggtgtctgcttctgctactttgcctgcaatgtttggtgggaagccgcttcatgccgaagtgatcaaagctggactggagaacagcgtgtttgtagggaacacactgctcaacatgtattttacaaacgatgatccccattctgcacggattttgtttgattccattacccaggaggatgtaatcatgtggactgagatggttgcaggccactcctcattgggtgagggagaattggccttaaggtactttgttagcatgcttcaggaaggttacaaggtcgacagcttctctttgagcagtgctttaaactccacgaccgagcttgcaggccttaaacaaggagagatgctccatgctcaagtggtaaaaagtggttatgaaggcaatatttgtgcctccggaagcctagttgacatgtatgcaaaaaatggtgctctcccaggggcttatttggtgtttcgtaacatacaaagaccagatttgaagtgctggaattctataattggaggatacggtaaccatgggaattctgaaatggcatttaagttatttggtgagatgattcgggatgggctgcaacctgaccatgtaacttacatctccatcctctctgcatgtagccactgcggactagttgagaaaggaaaattctattggttctgtatgatgactgatggtattgtgcctgggttcaagcactacactagcatggtcagtttgttgggtagggcaggtttgttggatgaagcagttgatttaatgatgaaatcccctttcgccaagaaatgccctgaactatggagaattctgctaagctcctgtataacatttagaaatttatccattggtgttcatgctgctgaacaggcgctagagcaggacccagatgatatttcaacacacatattgctttcaaacctttacgcctctttaggtaaatgggactttgttgctgaaattaggaaaagaatgagagggctaatggctgataaggagcctgggctgagctgggtcgagatgaaaaatgtggttcatgtcttctctgcagacgatgaatgccactctcatatagatgattgccacagcgaattgcttagacttaaaggaaacatggaattattggatacttgtgaaaatgagttcatgtcaagtggctaagttgcatgaacagattagaggatttcatttgcttcctttggtcctatgacttatggcaacaaaatagacttatacaagattttgagcataagaaaggtattatctgtgaagggacaacctatcgatttaatggttccaactttcaaattagcgctcccggcagcattggaggcaggaaagagacactaaaggtatcaagctccatcaaacaagatatagatgtgcaaataacccaaaaaagggacagaattctgggtcagtgctctagtgtctttctccgttacatcaatgcaactgcttgctccttttttgtgtatatatgtgatcagcagcagcatttcttgctatggatatgttttgagtaaatttcagaaaaccctctgttttatggtcacagttacagaaaaccacaggtattatgacatgcggcacctaaccatataggtataacagttctaaagtttgacaaaaccctacccttatgcattttgagcacagattacttacaattctaaatcatagtgtgtacatgaaaattttaatttttaagttcttgactaaggttgataattaaaatttttactaattcaaaagaattgttcaagatatgcaaaattaggcctagttctatttttcaacttcaaacttcaactttctcgttttccgttagcacgcttttcaaaccgttaaatggtgcgttttttaaaaaagtttttatacataagttgtttaaaaaagcaaataaattcatttttgaaatttataatacttaatacttaattgatcatgtgctaatgagatttctcgttttgcgtcaaaaatctatctgccaaacggatgatcaaacggggccttaatcaagatttcaataaatgtggggttttatgaaatatttagaccataatacatgtggttgtgtgccacacatcataatatatgtggttttctgcaactttgatcataaaatgtgagattttctgagttagct

SEQ ID NO: 24993 - DNA, 3560 bp, Oryza sativa
  ref <308>: DATABASE ACCESSION NUMBER: AK100435
  ref <309>: DATABASE ENTRY DATE: 2002-08-28
gccaccgacacgtgggccccacgacccagccagccagagtcccagaagttaacgggggcacgcgaacagagaggggggccccgcgcggcgaggtggggcccagtgcgggtatgaagcggggaggcgctatatagagcgcacccatcctcctcccccttcctccctctcctctccactactaataccaccaccgccgcgccggaggtggaagacggacggggtagagttggggtctcgcggtgagccgattcctctctagtggtcgcgcctggtgtgttcgccgacgacgccggcgtcgcgtcagccatgggtgggctcgaggagatcaagaatgaggccgttgatctggagaacataccgatcgaggaggtgttcgagcagctgaaatgtacgcgcgaggggctctcctccgaggaggggaaccggcgtatcgagatgttcggccccaacaagctcgaggagaagaaggagagcaagatactcaagttcttggggttcatgtggaacccgctgtcgtgggtcatggagatggccgccatcatggccatcgcgctggccaacggcggcggcaagccaccggactgggaggacttcgtcggtatcattgtcctgctggttatcaactccaccatctccttcatcgaagagaacaacgccggcaacgccgctgctgctctcatggccaaccttgcacccaagaccaaggtgctgagggatggccgatggggcgagcaggaggcagcaatcttggttcccggtgacattatcagcatcaagctcggtgacatcgtccctgctgatgctcgtctccttgagggtgatccccttaagattgaccagtctgcacttactggggagtcccttccagtgaccaagaaccctggtgatgaggtcttctctggctcgacctgcaagcagggtgagattgaggccgtggtcattgccactggagtgcacaccttcttcggcaaggcggcgcatcttgttgacagcaccaaccaagttggtcacttccagacggtgctcactgcgatcgggaacttctgtatctgctcgattgcggttggtatcgtgatcgagatcatcgttatgttcccgatccagcaccgtgcctaccgcagtggcattgagaacctgttggtcctcttgatcggtggtatcccaattgccatgcctaccgtgctctcggtcaccatggccattggttcccacaagttgtcccagcagggtgctatcaccaagaggatgactgccatcgaggagatggctggcatggatgttctgtgcagtgacaagaccggaaccctcacccttaacaagttgagcgtcgacaagaacctcgttgaagtgttcactaaaggtgttgacaaggaccatgttttgttgctggctgcaagggcatctaggacagaaaaccaagatgccatcgatgctgccatggttggtatgcttgctgatcccaaggaggcaagagccggtatcagggaagtgcacttcttgcccttcaacccagttgacaagaggactgctctaacatacatcgatgccgatggtaactggcaccgtgccagcaagggtgctcctgagcagatcctgaccctgtgcaactgcaaggaggatgtaaagaggaaggtgcatgctgtgattgacaagtatgctgagcgtgggcttcgttctcttgctgttgcaagacaggaagtacctgagaagtcgaaggagtctgctggtggaccatggcaattcgttggtctgctgcccctgtttgatcccccgaggcacgacagtgctgaaactatccggaaggctctccatcttggtgttaatgttaagatgatcactggtgaccagcttgctattggtaaggagactggtaggaggcttggaatgggtacaaacatgtatccttcatccgcattgctcggacaaaacaaggacgcttcacttgaggcacttcccgtggatgagctcattgagaaggctgatggttttgccggagtcttccctgagcacaaatatgagatcgtgaagaggttgcaagagaagaagcacatcgtcggtatgaccggagatggtgtcaatgatgcccctgctcttaagaaggccgacattggtattgctgttgctgatgctacagatgctgcaagaagtgcttccgacattgtgctcactgagccaggtcttagtgtcattatcagcgctgtcctcactagcagatgcatcttccagaggatgaagaactataccatttatgcagtttccatcaccatccgtatagtgcttggatttttgcttattgctctgatctggaaatacgacttctcacccttcatggtccttatcattgccatcctgaatgacggtactatcatgacgatctcgaaggacagagttaagccttctcccttgccagacagctggaagctgaaggaaatcttcgctaccggtattgtgcttggaagctaccttgctctgatgaccgttattttcttctgggccatgcacaagacagactttttcacggacaaattcggtgtcagatcaatcaggaacagtgaacatgagatgatgtctgcactgtacctccaagtcagtattgtgagtcaggccctcatcttcgtcacccgttctcgcagctggtccttcatcgaacgccctggtcttctcttggtcactgcattcatgcttgcacaactggttgcgacattcctcgctgtctatgccaactggggctttgccaggatcaagggcattggctggggctgggctggcgttatctggctttacagcattgtgttctacttccctcttgacatcttcaagttcttcatccgctttgtgctgagtggaagggcctgggacaacctccttgagaacaagattgcattcaccaccaagaaggattacggtagggaggagagggaggcacaatgggccaccgcacaaagaacacttcacggccttcagccaccggaggtcgcctccaacacgctcttcaacgacaagagcagctaccgcgagctctctgagatcgctgagcaagccaagagacgagctgagatcgcgaggctgagagagctgaacactctcaagggccacgtcgaatcggtggtgaagctgaaggggctggacatcgacacgatccagcagaactacacagtgtgaggaaccccctcggcattcaacgagagatcgtcatcagcgctggagcgggaattgcaaacggcgctctggttaaaggaaattttcgatgaatgattggaagaacaaaaaacaaaaaaacatggctgatctgaacagccctagttgtaaagtgctaccaaatatatggtccggtttccctcttctagagaggttttacgttctagtggagtaccgtacgtacgtgttggagtacgacgacgtgttgtgatcgtttttggtctttttttactcttttccccctaactagcggtcttcttgcggaatgcaagatggagaaataatggatgaaaaattttctgccacgttaattctcactttggcaaatgggtctgcttcaattacttcttaattactctgcg

SEQ ID NO: 24994 - DNA, 2965 bp, Oryza sativa
  ref <308>: DATABASE ACCESSION NUMBER: AK100436
  ref <309>: DATABASE ENTRY DATE: 2002-08-28
gagtgtggtcagtagagaggaggaaaagcctcttgtcgtctctttgacccaacgaccccgccattgctcacctccacctccacctcacctcctcctcctcctcatcccctcgccggagcggccacgccgccgggagggagggagctcgccgcagccgcagccgcagccgcaaccagccagctactgcgtgctgcaacctgggattttcttttttcttttttttcttgtggatttgatctgaagtggaggtgggaggaggaggatggagagctacctggaggagaatttcggcggggtgaaggcgaagaactcgtcggaggaggcgctccggcggtggcgcaagctctgcggcgtcgtcaagaaccccaagcgccgcttccgcttcaccgccaacctcgacaagcgcggcgaggcccaggccatcaagcacgccaaccacgagaaactgcgggttgcggtgctggtatcgaaagctgcactacagtttatacagggtctttcacttcgaagtgagtatgttgttcctgaagaagtcaaggctgcagggtttcagatttgcgctgatgaactgggctctattgttgagggtcatgatagtaaaaagttgatcacccacggtggagttactggaatagcagacaagcttgcgacatcaccagcggatgggttaagtacagctgaggaaagcattaagcgcaggcaagatgtatatggactaaacaaattcacagaaagcgaggtccggagtttttgggtgtttgtatgggaagcacttcaagatacaactcttataattcttgctgtctgtgcctttgtatcgttggttgttggcattgccatggaaggatggccaaaaggtgctcatgatggtctgggaattgttgcaagtatcctcttggtcgtgtttgttaccgcaacaagtgactatcggcaatccttacagttcaaggacttggacaaggagaaaaagaaaatacaagtgcaagtcacaaggaatggttttagacaaaggctatcaatatatgatcttcttcctggagatgttgtccatttagcaattggtgatcaggttcctgctgatgggctattcatttctgggttttctctactgattaatgagtccagtctcactggcgagagtgaacctgttgttgtaaatgaagataatccttttcttttgtcggggaccaaagttcaagatggttcctgcaagatgctgattacaacagttggcatgcgaacccaatggggaaaactaatggctactctcagtgaaggtggcgatgatgaaaccccactacaggtcaagcttaatggtgttgcaactattataggcaagattggtctatttttcgcagtcataactttcattgtcctttctcaagggttaatcagcaagaagtaccatgaggggctgcttttaagctggtcaggagacgatgcactggaaatgttagagcattttgctattgcagttaccattgttgttgttgctgttcctgaggggttacccttagcagttactttgagtctggcattcgcaatgaagaaaatgatgaatgacaaggcattggttcgtcacttagccgcatgtgaaacaatgggctcagctacgaccatctgcagtgacaagacaggaacactgacgaccaatcatatgactgttgtcaaggcctgcatttgtggaaacataaaggaagttaacaatcctaagaatgcatctgatttgtgttctgagcttccagaaactgttgtcaaaacccttctggagtctatttttaacaatactggtggtgaggttgtgattgaccaagatgggaaatatcagattctaggtaccccaacagagacagctttgttggaatttgcattgtcacttggtggaaattttaaggcaaagcgtgatgaaactaagattgtgaaaatggaaccctttaattcaacaaaaaagaggatgtgtgttgttcttaagcttcctggaggaggatgccgtgcacattgtaaaggtgcttcagaaatagtgttggctgcctgcgataagtttatggacgagacaggtgctgttgtcccccttgataaaacaactgctgacaagcttaatgggattattgaaagctttgctaatgaagctcttaggacattgtgccttggttatcgggaaatggaagaaggcttttctgttgaagaacaaataccactgcaagggtatacatgcattgggattgtaggtattaaagatcctgttcgcccaggcgtgagggagtctgttgcaacctgccgatctgctggaattatggtgagaatggccactggtgacaacataaatacagcaaaagcgatcgctcgtgaatgtggcatacttactgaagatggcctggctattgagggaccggagttcagagagaaaagtcttgatgaactactcaagttgattccgaaaattcaggtaatggcccgatcatcaccacttgacaagcatacacttgtaaagcatttgcgcacaacattcaatgaagttgttgctgtaactggtgatggcacaaatgatgcgcctgcgcttcatgaagcagatattggacttgcaatgggcattgctgggactgaggtggcgaaagagagtgccgatgtcataattctggacgacaacttctccacaattgttactgttgccaaatggggacgctctgtttacgtcaacattcaaaagtttgtgcagtttcagctgactgttaacgttgtggctttacttgtcaacttctcttcagcttgctttacaggaaatgcacctctgacagctgttcaacttctttgggtgaacatgatcatggacacccttggcgcccttgcattagctaccgagccacctaacgatgacttaatgaagagagagccagtgggcagaacagggaaatttatcacaaatgttatgtggaggaacattctggggcagtctttctaccaattc

SEQ ID NO: 24995 - DNA, 1375 bp, Oryza sativa
  ref <308>: DATABASE ACCESSION NUMBER: AK100437
  ref <309>: DATABASE ENTRY DATE: 2002-08-28
gatcgatctccaagtctccatccatcaagattgcagtaataatccaagctcaataaacgagccaatccgtcgaagaaggaagcagcggcgatggcggcgaggtccggcgaggtgcgggcgacggtgctgggcatggcggtgctggcgctgcttctgctgctcggccaccacgcggcggccatcgaggccaacgtcggcgtcacccgccaggccagcttcagcctgaacggcggcgccggcgccggcgccggtgctcgcgctggcgctggtgctggcgctggcgctggcgtcggcgctggcatcggagctaacgtcggcgttggcgctcgcgccggcgtcggtgctggcgtcggcgctggcgtaggtgcgaaggtcggtgctggcgtcggtgcgaaggtcggtgctggcgccggcgttggagcacgcgctggcgttggtgcgaacgtcggtgctggcgtcggtgcgaaggttggtgctggcgtcggcgttggcgctggtgctggcgtcggtgcgaaggtcggtgctggcgtcggcgttggcgctggtgctggcgtcggtgcgaaggtcggtgctggcgttggtgcgaaggtcggcgctggcgttggtgctggcgtcggcgccggcgtcggcgctggagctcgcgttggcatcggtgctaacgtcggtgctggcgctggtacgggcgtcggcgctggtgctggcgctggcgctggcgcaggagtcggcgctggcgctcgcgccggcatcggtgctaacgtcggtgcgaacgtcggcgctggcgtcggcgctggtgctggtgctggcgctggcgctggtgcgggagtcggcgctggagctcgcgctggcatcggagctaacgtcggtgccaacgtcggcgccggcgtcggcgctggtgctggtgctggtgctggcgctggtgcgggagtcggcgctcgcgccggcatcggtgccaacgtcggtgccaacgtcggcgctggcgccggcgctggcgctggtgcgggcatcggcgccaacgtcggtgccaacgtcggcgccaacgtcggcgccggcgtgggcgtgcgcgcgaacaggcagaacagcttcagcatgaacagcgcgtgaccgtctgataccaccaaccccggctggttgatccttcacacgcggccgcatcaaactgatgattcttagtccggcttcgtgttgatcttcctgattaattttgttcgtgtgtttttaattattttttgttaatctctatttgttgcagttgcatgccatgcatgcaggctttttttctttcatcgaatcattcagtgttcttgtgtttgtaatctcttgttcttcttcgtgatctcggagatatataaatatatatatagcgattttaactgtt

SEQ ID NO: 24996 - DNA, 3039 bp, Oryza sativa
  ref <308>: DATABASE ACCESSION NUMBER: AK100438
  ref <309>: DATABASE ENTRY DATE: 2002-08-28
ggcctacaggcgcaggaagaggaggagaagaagcggaagaggagagaaaaaaaaaattcgcagcaaaaaagaaaaaaaaatcgcagctgcaaggtagaggaggagaagttggggtttgggagggccagcgattgagccgacgaactcaaggttcttcaaagtgatgattgggatcgaaccctggtaacctccatgtctggggcgccatgctccaaccttggacttgttcccagggatatgcatggtagtatccctattagcactacaaattcctctgggccaagcattggtgttagctctttggtgacggatgctaactcatcgctctccggaggtgcccagttgcagccaattattgatggtcccattgtgcaacaaagtcctccccaagagcagatgcagaagcgaaggtcttctagtgtaacatcacaacctgttattgatgctgctggtgcattgcatgctcagaagaagtcaagggttgatattaggcaagatgatatcctgcaacacaatttaatccagcaactgctccaaggccagagttctcttcatctgcagggtcaacagaaccctcagattcaagccttgatccatcagcataaactggcacagattcagcagcaacagcagcatcagatgttgcaaccattttcacagatccaacaatctcaagttggcatacctcggcagccacagttgaggcctccactagcgcagcctggaatgcagctagctggacctgttaggactcctgtcgagaatgggctttgttctcgaaggttaaagcaatacttataccataagcgtcaccgaccagagaataatccaataacatactggaggaagcttattgatgaatattttgcaccacgagcaagagaaagatggtgtgtatcctcgtatgagaaaagaggaaatccttcaggtgctgttccacacacagctccggattcatggcgctgtgacatttgtaatacacatgggggcaaaggatatgaggctacctatgaaatacttcctagactctgtcaaattagatttgaccatggtgttatagatgaatacttattccttgacatggccaatgaattccggttgcccaatggactaatgctgctggaacatactaaagttgttcagaaaagcatttatgaacatatgcatgtgatacacgaggggcagttgagaatcatattcacaccagaactgaagataatgtcctgggagttctgttcacggcgacatgatgagtatatcactcgcaggtttctttcaccccaggttgctcatctgctgcaagttgcccagaaatatcaaactgttgccactgaaagtggtccagctggggtctcaaacagtgatgcacagaacatttgcaacatgtttgtgacggcgtcacgacagctagcgaaaaatatagaccaccacaccttaaatgagcatggtctatctaaaagatatgttcgctgcttgcagatatcagaggtggtgaatcacatgaaagacctgattgaattcagccacaagaacaagcttggtcctatagagggtctgaagagctatcccaagcaaactgcagcaaaacttccagtacaaaacatgcacgagccaaagcaactaatggcagctgctggccttcctaatgaccagactaacctcaaagccatgggtgtcaaaacagaaatgaacacccatgcgaatgagacgcacggtattggaccaattggaaatggtccgcagaatgctgctgcacttaacaattaccagaatcccattggaaatggtctgcagaatgctgctgcacttaacaattaccagaatatccttagaagttcagtcgcaaaccagagtttgcttcagcaggaggcatcaagcatgtttaaaggtcccacagcaatgcacaatggcattcagctggaagcatctagatccttccgtggaccaaaccaggtgcatctcgcgcagttccaacatccggcctcatttcagcagcctatgcctcagcagagcagcctccagggcttgggtgtgagcccacaatatcagcagcatgtgctccatcagttgctgcaagaggccaagaacactaacaaccgtgtcttggcgcagcagcagcagcaacaacaacttcaacatgctcctgctaacagtggtcttgcatcaggaggaacggctatcaccggcagcgccgctagcggggatcatatgaataacaacggcgcggtgaagggtgggactccaatggttacaacaggtcctagcagtgtgatcaacaatacagccagcatcctccccagcagaagtaacagcttcaagtcagtgagcagcaacccccaagttgcagctgctgcgggcggcggcattggcagcggcggccatgcggctacccccaaggctgatgctctgcatgagttggatgatcttgacaatcttgggaatctgatcagtactgaactggaggagagtgggctgttcctgggtgaccaggcaggtggtggctactcatggaacatgtgacaaatgcttgcctgcttggcttcttggtgatgatggaaactgccgtagattctagcttctcgtcttgttcttttttgttttgggtatgtggagtttttgtttggggtgtctgaaacagtttctgatgatgatgatacactgatgtaatttaagcgttatgtgcgctggtaagtgagttggcttggaatgctgagatcgaaccagagctgcttctgctagcacacatcgaggcccatcatactgctgaatgacaacgtctggcgattactattatttactttagtggtagtactattattttaatttttgtatctttataatgccatatgattgtcgattcagcgaagaaatttttatagtaggatttactccaaaatcctggaatggaaggattttgcacgagttttctgggatttgaaatagttcctgaaagaaaaaacccgcctgtaatctgctgtatacagagtttttgattttcgactatgtttaattcaggtcaggttggaagggttttattcc

SEQ ID NO: 24997 - DNA, 3370 bp, Oryza sativa
  ref <308>: DATABASE ACCESSION NUMBER: AK100439
  ref <309>: DATABASE ENTRY DATE: 2002-08-28
gtagtaagccgcagtgaggccgagctatccttcctctccttttcctcctcgcacacagctctctcagatccaaagccgtggagagatcgcgcgaatccctcgcctagatgcgcgacgccgcttgctgctacagctgccgccgccgccgctgctgctagggttcttgcggagatgcggggtgtcgagtcgggtggcggaggcggcggcgcgtcttcttcctcccccgccgccgcaggtaattttgatgctgggcagtacgccttcttcgggaaggagccactggagggactcgagctcagttgcttggaggatggcggcggtgatggcaatggcggtggattcagcgggccagaagatgggctgtaccggctctcttctgttggagaagagattgataatctgagtaacttgtcagaaattgatgatcttgcgagcacttttgcaaagttgaaccgaagcattagtggaacacggaatcctggtgttattggtgacagaagatccatctcaagaggaagttctctaactgttgattgggctgaagatgctgagtttcccaactgggtagatcaagacatattagagggtgaggaacttcaggaaagtaaaagatggtggtcacagtcacgttctctggggcagcaaggggatgccaaaccattgagccgaacatcttcatatcctcaacaaccattgcagcaccgcgcaagtgaacctatcattgcaccacaatctcctccatttacatcctttccacctccaggtgctagatcaccttatactgctcaaggccttacacgtcatgggagcattccatcagttggtgctggtctacaaatgggttctccaagcatgtcacttccaagttcttcatatcatatggctggactatctcatggactaccatatggagggagcgtgtcctttggttctccaaatcttcctggaagcaatccaatacaaaatgattggccaaaccaagccaacccgtatgctgtggatcaatttaatctacttccgaacatgttacagaaacaaatatcacttccaaatagcccaatgtcatcactgctattttctcaacagcagcagagattggcacaagttcaagtccagccatcccatcagaattacctaaatttaccacctcacctattttaccaacatcactccccagagttaacaggaaggtttgattctatcagcaatgttccttcattgagagacaagaggtcaaggtcaggaaggggaaaacacagcacacgtttttctcaaccattgactgatactggtagtcaaaatggtgatagtggtggactaaaattcaggtctaagtacatgtcatctgaagagatcgaatctatcttaagaatgcagcattcagcaagtcacagcagtgatccttatgtagttgattattaccatcaagcttgcatagcaaaaaagggtgccagttccaggcaaaaggccaattttgccccaacatcaatgaaagacttaccttccaagtccagatctagcagtgaccatcatgcatatcttcaggttgatgctctagggagggtttctttctcttccatacgtaggcctcggtctcttcttgaagttgaccttccttcatctggtgatggttctcatgatcagaagtcttctctgaggcccctggagaaagaaccaatgctggcagctagagtcactgttgaagatgccatctgcctacttcttgaggtggatgatattgaccgtctattgcagtctagccaggcacaagataacagtttccaactgaggcgaagacggcaggtcctccttgaaggtctagctacatcacttcagcttgttgaccctcttggtccgagcaaatcaagccattcatctggattggcccctaaggatgatcttgtttttcttcggattgtttctcttcctaaaggacgcaaacttttgtcacggtaccttcgacttcttacccctggaagcgagttgacccgtataatatgcatggctatttttcgacatctgaggtacttgtttgggggtttaccatcagattctagtgcagcagaaacaacagttgctcttgcaaagactgtttcatcttgtgtgctccatatggaactaggtgctcttagtgcttgccttgctgctgtcgtatgttcatctgagcagccacctctgcgtcctcttgctagctctgctggtgatggggcttctcttattattaaatcagtactggaccgagcgaccgagttgctgactgaccaccatgctgcagccagctatacagtgtcaaaccgaactctctggcaggcatcatttgatgctttctttggactcctgacaaaatactgcctcagtaagtatgaaagtattaagcagatgtttgtcatgcagtcaccatgctctgtaactggatctgaagtctcgaaagcaaccagcagggagatgccagttgagttgctacgtgcaagccttcctcatacaaacgatcagcaacgcccagctgctgcttgattttgctcagcgaacaatgccagtgaccggtattaatcccactggggcaaatggtgggtacatcacctctgagtctgttcctggttgatatagctgaagatgccaaagggtcgatcgcaaatgcttaaaaggactcgatgcacttgtcttgcagatggcaattcatatatatctggagacatgcatgcccttcataagatgagcttggaagaaagttccatttgctcagggaaaaactagccttcttcagattgtgactttaggtttcagattaatctcgtagaccaacgatctcccctttctgtgggtcatttatatagcacccacctgatatgcatatgtacgtacactgttgtaacactatgctgtgatgaactagccaactcgttgggggcaaaatttagtttttaacattcatattccccagcgaagaagacgtccaagattagtgggcttagcagcagtggttgtacaggtactagggccttcctgtctgtcgttttactggtgtggaaggtgcctagcgtcaagtaaacactagtctggtcttaatctattttagtcaggaccaaagtgtgttggaataatgaagttctgtttattaggtttcttggaaggatacttaaaatgtcatggagatgcctgtatttccaggtgcctactgacactatatggtggggtactggaaactgggggtatatctcttaattgtaaatcgttacagtttgttgtcatttcatttcttcacttgttcagattggcacaagatttcggcttttagccttgtgcgaacataaatgtttggtttgttcattactctgcctacattttgtttaaagggaactccggttgcact

SEQ ID NO: 24998 - DNA, 2016 bp, Oryza sativa
  ref <308>: DATABASE ACCESSION NUMBER: AK100440
  ref <309>: DATABASE ENTRY DATE: 2002-08-28
gacaagaccttctcgaagcttcctcccccccaaaccccttccgctcctcctcctcctcccaaatccaccacggcgacgccgccgccgcagagcccctagctcccggaggtccctcgcccccgccagctccgacggcctcacggaaggaggagtaacgtgggcgttgattggatttttttgttttccccccaccttgagtgagtctgtgccgtttccccggcggcgagggagggcagagggctgatcatggtcgtgcgccgccggtgccttgccgagatttcccccaaccgccaccgacgatcgttcacttggcacaaaggggagtagcactgtccaagctgttgtggtccgtcagggagattggccaacctgtggggtttcagatcgacataagtacgtcagtatttcagccatcgatcaatctggcggttcatagggctgtgcttgcaacctttctggcagaaaggagagagcaaagtgatttgctgtctcctgttgattgtggcctgttgaggcccagtaatggcagatgctagttcaaggactgacacatcgattgttgtagacaacgacgacaaaaaccaccagttagaaaacggacatagtggtgcagtcatggcttctaactcttcagatagatctgacagatctgacaaacttatggaccaaaagacaattcggcggcttgctcaaaatcgtgaggcagcaagaaaaagtcggctgaggaaaaaggcatatgtgcaacaactagagagcagtaagctgaagcttgcacagctagagcaggaacttcagaaagctcgtcagcagggaatcttcatctctagctctggagaccagacccatgccatgagtggaaatggggcattgacttttgacttagaatacactagatggctcgaggagcaaaataagcagataaatgagttgaggacagcagtgaatgctcatgcaagtgacagtgaccttcgtcttattgttgatggcataatggcgcattatgacgaggtattcaaggttaagggtgtagctgcaaaggccgatgtgtttcatatactttcaggcatgtggaagacacccgcagaaagatgcttcctgtggcttggtggtttccgtccatctgagcttctaaagctcctagcaaatcacctcgaacctttaaccgagcagcagttgctgggattaaacaacctccaggaatcttctcagcaggcggaggatgcactttcacaaggtatggaagcactgcagcaatctctggcagatactttggctggatctctcggttcatcagggtcttctgggaatgtggcgaactacatgggtcagatggcaatggccatgggtaaactaggaacgctcgagaatttcctttgccaggcggacaacctgcgacagcagacattgcatcaaatgcaacgaattctgacgatccggcaagcctcgcgtgctcttcttgccatacacgattacttttcacgcttgcgtgctttgagttcgctgtggcttgctaggccacgggagtaacaaaatggtcatgtgtgcctgtgacgaggttagacgctcattttgatggactgcagataattgggtttttccctgtacaattgtgtttggcagctgtggagctaaagttaaaaactgtacctaaagtggtgtatgcaaataggtgaagcctctaagtaagttataacgattgcattattgtgttagcaataaaagttgggtaattcaggatgtgtcctgagttgttttgttgtagtagaagaactgcatgtagtggctggaaatgcagtgttgaatgtaactaaagctctgctgctcacgtgcataatgttgtgtagtaatagttagctagtgatgcccattttacctgcactcctctgggaagctgaaactgcaacctgaagcaaccacggtgcagaagaccgcatgcatggtaaatgattaaaaggatatatatgggctcaacatcgctgccaaatcctgagataatgaacaggcatgctaaactgc

SEQ ID NO: 24999 - DNA, 2892 bp, Oryza sativa
  ref <308>: DATABASE ACCESSION NUMBER: AK100441
  ref <309>: DATABASE ENTRY DATE: 2002-08-28
gatggcgcacatgcttggatgggccggcccgtcgctccacgcctcggatcaccactgtcttcgcccgcggcggcgcacgccgccgccggagcccctgccccctctcgggcggcgcggcggggaccggggctcaccgcggccatgcgctgttcttgctatccctctcgtcagtttgtgccctcaccctgatgatttccgtttcactagccttgcacttcttgtcttcttccactcaacaggttggcgctaggttttgccgattggggatgaactcgtgacgaaattgcaatgtggggctctctctcggtaatggattggagaagtgatgaacggcgagcttaaacttatggcttcctatgtgagcaagcttaagttcatcttgcaaaaagatcagcagcaggagccccatactgcgaaccttctagtcctacttgggagtagcaatcaggacaaaagaaatggcctctcacagggagaaaacagaatggacacttgtaccagaaagaagccaagaagataccaactcctcaccatgcaacaaaaagaaacgcttaatcgtgcatttcaatcatgtccgaaccctgatagaaatgacttgaagaagttggccaaggaactaaacatgactgagaccaaaatcaaatattggttccagaactgcaggacaaagatgaagaaattcaagaacaatgaggagcgcaaactactgcagaaggagaatgaggagctaaagaaggagaatgcagagttgagaaataggatgaagaactcaacatgccgcgcttgtgacctccctttgttccatatagattgccgtcattgggagaatccaatgctcaacaagggtaatcatggcgttacaagtaatctcattcctcaggcagtgtcatccttgctccccagctcaagtggttttgtagcttcaggctccaatcttagtagcaatgctgtgctcatgcccgtatctgccatgccatcatcagttttgcagcctgctccagccgtctctggtgccaattttcccatcttgcacaatctatctgccaatgcaaatgatggctatacggaaaaaaacgtacttcttgatctggcgaaccgtgcaatggaagagttctttagtctaatgaaggagaatgagtctcttcttgtcaaaaaaaaggagaatgggcctctctggctcccacacatggatattctgggagtcgaatcacttaactaccaggaataccttgcaaaatccaggacgattggacaaaaacctgttgacttcaaagtggtcgtcaccagggacactgccattgtcaatggtagctgtgttgacctcgtcaaaagccttttggatgctaaccgctggagagagttgtttccaggcatcgtggcaagtgcaaacaccaccaagatcatctctactgggccctctaacttgcacgacgggttgcttcaattgatgcgtgcagagctccaggtaatgtcacctgaagtcccagtttgcgatgtgacattcttgaggcagagtgtgcagtttggaagtggactgtggtgtgtggttgatgtgtctattgataccatccttcctggagagagtaaaacagctcagtccagtgtgcagaccagcagtacagctgccagacgcatggaagtcaggctgttgccatcaggctgtgttattgaagaaatggagaatggctattccaaggtgacctggatggtgcatgcagcttatgatgagagagcagtgccagtgctttatcattcacttctccgctctgcaaaagcccttggtgcgtgccgctgggtagcatcactccagagacacagccagttcctttccggcctgcacaaatacatcttttgtcctgacagcacaatgacagaagtggtgatgcgaagaaaagtcctgtacctggtgaagcagatgacgagcagcttcacaggcctatttgcgtcgatgtctaaggccacgctgcaagatggtgatgatactcacttcgcgcatcagatagttggtggtgcaacaggtgaacctgccggactgctgctgagcgccaccacaaccatatggctccccggcgtgaacccgaggcacgtgtatgaccacctgcgtgatgagcagtgccatggtgaatggcgctgcctcctcggtgagcagctgcatcagggcaatgccttgccgtatggtgcccccctgaatggtgagaccgtgccagagttctatcgcatggtgaacgggctgcatgaagggcatgctatctccctgatcagccccagagaaatgggtggtaacataagcaacactctgctcctgcaagaggcaagaactgatctttctggctccctcatagtttacgccaggacagatgtgaacaccgtgcattccatcatgaacagtggcctcaaccctgccaccgtcttcctcgtatcctctggatgtgccattcttcctgattgcctggaatcattccctctacacccagctgcaactgcagatcaggccggcacctccagtgccgctatcgctagcaggagcgaaaccggtgggtcattcgtcaccgtcacttaccagatgtttttcagcagccaaggtggcgcagcacctgccagctcatcaattcatcaaggccgtgatgcgctcaagaaagccaccgacattttcaaggtggtcctcgacactctcaccgtggcatagcgcaataccccaggggtagcatttgcatgcgaaagtgaaatccagatcgagttaaatttcagtgtttaagactatgttgtttctgttgttcaggggatggctttatctctgatagacccgtggatcatgctgtttaccttgtttaccattttcagactatcgatttgaaatgttgatcagacatttataataattggaactttgag

SEQ ID NO: 25000 - DNA, 2359 bp, Oryza sativa
  ref <308>: DATABASE ACCESSION NUMBER: AK100442
  ref <309>: DATABASE ENTRY DATE: 2002-08-28
gaatggcagcggtgagccgctgaccttgcctctccggcgaccacgatccgccgccgccggccggcgagatggcgccgtggtgccccgccgactcgaccaagccggtcttcgtcgggatctacggcgccgtcatcggcgggttcgccgtctccgcgctcttcttcctcctctcctccttctcctcgctcgccgcgcccccgctccccatccctcccgcgtccgccgccgccgccaacctctcgggcgcagtctccggtgtggcgcagccggagaccatgtacaatcggcccatctggaagcccccgccgcggagggagcggatgcccgcgccgcgcgcgttccgcctcacccgcgagatggtgggcgcccgcgcccgcggcggcgccattgtcgtcaccttcggcaaccacgccttcctcgacttcatcctcacctgggtgcgccacctcacggacctcggcgtcgacagcctcctcgtcggcgccatggacaccaagctgctccgggagctctacctcaggggcgtccccgtcttcgacatgggcagcaggatggccaccgaggacgccgtctggggctcgcccaccttccacaagatgggcagggagaaggtgctgctcatcaacgcgctcctgcccttcggctacgagctgctcatgtgcgacacggacatggtgtggctcaagaacccgctgccctacctcgcccgctaccctgacgcggatctcctcacgtccagcgaccaggtcattcccacggtcaccgatgacagcctggagaactggagggaagttactggtgcatacaatatcggtattttccattggcgacccactgaaccagctaagaggctggcaaaagattggaaagacttactcttatctgatgatacgttgtgggaccagaatgcttttaatgaccttatacacaaaaaatttggatacccggttgttggagaagatgaacttgtatattcttatgatgggaaactgaagcttggagtcctaccagcaagtatattctgtagtggtcatacatattttgtgcagttgccagggcatgtatcagcagcttcggctagaaccatatgctgtgcatactactttccagtatgcaggtactgtgggaaagcgtcatagattgcgtgaagcaatgcttttctttgatcagccatcatactatgactcaccaggaggtttcctatcatttagacccaacattcctaaaagcttgctgttagatggcgctcatactgttaaatctcattttgcattggtcaattaccagttgaagcaaataagaactgcactcgctattgcttccctattaaagaggaccctggcttgataggatgtggtttggacatcctggagttttggaaggaacaatgaccagacaacctttcctctgtccaatggatcatgtttttgaggtacatgttatgctaaaggacttacctaaggaggagtttggcccacacattgattttagagaatactcgtttcttgagaatccatcattgcctaaacaggtcaaagaatcatttcttgaggttgagctctgcaatgagcatagcaccagatgctcagcaactaatagaaccaataaaggcgcgcctgttctcttaccaaggaatagcacagaacaaacgcttttggatatattcaaaccatataaggatatcaaaatcttacagttctcatctatggttaacgccttcggaggtttttctgatgcagctgtggacacgaaatttcggaatcgagtaaagagatatgtgggcctatggtgctgtgtgcagctccgtgaaatagggcacatatattatgacatgtactgggatgagaaaccaggctggaagccccttcctccacagaccaaggtggaggaccatccaccttggttggaggtacaggaatgaggctaactacaatcacggatgttattttttgattcaaaggcaagatagattccttactacagattaactcctattatcatagcagtcactacctgttggaaatccaattgattcttcttgactgcttactgtgaaggaaatagaaatcaaatggcaatcagttttgtagctctgatctttgataggctgattcacttatggtcgatcagtgatcctttgctctgttcttacttcacacagatctctgataaaccgtggtccattcatcttgtgaagataatgttgtagataatgactttgactcagaactgttgcgctatgttcatagttcatacagacattagcttcaaaggagaagatagcttttttatgcaaaatgcctgaattgattgtttgacagttatctggctggtacagaaaaggagtaaacatgcatct

SEQ ID NO: 25001 - DNA, 3858 bp, Oryza sativa
  ref <308>: DATABASE ACCESSION NUMBER: AK100443
  ref <309>: DATABASE ENTRY DATE: 2002-08-28
ccgccgttgttgccgcggagctcctgccttacctcccctgcggcgatgagccatctccgcgcactcgtatggccgtgggcattcacgccacgctccgcgcctgcacacgcaatcgtgccatgtgctcttcatcgggccttctacccgtcctcctcgattctgctgagaagctactcattggaatgggtcgggcaagtagctgggacggaacaccactgctccattgcatccagctattgggtgggcactcgcttagcgtgaaggacttgcattcgtggcttggtttggttaagaaggcgcttggtacaagctgggcaacaccactgatgctggcacttgagaaagccatggggagtgaggaagcaagaggtcctgctgcgacatttgagtttgacggggagagctctggcttgcttggccctggtgacagcaggtggcccttctctaatggctacgggtttgctacttggatttacatagaatcattctcagatacacttagtacagcaacagctgcagctgccattgctgctgcagccgcagcaacatctggaaaatcatcagcaatgtcagcagctgctgcagccagcgctcttgcaggagaaggaacaacacacatgcctagactttttagctttctctcttcagataatcagggtgtggaggcttacttccatggacagttcttggtggtggaaagtgggggtgggaggggtaagaaggcttctctgcacttcacttatgcgtttaaacctcagcgatggtacttcgttgggttggagcacacaaacaagcatggtttgcttggaaagggcgacagtgaattgcggttgtacgttgatggaagcttgcatgagagtcgtccttttgagttcccacgcatctcaaaaccactagcattttgctgcattggaacgaatcctccaccaactattgcaggcctgcagaggcggaggcgacaatgtccattgtttgcagaaatgggacctatatacatttttagggagccaattgggccagaaaggatgggtcgtctggcatcccgtgggggagatgtactccctagttttggaaatggtgcaggtttgtcttggagagcaaccaatgaccatgttaagaacatggccgaagagagttttacattgaaccaacagataggaggatgcttacatcttctttatcatcctagtcttctgaatggacgattatgtccagatgcttccccttctggctcagcaggcactcaccgaaggcctgcagaagttcttgggttggttcatgtttcatctcgtgtgcggcctgcggagtctttatgggccttagcctatgggggtccaatggctttacttccgttgactataagcaatgtgcagatggatagtcttgaacctatgcttggtgaattgtcgattgccactgcttctctttctgccccaattttcaggattatttccctggctattcagcatcctggaaataatgaagaattatgtcggacatgttcaccggagattttgtcacgtgttttacattaccaattacaagcatttccaaagatggaaggtggagagggggaggcagtgactgatgaggagctagttgatgcaattgtatccttgtgccaatctcaaagaaacaaccatgagcttaaagtgcagcttttcagtactttgctgttggacctgaagatgtggagttcatgtacttatggtttacagaagaagcttctgtcctcgcttgcagacatgatatttacagaggctgcttgcatgagggatgcaaatgcattgcaaatgcttcttgatagctgcagaaggtgctactgggcaatccgggaaccaaattcgatcgataactttgcccttactggaacaaagagatccttgggtgaaattaatgctctgattgatgaactcttggttgttgttgaacttctgttaggatcagcatcttccacagcagcttctgatgatgttcgctgcttgattggatttgttgttgattgcccacagcctaatcaggttgcaagggtgttgcacctcatctataggttgattgtgcagcctaacatttctagagccaacatgtttgctcagtcattcatatcttgtggtggtgtggatgcacttctcgttcttttacagagggaagctaaagctggtaacaacagtattttggacaattctgatgcacttttaagtgaaaatgattttttaaggaatgatgattcagacacaaaagctgctagtggtgaagcaaagagccaggatgatcaaattcaatcagttgaacttgaacagcacgaatccatccttcatgaggaacatactgagctgggatctacaagcacaaatgatgtgccttgtgagattttgggatcaagtataggaaggaagttgtccagttctgaaaatcagctgctaaagaatttgggtggcatcaacttctcaattactgctgacaatgtccggaataatgtttacaatgttgacaaaggtgatggcattgttgttggaatcattcacattttgggtgctctagttgcatcaggtcacctaaagtttgcctcaagggctgcaaatccaaatttacctggtggccttctgacgacagttcatgaagaaggaaataccatgtcagaagatagagtgtcactgttactgtttggctctgcagaaagcatttcaagcagccccaaggaggcttatgactgtaaatgtctatatggctttaatttctgctgcgatcaatgtttcttcagttgatgaaaatctaaacctatatgattgtggccaccgttttgaacatattcaactgttgctagtcttgctccgttcgcttccatatgcatcaaggtcattccaatctcgtgctatacaggatcttctgtttttggcttgcagtcatccagagaatagaaccacgatgacctcaatttcagaatggccagaatggattttggaggttttgatttataatcatgagatgggtgctaagaaatatgctgatggcataagcattggtgatattgaagacctcatacacaatttcctgattatcatgttggagcattcaatgcggcaaaaagatgggtggaaggatgtggaagcaacaattcattgtgcagagtggctttcaatggttggaggatctagcacaggagaccaaagaatcagacgggaagaatcattgccaattttaaaaaggagattgctaggcggtctgcttgatttttctgccagagaacttcaagtccagactgaagtaattgctgcagctgcagctggtgttgcagctgagggtttatctcctgaagaagcaaaaacccaagcggaaaatgctgctcatctttcagtagcactagcggaaaatgcaatagttattctgatgcttgtagaagatcatctgaggtcacaaggtcaacatttttgcacatccagatcacttgatagtgctgtcccttctgcctcaatggtttcgtctgctgccagtcgatcaaattcattgtgtagaagtggtaatgagcctatggatgctgggacctcaagacgatcatctttgtccactgatgctggtggccttccattagatgtgcttacttcaatggctgattcaaacggacaaatctctgctgctgtgatggagcgtcttacatcagcagcagcagctgaaccttatgaatctgtcaaacatgcatttgtttcttatgggagctgcattgcagatcttgctgaaagttggaagtacaggagccgcttgtggtatggcgttggaatcccatccaaatctgatacatttggtggcggtggaagtggttgggaattttggaaatctgttctggagaaggactcaaatggg

SEQ ID NO: 25002 - DNA, 2677 bp, Oryza sativa
  ref <308>: DATABASE ACCESSION NUMBER: AK100444
  ref <309>: DATABASE ENTRY DATE: 2002-08-28
ttggatgaggagatgggatggatcgcgtcgcgctctcgtcagcgcggcaaccacctcttgggggggtcgcgctataaatcgttggtcggagacggagatagacatcgcttgcaagctcccaactccttctagcgagaaagcaacagcggaggagccaaacgcgagatctttggaggctccgccggagcggggaaccgacagattagcggaggagagatggccgcggcggcggcggcgaaggggaggacggagatggaggtcggagcggacggcgtcgccgtcatcaccatctgcaacccgcccgtcaactcgctctccatcgatgtattgctaagcttaaaggaaaactatgctgaagctcttcggaggaatgatgtgaaagctattgttgttacagggaaaggaggaaaattttctggaggatttgatattagttcctttggtagtgttcagggtggcaaagttgaacagccaaaggttggttacatatcaatagatattatcactgataccctagaagctgcaacaaagccatcagtggctgcaattgatggtcttgctcttggtggaggattggaagttgctatggcatgccatgcacgcatttcaactcccacagctcaattaggacttccagaacttcaacttggagttattccaggatttggaggaacacaacgactcccgcgtcttgttggattgacaaaagcacttgaaatgatgctgctatctaagccaattaagggtgcagaggcacaccaattgggtcttgttgattccttggtttctgctgatgatttggttaatactgctcgtcgttgggctttggatatctgtgaattaaaaaggccatggatcaaaagtctttataagactgacaaactagaaccacttggtgaggctagggagattctcaagtttgcaagagctcaagctcgaaggcaggctgccaatcttgagcatccgcttgtttgtattgatgtcattgaagaaggtattgtttcgggaccccgagctgggctctggaaggaagcaaatgctttccagggtcttcttttcgcggatacatgtaaaaacttagttcatgtattcttttctcaacgggcaacatcaaaggttcctggtgctacagacttgggattgatgcctaggaaagttactaaagttgccattctaggtggtggacttatgggttcaggaattgcaactgcgatgatactgagtaattatcctgttatactcaaagaagtaaatgagaagtttctaaatgctggaattgacagaattaaagccaatttgcagagtcgtgtgaggaaagggaaaatgacagaggagagatatgagaaagccatgtctcttgtaacaggtgtcctcgattatgaaaggttcaaagacgtggatttagttattgaggctgttattgaaaatgtgaaattgaaacagcaaatattttctgacttggagaagtactgtccttcccattgtgtccttgctactaatacatctacaattgatcttaatctaattggtgagaaaacaaggtccaaagaccgtattgtcggtgcacacttctttagccctgcacatgtcatgccacttctggaaatagtccgcacccagcacacctcaccacaagttgtcgttgatttgcttgatgttgggaagaaaatcaagaagacaccaatagtggttgggaactgtaccggtttcgcagtcaacagaatgttctttccttacactcagtcagcactcctgttcgttgatcttggtatggatgtgtacaagatcgatcgtgcatgtaccaaatttggaatgcccatgggtccattcagactggcagacctcgttggttttggtgttgctgcggccactggtatgcagtaccttgagaacttcccagagagggtctacaagtcaatgttgattcctcttatgatggaggacaaaaggacaggtgaggcctctcggaagggcttttacaagtatgaggacaagaggaaggcaactcctgatcccgaaattatgaaatatattgaaaaatctaggagtatggctggagtaacaccagacactgagttgatgaagctaagtgagaaggacatagttgagatggtcttcttcccagtcataaatgaggcttgccgtgttcttgatgagggaattgcagtcaaggcttctgaccttgacattgcctcaatctttggcatgggattcccaccgtataggggaggaatcatgttctgggcagattccattggtgcaaagtacatccatgacaagttggaggtgtgggcgaagcggtatagcgacatcttcaagccttgttcctaccttgcagaaagagcagcaaatggggttcctctgagtgcaccagctaagcaagtcaaggcccgactatagatgaacatcctgctttcctatcaactgcggaaactatgcagaataatagaacacacgccaatggggcatttatggtctgtagaatagcccatccaataataattagaataggattcttgaagagttatgtgtaatctgtatgacgcctctccaagttcttgaaccattactgcgacagtgttttgagttcagacattctttaaaatgtttcatgtgccaatggttataagcagattgaaaaggcatacataaaaacagcgggtgttaattagtttgc

SEQ ID NO: 25003 - DNA, 2234 bp, Oryza sativa
  ref <308>: DATABASE ACCESSION NUMBER: AK100445
  ref <309>: DATABASE ENTRY DATE: 2002-08-28
gactgaaccgccgccacccccctttcatattgtgtagcggcaacgcctccgccatctctcctgcgccatcgccccccatcctcgagctcgacgcggtggagaggcgcgcctccaccttccttggctggcgtcttctcttcatcctctccctctccaaagctccatcgctgtcccctctcccacccctttctctgcattcggccagatccagccaatagaagctatggccatggcatctggctcccctgagcttggtggagtggagaggccaaggaggggaggcctcccccagtatcttcctctcccaaatcaccattgctgccagctcttcctcccccttccggatccggccagatctaggcttcatcgagttggggacttccagatctggagctccagttcatggctacgtgctgcatccaccacaacagcaacgaagaggatgtgacggggctcgggagttcccgttgatggcggcaacatgctggagaatttcctggcataaaatgcactttttcttgtttctgaatttcctggcctccatgtgcaccttcaaccgaattttatttagttgctatatgcaggtcacgcagcaatcctgcaaatacttaatggttggttggcgaaatgtgcagcccacattaggagtgcaacaatgaagtgcttccataagtaagcttcaattatccttcaatcttgataagcttgaatgatctgaagcgatatgcacatgttctgggactttgtaagtggaaaagatggattttttttactttggtcaggctgctcaggatggagctgaagaaatacatgacaagaactaagagataaaacagaaaatgcagatgcaggaagagcaacaggtagatgatgcgttaattattgcctttatattcattttagacgatataggcaattgtcaaagttgcatctgcctgcagttactaaagtaatccctatcactatattttgtggttctcccttttatttgtattaaaaacttcagagtcattgagaagtgccatcaggcttagttctactcgatgtcaataaaattcagagtcatcttcctgttcctcttttttgtagagtataaggatattgtgatcggaaagagtttaaactgtgatttggcttctaaagagacctcatggttttgaggcatcaaaacaaaaggctcattcattctgttgtgcatgaaacaaattggtctaattcctgtgtctctgtagattctttagattcaaactgcagcaaagaacggtttacagttatagaaatgttggcttcccagttcctaattaagatgtgagcatcccagtgaactgtactctcagtgtctttgtagtttaatctacattggtggcactgtctaccttataatcttacaaacttcagtaagaaaataatcttactacctgattttaggttcaaacattgtgtttttcagaacatccatgaataggagtgaagcatctgtgctggtaatgattgctatacaaacttctttgcaatctcaagactaaagtatttacttttcctttttcatttatgctcttttcagtgtcattgtgccttttttattgacattctaaaaagttgctaaagttacattgttgactgctcttgaccatattgagataatgagaaatcagagatatagtaatgtgtggcttaatttggcttatattagagcattgctactggtaaaagtacctagcgaaaaaaattgctcatggtaaactacctgcataatttcactagtaccttttgtgatgcagtagttgtttatgcactaaatggtggcctctgttcctgaagatccagtcctatatttttgctaggttgatccaaatatgctcatgttcttatttcgatctatataattgagcatttggtcttctttcccattaattgtactatgttttggtttagcatgtaatatagtccaatcttgatattaattcagtttctagctatattgatcttccagtttcttacaagcttatcacaattgcaggtttaattatacattcaagcatcaacttcaggatctgtaccatctattaatatcatctttctgttattgattgatcaaccaaataatatgttcctagctattgtaactttggttattgctttaactgtcatgaaccatgaattgcttgtatgctaattattaattgtaacctctttactgaaatatatatttatgttggaatgtgttgtgctct

SEQ ID NO: 25004 - DNA, 1839 bp, Oryza sativa
  ref <308>: DATABASE ACCESSION NUMBER: AK100446
  ref <309>: DATABASE ENTRY DATE: 2002-08-28
gtagaaacagatccaaccaattcgctcgcttaagccgccggcaaatcaacccaaccccaagggtttttcgtgtggtgttgaggatccatggctaggaagatgctcaaggacgaggaggtggaggtggccgtcaccgacggcgggagctacgactacgacctgttcgtgatcggcgccgggagcggcggcgtccggggctctcgcacctccgcgtccttcggggctaaggttgcgatttgcgagctcccgttccatcccatcagctcggattggcaaggagggcatggtgggacgtgtgtgatacgtggttgtgtgcctaaaaagatactggtgtatggttcatctttccgcggagaatttgaggatgcaaagaattttgggtgggaaatcaatggggacattaacttcaactggaaaaggctgctggaaaataagactcaagaaattgttagactaaatggagtataccagaggattcttggcaattctggtgtgacaatgattgaaggggcaggcagtttggttgatgctcatacagttgaagtcacaaagccagatggttcaaagcaaagatatacagcaaagcacatattgatagcaactggtagccgagctcaacgtgtcaacattcctgggaaggagttagctattacttcagatgaggccttaagtttggaggagctaccaaaacgtgctgtaatccttggtggcggatatattgctgttgaatttgcttctatatggaaagggatgggtgcgcacgtagacttgttttatcgaaaagagcttcctctaagaggtttcgatgatgagatgaggacggttgttgcaagtaaccttgagggaaggggaatcagattacatccagggacaaatctatctgagttgagtaaaacagccgatggcataaaagttgtcactgacaaaggagaggagatcattgcagatgttgttctgtttgctacaggtcgcacaccaaactcccagaggttgaacttggaagctgctggtgttgaagttgataatattggagctataaaggttgatgattattctcgtacatcagtcccaaatatatgggctgtgggtgatgtaacgaaccggataaatttaacacctgttgcactgatggaggctacctgcttttctaaaactgtgtttggtggccagccaactaaacctgattacagagatgtaccttgtgctgttttctccatcccaccactatcagtagtgggcttgagtgaacagcaggctttgggggaagccaagagcgatgttcttgtttacacttccagcttcaacccaatgaagaacagcatatccaaacggcaggagaagaccgtcatgaaactggtggttgattcagagactgataaagtacttggtgcatcaatgtgtggaccagatgcaccagagattatccagggtatggctgtagcgctgaagtgtggagccaccaaggcgacctttgacagcactgttggtattcacccgtctgctgctgaagagtttgtgacaatgcggaccttgaccaggcgcgtgagcccatcatccaagccaaagacaaacttgtaggcaagatgagtaattttggataaagaaacatatatacccgttttgatttatattttgtggcaaagtgtactctggtttgcatctggtaatttcacgttagggattctacctggaacggtaaaaaggagacaatgtatacttgattgaaataaggtttctgcatatcagcctgtacagagagtaaaacttctgcgtttttctgatccaaataagcgggcgggacatcattcgttctgcctgcagacaaactctctgaatatc

SEQ ID NO: 25005 - DNA, 2535 bp, Oryza sativa
  ref <308>: DATABASE ACCESSION NUMBER: AK100447
  ref <309>: DATABASE ENTRY DATE: 2002-08-28
ggttttgcacttgcacactaacctgcctatcctgcaaaatcaaacccacaaaccagtgatagttttcaagaaaaatagcaataatgaagccaatgccaagacagctctcttcaagcagcaaccgagataatagcagattctgcatgcctcccttcggccaagctctgctgctactcctgctttgcttcgtctgtcatgccggttcatgcaccgagcaggagagggaatctctcctccagttcctctccgggctatcgaacgatggcggccttggtgtgtcatggcaaaacggcacagactgctgcacctgggaaggcatcacctgcagcggaaacggagcggtggtcgaggtgatctctctggcatcaagaggccttgaagggagcatctcaccatccctcggcgacctcaccggtttactgaggctgaacttgtcccgcaactcgttgtccggtggcttaccgctggaactggtgtcatccagcagcattgtggtccttgatgtcagttttaactacttaacaggaggactgagtgagctgccatcttcaacccctgaccggccgctgcaggtattgaacatctcgagcaacttgtttacagggaattttccatcaaccacatgggagaggatgaacaatctggttgtgcttaatgccagcaacaacagatttactgggcagatgccaacctcgttctgtgccagcgcgccatcttttgctgtgcttgaactcagctataaccaattcagtggaagaatccctgcggggctcagcaattgctccaagctgacacttctgagcgctagctacaacaacctcaccgggactcttccagacgagctatttgatctgacctctttgaagcacctctgttttcttagaaaccagttagaaggatcaatcaaaggcatcaccaagcttaaaaatctagtgaccattgatcttggacaaaacaggcttagtggaagtatcccaaattcgataggtcagcttaagagactggagaagctccatttggcatacaacagcatgtccggggagttgccatcaactgtaggaaattgcagaaatcttaagaacatgaacctcgggggcaacaacttttcaggagatcttggcaatgtcaacttctccacattacgcaatttacagtccttagatcttatgtcgaacaatttcaccggaacagtgccagaaagcatctactcatgcagaaatctaagtgcattgcagctgtctaacaatagcttccatggccagctctcggagaaaatccgcaatctgaagtgcctctcatttgtatcacttgttgacatctctcttacaaatatcacaggttcacttcagatacttcagagctgcaggaacctgaccaccttgcttattgggtacaacttcatgcaagagaccatgccagaggatgacgagatttatggttttgagaatcttcggattttttccctgaacgattgttcattgtctggaaaaatacctaaatggttatcaaagctcacaaatctggagatgctatctttatataacaatcaactaaacggagcaatacctgactggatcagcagcctaaacttcttgttccatatagacatttcaaacaacagcctttcaggggaaattccatcagccttagttgagatgccaatgctaaaatcagataatgttccaccaaaggtctttgagctgcctatctgtacaggttatgcacttcaataccgaataaacagtgcattccctaaagtgctgaatctaggcatcaataatttcactggcatcatcccgaatgagattggtcagttgaaggcactccagttactcaatttgagttccaacagattgtctggagagataccagaatcaatctacaagctcacaaacctacaggtgcttgatttgtccagcaataatctcactggtacaattcctgatgggctgaacaaacttcacttcctttcagcattcaacatttctaacaatgaccttgaagggccagttccaaatgcaggacagcttagcacattcccaagtactagctttgatgggaacccaaagttgtgtggtcctatgcttgcacgccattgtggtttagcacaaacaccatttgtctccacaaaacaaaatgctgacaaggttgtatcatcatttgtctttatgatttcctttggtgcattctttgctgtaggggtgttatatgatcagattgtcctatcaaggtttttctagctctacttcagttaggtcgcaaaccaaccaagacctgtgacacaatgatagctgtcactatctccggccatggtctgatgatttcttatagcccaagcttaagccagatcaatcaacagcaataactgaatgcagcatacctgtcattcaagtacataagcagagagattaaattggaaggtgtttgtgtgttaagagaagccacctttttgcagatataaaatttacataatgcacttatgtaagacttttgaacggaagcgccaaagttgtgtcaataaatcaatcttgtcgg

SEQ ID NO: 25006 - DNA, 1462 bp, Oryza sativa
  ref <308>: DATABASE ACCESSION NUMBER: AK100448
  ref <309>: DATABASE ENTRY DATE: 2002-08-28
ggggcgaaacccactttttgaggatggcacaatatcaattttctcctctctcaagcccctccgccgtcccctcttgcgttttggccgtctcgtctccgctcctcgcgccctgcgccgatctccatcccgcgagcagatcagggtcggcgatctccatctcgcgagcagagggggacgccgccgttgtccctgctgctgcttccgccacatcccgcattttgagcaattaaggaggtgtcaacattcagtacaagaaatgacttacataagggatgaagatacaagacttgagaccactcgggcgaggctgtcgaatgttctcaaaaggcatgaagatttgaaagagcgcctctcacgggattctgataaactgatttttgagcggctacagagagaatttgaggctgcacgaactgcccaaactgaagagatcccaatagatgatgagcagtggaacgatggtttgctggcaaccatccgtgaaaagaccaggtccatatggaggctgataggaaggccatggctaaccaagcaaatgttccagcagatcctcaattccagtcaaggactacatatagagtaaaaaacaaggttatctattgtttggatggtgcgagaattggtatacagtatgagacttattttgctggagaaccttgtgaaatttatcattgtgttttggaaagcaagtcattccttgaaaagatgactgtgattgagcacaccttacctttctttctgccaatacgagaagtagaaagtgaatttctatcatctaatgctattaaatttattgatcatcttgaagagattttgcagtcttatgttgacaggagggagcaggttcggcttatcaaggaactatatgggaaccaaattggagaactgttccacagtctctcttacaatttgatagaatttgtaatggaggattttgagtgcaaggttacagtcagtatccgatactcagatctattgttcaccctgccaagtcaggccagggtcctggcttggccacttcgctcttcgcggggaatatcagtaactgagcgcagagctagtcgctcagcatctgctcaactagtaccgttccgccttccctacgccgaggatgcgctgaagaccttgagtttgccagaagcgtttgcggagattgtgctgagcctaccccgtgctctgaagcggatactctcttctcaggaaagtgattgatgcgtgtactaggagtttttggtaatgagactcatggacgcagaagctttcggtgctatatgcagagtattcggtgaccttactgacgagatacaaaatgttcggcagtattgtttagaatattgtagtgtacagttgttactgtctagaaaatgcgattgctgcgaagccagttggataacaagaaacactgctttcaaccatccatgtaatattcgtgcacagcaagcacggaagcagatttcatacc

SEQ ID NO: 25007 - DNA, 2131 bp, Oryza sativa
  ref <308>: DATABASE ACCESSION NUMBER: AK100449
  ref <309>: DATABASE ENTRY DATE: 2002-08-28
ccctgcagtagaagaggaggcggcgagcgagcgagacgccgagccgagcagcgccgcggaggcgtcgtcgtctccggtgggttgcaggaggcgaatgcgatggggtccaagacgaaggggtgctgcgggtggctgatcgtggcgctggtggcgtcgctggtggcgacggcggcggtggtggccatcatgaagaagaaggtcggcggggggagcgggcgcaagctcaagccgctgccggtgcccggcccgcccggggccatcgactccaagtacggcgacgcgctcggggtggcgctccagttcttccaggtccagaaggcggggaagctggagaacaaccagatcccgtggaggggggactcggcgctggatgatgggaaaccagcggggctggatctttccaagggaatgtatgatgctggtgatcatatcaagtttagtttcccgatggccttcacggcaacggtgctctcgtggtccatacttgagtatggagatcagatgagcgccacgaagcagctggaccctgcgcttgatgctctccgatggatcactgatttcctcgtcaatgcgcatccatctgacaatgtgttctacattcaggttggtgatcctgatctagatcacaactgctgggaaaggccggagactatgtctgagaaaagaccactcacacagattaacacaaagtctcctggatcagatgttgctgctgaggcagcagcagctatggcatcagcatcaattgttttcaaatccagagacactacatattctgattcacttcttcaacatgctcagaagttgtttacttttgctgatacttataaaggcctcgccagtgacacctatccaaagctccaaaactactataattctactggttatcaagacgaactcctgtgggcagcgagttggctctatcatgctacaggagaccaaacatacctcagttatgtgactgtagagaatggaaaagcttttgctgattggggaaggccaacatggttcagttgggatgacaaacttgcagggacacaggtgctcttgtcaagattaaatttctttggatccaaacagacatctaatgctgaaaacatgggactcaaaatgtacagagacactgctgaagccgtcatttgtgggctcctaccagattctccatcagctactgccagtaggactggtgggggattggtgtggataagtggatggaattctctccagcatgccacaaatgcagcattccttgctgttgtttacagtgactacatgctcacatcgcaaacagcagcagtgcaatgcagtggaaagtactacagtcctacagatatacgcaattttgctatatcacaggctaattacatcttgggagacaacccaatgaagcttagctacctggttggatatgggagcagctacccacagcaggtacaccacagaggggcgtcgatccccgctgatgcaaagacaggctgcaaaggattccagtatcttcattctacgagcccaaacccaaacgtcgccatgggagccctcgtgggcgggccgttccagaatgacactttcgtcgactctcgggacaatgctgttcagacagagtcaagcacttacaacagcggcaccctcgttggtcttctttctggtctggtcacaacttcctctgtggcgcagtcgttcacctagagctctctcagagtttgggcaatggctttgaccaaccgggaggatatacatgtagccatgtacaatgagagatttttggcgtgaccaaaggcaatgtgccatcagcgaaacgccttcacggtgttcttcgttgttcatcttttgggtgatgggtggttagcagtagtagttcttgtgccatagtgctattgtttatacaaatactgctgcgtagttgcatccggtttgctggtgtactatctgatactacgagtgttgtatttgtaggacggattccatttgttgattctaaaatgatctctggtagcttgtattgatgatctgtaaaatccctcccaagatgaacattgcactgaacatgtgagatcacatggggagagggaagtattaatccagtttgttcagtatgttcatacataaattggacatcttttcagtatggtcc

SEQ ID NO: 25008 - DNA, 1268 bp, Oryza sativa
  ref <308>: DATABASE ACCESSION NUMBER: AK100450
  ref <309>: DATABASE ENTRY DATE: 2002-08-28
gatctgtgacccactccgtcgtcttccccggaaacggtcacgcgactcgcgagctcccgccgccgccgccgccgtcgccgtcgccgtcgcggcctcccacctctccctctaccccaccacactcgccgccggcgaggcctgacggcgatccccaacactgccccccggcggctgccgttggatcgtgggagggaggattggccggttgtactacagttgagggagggaggagctaccgtttgtgatccgccgcctgcgaccgagcgtccccgtagttagatccggctcgaccaccacggcctccggcgctctgagcggctgctctgtgtgagaggccctgctgctgaaagagaatccatggccgcggcgagcggaccgtggctgctcgtcgtggtcgtggcttgggtcttgggcgttgcggccgcctcgtcgtcgtcgtcatcgcctgggcaggcaggtaccagccagaaattcaacaagtgtatgccgtgctctaggagatatgtcgctgattcatacctcgataccttgatcggccagcttgctcaacatcgtgacttgactgaaacatctgattctgctgactcatgcaaaggacttgattatgatcttgatgcacccatgcttacagaattgcactcggaactggttggtgaaggttctcatcgccgtctagtctatcatgtggaatttgctaactgtgcagatgctatggttaatttccttgataactatgatgccaatctggtggtaatagaaaatctcccgaatggtgtgtttgctgacccatttgagctacaacattttgttgagcggaaagtatatcttgatatggttgttttcggagacaccaaccttgaactgccttcggctctatccaaccggtcatctgtggaaatccatgttgatctcgcaccacttgcatcgatgaactgtaaccttgtaatagacctgcctctccatgctagatacccacctcttgatgccagtggttatgcgacggttgagtttggtagcccagatctgcttctacgttacagaaagaaggatactgttcctgaatcctgctcatggttgcttaaagatcttgatgctgcacctgtggagaaagctacatggcgcataccctgtggagacgaagcgcacataggatttgtatctagtatcacttttctttcagctctagtttgctcaattttaatagtcatagctgccctattttattgatgtcaaaactgaaatgcaagacaagttggattatttcgtcc

SEQ ID NO: 25009 - DNA, 2079 bp, Oryza sativa
  ref <308>: DATABASE ACCESSION NUMBER: AK100451
  ref <309>: DATABASE ENTRY DATE: 2002-08-28
gaggagcctcacttggccttgggaagttgggaactcatcaggcgagttcgtccaccagcgggccggaaaagcgcaactgctgcagcggcaaatctcccttcaagacgactattccaaacccagagttcatatggctggacaaggttcccagatgaagaaatactgtgattgctgcaaaagatatgtggaccattccaatggaaagatgaaatgcttccacaggcaaatgagtgctaattttgagcatagcatgatcataccaaacaagttcttggaccaattcggagggaaaatatcaagaacagttgaactagaatcccccaagggcaacgtgtatgtcgtcaaagttagcaagcacatgaataagacagtcctccagtgtggatgggaggcatttgtagatgcccatcagatagaagagaatgactccttattgttccgtcacatcaagaattcccggttctgatccttgattctgatggttgtgagaaagtattctcctgttctggcaaaagaagggcctctggtgttcaagaaagaaatgcagatcctatcgatgtttcaagcagcacccatgatgataccgtgcaatcatccgggggtgaaagatttgctagaagtgaaagtggtagtgacagtcagcatagtaaaaccgcgaaattggcagcgacatgttcatctgggggatcaggagaggaggccaaggagagcagcagttctgaacatgagtcatcctatgatctagttgatcctcagatagctccaatgcctggttatgtcttgtcgcgcgggactaatctatctcaagcacatgaggagaaactagatatgcttgtccaggaaattcgacctgaaattcctctatatgtgactaccatgaagcatagcaatgttaactcataccatgcttcccttgtaattgctaagcattatgcatgtgcgtactttccgcatacgagtcaaaccatcacacttaagtggcatggcaagaacaggaagtggcatcccaaattttacattaggaaagatcaagttgggtacatccttcatgggcgttggatagactttgttcgtcacaaccatgtgaaagagggagatatctgcatctttcacctaaaaaattttaatgggagaaaattcagggcaacagtgcatctactccgtgaaacaattcctcactcctttggtgcactccatattcctaaaaggtttgaatcaaggaatggcagaatgaggctgaaaatgactgatgatagaagagtaagctcaactgaatgtaggagagggacaatggaaccttctacaaccaatgtcaagaaggaagcggacaatgaacaatgcaacaatggtcaaggaaagcgtcgggaacctctcaattttgatgtttctgtggggagttctaagccttacttgacagcagacagagtttctctgactgaagaacagttcatgaaagtggaagagaatgttcactccattcaatctgaaggtcccatttatgtgtcgataatgaacaagagcaatgttggtaccgatgggctctacatcattacccttggcaggcagtttgctataagatacctcccggagggggagcaaaccttgacgctcctgacgacggggacgggcaaggcatggcaggtcaagatgcgccctcggagcggcgacgcacggatgttcaccctcggctggcgcgatttcgtccgcgacaaccgtctgcaaactgaggacatctgcctcttccagctgacgaagaacagtgagagggggcttgccatgaaagtccacatcattcgtcacaacgagaggagctagtttccacagcttctagtagtagaagatcagagagatggacctctagtagcactttttcattagtggtagactggcaatgagaagagttattagcttctatttagctctttctttgtgtagctttctgctggagttgaaacctgaaaattatgggcctgtctaaataatggttaaaggagctctctactgcaatatttatccagagttggcagcttttaaacaacctcgctgatggtagttgtcctacttgcgaatttctacact

SEQ ID NO: 25010 - DNA, 1604 bp, Oryza sativa
  ref <308>: DATABASE ACCESSION NUMBER: AK100452
  ref <309>: DATABASE ENTRY DATE: 2002-08-28
ggaagttaagatcaccgtctccaccaattccgtctttcctctgcgtgcaaattccgtcttccctcgctcctgatctccatggaagagaagaagcagcagcagcagcgtccacagagagggcgcgatggcatcctgcagtatccgcaccttttcttcgcggcgctggcgctggccctgctcctcaccgacccgttccacctcggcccgctcgccggggtggactaccggccggtgaggcacgagctggcgccgtaccgcgaggtgatggcgcggtggccgcgggacaacggcagccggctcaggcacggcaggctggagttcgtcggagaggtgttcgggccggagtccatcgagttcgaccgccacggccgcggcccctacgccggcctcgccgacggccgcgtcgtgcggtggatgggggaggacgccgggtgggagacgttcgccgtcatgagccctgactggtcggagaaagtttgtgccaatggggtggagtcgacgacgaagaagcagcacgagatggagcgacggtgcggccggcctctcgggctgaggtttcacggcgagaccggcgagctctacgtcgccgacgcgtactacgggctcatgtccgtcggtccgaacggcggggtggcgacctctctcgcgagagaagtcggcgggagcccggtcaacttcgcgaacgacctcgacatccaccgcaacggctccgtgttcttcaccgacacgagcacgagatacaacagaaaggatcatctgaacgttctgctagaaggtgaaggcacagggaggctgctcagatatgacccagaaaccaaagctgcccatgtcgtgctgagcgggctggtcttcccgaatggcgtgcagatttctgacgaccagcagttcctcctcttctccgaaacaacaaactgcaggataatgcggtactggctggaagggccaagagccgggcaggtggaggtgttcgccgacctgccggggttcccggacaacgtgcgactgagcagcggcggcggcggcggacggttctgggtggcgatcgactgctgcaggacggcggcgcaggaggtgttcgccaagcggccgtggctgcgaacgctctacttcaagctgcccctgacgatgcggacgctggggaagatggtcagcatgcggatgcacaccctcgtcgcgctcctcgacggcgaaggggacgtcgtcgaggtgctcgaggaccggggcggcgaggtgatgcggctggtgagcgaggtgagggaggtggggcgcaagctgtggatcggcaccgtggctcataaccacatcgccacgatcccttacccgttggaagagcagagtagcagcaacgtgcttggtgattgatactttgataggctggttttagcagcaacaaaggtgtactagttgatgtattgtttgtgtttgccgggccatcatagaaagtgcctggtgatctctgggacttgatggcaaatgttgggcaaattgtgatcgaataagattagtactagagttatcgtgtaataaggacatgcatggactaccatgtatttcatgttatgacgctcctaagagccacagaccacagcgatggtattagaccc

SEQ ID NO: 25011 - DNA, 1714 bp, Oryza sativa
  ref <308>: DATABASE ACCESSION NUMBER: AK100453
  ref <309>: DATABASE ENTRY DATE: 2002-08-28
gaggcgggagcagcaagctgggggcgcgcggcgaggcggctgctacacccgccgccgccgcggccggccgcggcgacctcgccccgatggtcgggatgtaccagcagcagctcgtcgaagatcccttccccctgagcggcggctactgcagtgaccagccacggcacgcgcccgcctccgcctccacctccacctccacatcctcgtcagctgccgttgcagcctcgccgctggcgcaggcgcatggagccggcgagccacggcggctgttcgaggcgttcatgggggagatcctgctcccgctccgcggcgagggaggtgccaacggcggcggcgtcggccgcggtcccggcggggttggggatctgggggagttgctgcggtggacgcgggaggtcgccgcgaatcccgtggcggcgcggcctgttccggcggaggtcaaggcgaggaagcggcaggtgctggccttacggcgcgctcgctacctcaggatggaggacgttgcgaacgcggacgagctacccagcttcttcaagaaaaggaagtacagatctcacaataaccatgcagaaagacaaaaaggtgaaggttcgatgaatatgccaacaaggaaatcagagaggctagctaagagaatgaaactcatgacatcagtgctcctcacacaaaggaaaaagattggagttggtgagcattttcaggcagaggtacctgactggactgaaccaccttcagatgaacttgctcgttacaaaaatgacccaaacatctcaaagatgctaggaaccagaatttggccacctgaaggtcaagttctacaaactgataaaaaaatagctggccagggaaggatggaatcatgtaactgttcatacccgggatccttcttctgcagacagcatcacacagatgcagccagagatcagctaaggtgtgaactcggtagagctttcacagaatggcgatttgattcaatgggtgaggaggtttctaaaatgtggactcgtgaggagcaactaaagtttaatgcacttgagaggttggtccctgtgatggaccataagactttttgggcggtagcatcaaaacatcttgcctcaaagaccaggatagagttggtgcgttattacttgaacgttttcttgatgagaagagtattgagccaatgcagattaaatcttttggagattgatagtgatgaagatgaaacagaggaagaggaggatgaagatcaatctgaaagcaccagtacttcccagaggacccagcatgcccagaatgtgaagagcatttcatgaaatggctgacagctacctgtccacattcttttttgcatgtgcacttgttttgtctatgtggagagtgacctcaatcgatttgtcatttctccatgtggtcattagtctgatcttggaagatatttggataaagtgagtcgttcactttgctagaacacatccattctgcagagaaacttatttgaatggcagaccattctcaatgtctgtctcaagacaatccattcggttgtaactcgaagattatctgatctgaattgtttcccattgtacaggaaaagaaaaggaaaagtagattgggggaaagaaaacaaatggtctggaacatttcttattattgagacttggaagggccaatgtgtcgcctttagcaagcttttttggcaatgcatatctatcgttctgttttttttttt

SEQ ID NO: 25012 - DNA, 2669 bp, Oryza sativa
  ref <308>: DATABASE ACCESSION NUMBER: AK100454
  ref <309>: DATABASE ENTRY DATE: 2002-08-28
agatggctttggataaaggaaaacttgatgatgccgtcaacttcggaacaaaggcgttgtccaaaattgtagcagtttgtggtccataccatcggctgactgctaatgcgtacagtcttcttgctgtagttctttaccatactggagattttaatcaggcaactatatatcagcagaaggcacttgatatcaatgaaagagagctaggtcttgaccacccagaaactatgaagagttacggggatttatctgtcttctactaccgtctccagcacatcgaaatggctctaaagtatgtcaaccgtgcactatatctactccaattttcttgtgggctttcacatccaaattcagctgccacatacataaatgtggctatgatggaagaaggtatgggaaatgttcatgtcgctctcaggtacttgcatgaagcactgaagtgcaacaagagactgctaggagctgatcacattcagactgctgcgagctatcatgccatagccatagccctctcaatgatggatgcatactccttgagtgttcagcatgaacagaccaccttacagatacttcaggagaaactaggacaagatgaccttcgaactcaggatgctgctgcatggcttgagtattttgagtcaaaagcattagaacaacaagaggccgcccgaaggggcatcccaaaacctgactcatctattgcaagcaaaggacatcttagtgtatcagatctacttgactacataagcccggatcaggaaagaaaagagagggatacacaaagaaagggcaggcgtgcaaagaataatatcagagcccatcaaggtgaattagttgaagaaaaggagagctttgagcacgacataggatctcctcatgaagcaaacaaagaggagtttcaacaagtaaaatcgaaggcacaccctccagcaatatcagaagaaaattatgctatccatgatgagctgaagcaagttgatcctttatcacctgaagaatattctgatgaagggtggcaagcagctaatttgcgtggacgatctgcaaatgtacggaagaaaagcagtcgcagaaggcccgctctcactaaattaatggttgatcgcttggaagatggccgcacaggttctgcttatagggctggtgtacaacaacacatgaaaggagataaagaagatgttataaactcttctagccagctctcctttggcagctttctaaaaactgacaaggtgaatgggaattccagcaatattgaaaataaggttttcaatgctatatctaaaccagaacgaggcataaagctttcaggaattaacagacctgctactatagcttccaagttggtatcatacaaagatgtagcagtgtcaccccctggcacagtcttgaaaccgattttggagcagaaggaagcaaaggagaaggataatgcacaaaatactgatctaatagtgtcatctgaggaggaagataagaagttaacagatgaagatgaagaaaaggaaaagccaagtcatgacagcagcaaagaggttctttcaagtgaaccagaggaaatcggcaatgatgaaaaagctccggacagcaacagtgatgaaagcccaactgaatctaagaaaaaaggtggaagcaagctttcagcttcagcgcctccattcaatcctggatcactcttatcgatgtcgcacccttacagtacagtggcaatatatgatgctagcgtcgttcttcagccaataccaagtcaaccaatggagattctccctcacgccattgatactagggtaccccgtggtcctcggtccacattgtactaccgtactgggcataccttccaaagaaaacagggttacgcacacagccagagcaccattctgaggggtagcaactcccccccaaccatgaatcctcatgctgccgagtttgtgcctggaaaaacttcgcaacaacctgatgtggctaacagagagcctagtgcagatgtttctgtaactgattcagcagatcaactgttggcaccacagacatcagatgaagtaaaggctggtatgcctgcagcagaacaagcaattcaaggtgagagcaccagcccatgcaaaggaaaggaaaacagagcgaaagatgccttgagaaactcatgcaaaacagagctggcaaggcagattttgttcagtttcatcgtcaagtcagtacatgatagcttaggttccactggagctgaatcggacagaaaaccaagtggaccagacgaatctggtaatgcacagagcagcaacaacataaacaagagtccgtcaggtcgcaaagagcttgacaaacagcagaaggccaccgtggtacctaagagtgagaaggatacagaaggatttacagtagtttcaaaacgtagaagaagcaagcagcactttgtgcatcccatacatggtctctattcccagcagtcaatttgcacttctgtcagctaaaggtcccggtagatctctttttgggagtcgccatattttggaagaaaggtatcgcttaattacttagcttagacgcttggtagcaaaagtcttaccctatccagatgatcgagagcatgtagtgaaactgtacaaagctttccgcaatgtcttttgtgtaataaattttgtaattttggggtagcagccgcatcagcgctg

SEQ ID NO: 25013 - DNA, 3689 bp, Oryza sativa
  ref <308>: DATABASE ACCESSION NUMBER: AK100455
  ref <309>: DATABASE ENTRY DATE: 2002-08-28
gtggcgctattccgttattcgaagcgtgctctgctcgctgctgctcctccacctctcccaattagggttttcgctggctgcggcggcggcggcggcggcggacggcggcgaagtcaggcggcctctccggcatccgctccgtcgagatgaaaagcaaatgcggtatggtcctgtgatttaagctggaagatccgatgctgtgttgtgaggcttggacacctttcacattctgagtctctcagatagaccgacaagagtactttcggataagggaaaggaggttgtgcaccaggaactacttctttgttggactaataaagaagggttaaaatgactggtgaaacaaggaaagaacggtccaagtgggatacaaaaggacctcctgatatagtggagatcagtgaagatgagtctcttcctatgaatatggatgatcataaaaagggcaatgatgatcatagaaagggcagtgatttgctcccttctcaggattttggtcatggcaatgacaagcaaattggtgaatctctgaacctcaaatctactgtctctatgcaccatggtagcgctggacatgagcaggatcgagctgatggactcaacaaagatatcaaggaaaggtcatccaaggcatcctctgaaaggttgcctcttagaatgggtgatgaggatcataataaaaatgactggcacaacagaggctttgaaaaggcagctggtaaccaaggtatgagcagatatgcagatgacagaaggcgtggtgatgggtggggtacaactcttagccgtggttattcttctaggatatcatcatctggtccagatgcgtggaagagaagtcgcagtccactatctccaagaggtggttggaacaggtcacgcaggaacagaagccgttctagaagtagaagcaggagcatagggcgaggtagaggtagaagcagaagcagaagcagaagtccttatttcagtgaccgtggatctgaatggagggttgagagaagcagatcatctggaggacctgctcttccctgtagggattttgtagctggtagatgcagaagaggctcaaattgcaggttccctcatgaagatggtgtgcgcaggcagtttgatgagcattatcctgtagattcaagggaaaagtatgggcatcagaatagggacttcatggatccacgagaacaagatgactatttaaggaataggccacctcgaggtggccattatgatgaaggaacttgggaaagatctgaacctcgaagggagtatcggtctacgatgccatgccatgattttgtcaaaggaagatgcagtaggggtgcgaattgccgatatgttcatgatgattccacccctcatggtggatggagagatgaggttagagataatgctattggtagaagtggccctgattcatcatatgggaacaggactgagcaccgtagaacaaataaaaacccctgcaaattttttgctaacggtggatgccgtcgtggccaaaattgcccatatctccacgaggaagcttcccagagccaaatgggactgggtgcacctgatgagcctggttacactggtgggcctacaacaagaggagattacttgagctggagtgaacaaaataattctgtgcaggcaagttctcatgttttgtcaagagatggcagagaaaaccctgttcctcagggtactggcagaaatgattctcgatatgagaacaaaaaccggcattccaaagatgctggaagtagtcagtaccagatattccctcaggatgattttggttcagtagggcaaaacaaacctgaaatagctgcttcacaactgccacagttcataccttctgtccaaacaggcacagagagcataaacattgacaaggtatctgacatgggtggtcagagtggacctggaaccgttggcaatttgagtatgcaaatcgggatgcattctgctaatcttttaggagggcataacttgggccaaaaagcagagagccaagatgcaatttctcaaatttctgctgcaccatctcttccgggcgccacccaattgcagaatactacatcctcagtgcctttgaatagccaagttcagcaaagtgacttttcattacatccaaataggcaggaccagtttgcagttcctcatgcaactacaaataactctgctcctagcatgcagagccagccagttgctccttatatggggcacagccaacacggctacattatgggggcacaatcattaccagatctctctgtgcataatggacaaattttcaatgttggtcaagttccacagaatcttccaacaatcgtgcatgctgggcagaatcaggcaacaagtgacacacccaacctgggccgagatagtggtgatcaaggcttgcaaaacacacataatttccagcctgttgctccaaatgagcaaactcagagtcaaaccttgcaagggttatcagtggtggccagttccagctcagttgatatggctggagctcctctttctcacaatgcagtgtcaagtcaggaagaagtccgtcgtgttactgcatctttggcccagtactttgttccttctctgactgctgatacctctgggctgcagtcgtctcagcctgatccaaattcgagtttgatgaacaattcgtctgctgcacctcaagcagttcaacctaatcactggccttggttacaacaagcaggaatggtccaaccttcacatattgttccacctgaacaaccagctccccagacatttcaggcaccaatggctgctggtagtagtaatggcaaccctctgcttttaccccattcggttgcaccgactgttcctgctgctgccttggcgaccaatgaaactacacctgcagaaaataagaaagaagaaccaaaggacactgatgctgaggctaatgaagatggtgagaacaagaagagcaaggattccaaggcgttgaagatgtttaagcttgcactggctgactttgtgaaggatgcacttaagcccacctggaaagagggtcaaatgagcagagaggttcataaaacaattgtgaagaaggttgtcgacaaagttacgaccacagttgaaaatactcctcaaacaaaagagaagattgatatttacatgtcctactccagagaaaagctaaacaaactcgtccaggcatatgttggcaagtatgccaagaaagattgaagacatggtgcctgttcttcctgcattgtattagaaagattgaagcagccttagctgtccccaagtttaggattcttcttttgtcttcaaagctagtttaggatcctgtaatttagggatttgattaaaatcacaaacatatttttcccctcccaatttcaatgttcactatggtggtttgacaggtagagtattttgctggtagggcaactgaaccaaatgttacctcaatgtaacttttgtagaatattcatccgagtcatgaagctttctgtatgagattgtacaatctttggatcatctgtatgagcataagctgagatacacccgatggttgtgtttgtgctaatctgtgctgtccctttcagtgtgcagcacaaacaagaagtgtaagctagctgctactaccagtctattttgtcacatgtcagggactcagggttaggaacatatttttaacctgaattttattcgctggatcc

SEQ ID NO: 25014 - DNA, 2729 bp, Oryza sativa
  ref <308>: DATABASE ACCESSION NUMBER: AK100456
  ref <309>: DATABASE ENTRY DATE: 2002-08-28
gattccggcgggccggcaacgagcatggcaggtgacggtgccaagtgctccgacgaggtgaacgacggcacctacttcatggccggcgtgatggccgtgaccggcctcatggcgaccgtcctggcgctctccggcatcttccattgcgcgcttcgacgcgttgggcagccaagcataatctcgcacatcctgtgcaggccggcgtggtggtcgggccgacggtgctcggccgcgccgtggacctgcgtcctctgggcatgcaggacgccggcagcgcgctcagcgacaccatctacttcgtccgcatcatcttcatgttcttcatcggcctggagatggacctccggtacctccgccaccacctgcgccgctccctcgccatcgcctgcggcggctcggggctctgcctcctgctcgccgccctcgcggggcccttcttctacggcctcctccaccccggccagggccccttcaagcccgagaagctctacgcctccaccgcgctcttcatgctcgtcctcaccaccaccgcctccccggtcctcatccgcatcgtcaccgagctcaagctcaccggctccgaggccggccagctcgccatcggcgccgccttcgccaacgacatggctagcctctccgtcttcagcatcatggtcgtcggcaccaccgcctacggccccgacggccagcccaccccatccttcccggacatgtccatcgtcatgtccatggccttcacggcgtgcctggcggtgctcgcggccgccagggccgccaggctgctcaacaggctcaagcgcggccgccgctacgtcagcaagtacgagctctgcgccatgctcctgctcatcatcgccctctcgctgctcgagcaggtgttcggctacagcgcctccatgaccgccttcctcatcggcctcgccatgccgcgcgacgggcccacggcgcgcacgctcgtcgaccgcctcacctatcccgtgcaccagctcgtcatgccgctctgcttcggggccatcggcgcaaggctcgacttcgccgccgtcggcagcttcacagccatgcagttcgccgtcgccgtcgccttcacgacgctgctcggcgcagtcgggaaggtgggcggcacggtgctcgcgggccgcatgctgggcatctcggcgagggagtcgctggtgctgggcttcctgctcaacgtcaagggctactgtgacatcctcgccatcaacttcggcaaccaggccggcatctggggccagacggcgcaggtggtgctgctcctctcctccatcctcaacaccttcatggcaggcccggctgccgcggccatcgtccgacagcagcgcgccgcctcccgataccggtcgcgctgccttcaggacctcaaggtcgaccacgagctccgcgtgctggtctgcgtccacggcgccgggggcgtccacaccatgctgacgctcgcggagctttccaagggcaccgcgccgctggccgtctacctcctccacctggtggagcttatggccgcgcgcaagtacgccatcacccatctgtaccatgacgccgacgccgacgacgacgagtggggttatgcccgcgagatcgagcaggtggccgcggcggtgaacaccttcacctacgacgccggcgtgccggtgcggcagatgaccgccatctccagcctggggtccatggacgcagacgtgcgcaacggcgtggaggactcgcgcgcgtcgctggtgatcgtgcccttccacaaggagcagcggtacgacgggcgcatggtgtgccggcgagaggggaggcggcagctgaaccagcggatcctgcagcgcttgccctgcactgtcggggtcctggtggaacggcgcctcggcgggggcggcgacaagggcgcggaagacgtggtgaagaaccaggtggtggcggtgttcctgggcgggccggacgacagggaggcggtagcgtacgcgacgcggctggcggcgcacccgtgggtgagcgtgacggtggtgagattccttccagcgcgacaggatgatattaccattggcattgatgaacaattattagccaccaccaagagccatggcggtgagggcgccatggaggtggcggtggaggacgaggaggcgatggcggatgaggagttcatggcggacgtgtacgcgaggctggtgttggcgggacaggtggagtacacggagaggtacgtgagcaacggcgcggagatggtgaattcgttgagcgccatggtggggacgtactcgctgttcgtggtggggaagggcggcggcggctcggcggcggcggccatgacgagcggcatgggagggctactggaggacgagtgtccggagctgggccccgtcggggaggtgctggcctccgacgacttcacggcctgcggctccgtgctggtgcttcagcagcacagcgcgcatgtgcatcgcaggatgaggaggtggaatcccaacattcacatcaccaccacaccctcgtcgtccgatcatcatagccacccaccctagctatatactacttcatctccgacggcaacatcatccatggcgccatgcatagaacaaattaattaagaggagtacgtgtggcacgcaatggctagctggttggactggatcgacctagctagaacggggccgggttgacattgcaccgatcgatcgatcgatgatctgcatctaattgccatgggaaattcagttggttttagggtc

SEQ ID NO: 25015 - DNA, 3279 bp, Oryza sativa
  ref <308>: DATABASE ACCESSION NUMBER: AK100457
  ref <309>: DATABASE ENTRY DATE: 2002-08-28
gtgctccacgcctccaccaccggtgcccccatcgccgccatcacctcgcgccgcgccccatccttatcgtcatgacacgcctccaccgccggcgcttccatcgccgttgtctccttcccgtcacaccctcctcgccgcgacatgtctccaccaccggcgcccccatcgtcgtcgtctcctccccgactcccggtctccaactctccatcacgtcggcgcgccctcgactgatccccgccgccggaatccctgcctcggcacgcaatcgaccgatccccgcggcgccctcaaccgattcccgccgccggaagccctcccatcgcgcctcacggtctccatcacgccggctcgccctcgacagatcctagccgccgcccgctgcccctccccggaattgaatggcacagaacaaaaacacgagccctctgcggcgatggattgggagcaggtagtgccgtagtggcaaggctggcggcgttggtgcccggcgacagccacggtagacggaacgctacttgatctgacaagagtggcgtgaccaggccatcgccgccgcttatgcatgccaccccgcctcctgtcacccctactgtgaacctgcgatcaagcctccgccggcgggcacccaaggctgtcgcctacagtgcgacttcgccatccctgcctgcgcatgccctaagccgctgcttacagcgcgacttcactgccgccgcctgcacgagccccgccgacgcccgacctgcaatacaacctccgttcccaaggccaggagcagggggcagcaccgaaggtagacggcaccatcagctaccctgttagaggctagagtattctgtgccaacgtcctgtcatccttcttgcgtgcccttgacaagcagggcagaagattcaacatctgaaccccaaaaggagtccacgtttctgttcatgatgccaacgccgcctcccatccctgccatatgagatcaatctacctgcaagctatttctttccttttaggaagaagtaatgtggctactctctcggctctcggagatcttctgcctagcaacatatgcgttgaaaaaaggatggtgatcaggaaagaggcatttttttctaactgaaagcgcttcgcttcgaccaatattgttactaaacatgctagagttcaagctccaggagaaggtcacatttaggcaagttctacagtctttcaggttgtgtgcaatggtcaatgatgtgcaaattgcaatgctgcagaatgagagctgagccacacagtccatgtgccatgcttttcttatccactttagtttcatgcaaccatgctgtttccaacccctgctgaaatgctgaacataaggatgaataatctaattttatgaggaaaaacatctctggaagtgcctgctttgatacctgatacaagatgtactagggagttacagaacaggtaggaattgtaagaatgtcatgtgcatactagggagttactgttgcaaaattaattgaggttaactattgacttattatcaagcatacatgcattaaaaacataatcaagcatatatgcattaaaaacatattatctttctcttccatggaccatggtgtatggtactatggttccaaggtttaacaggttaccaatatgtgttctttgccactgctggatatcaggatcaaattaagtaggtatttattctactatatggtggtggagggtaattcttctaggtcaacgggtacttttctcattttctgaaaacaacacgatgatcatatttagtgataagagtattatgatttgacacattgatgctacattcttattctttctttgtgcaaacctggctcaaaagaacatattttagatgagtaggaagcttgtgttcttcgatggtctgaaaggttagcggctacaaatggcttgattaagttttttaatcccctcttgcttaattgtattctttacttagaaactttaactcaattgactcaagcaatggatgtacttttcttcagtttacctcaatcaatttatgttagcgtgccttgtacgtgcacgcttttaatcaataaattttcgctgacttgaagaactctgtagagcagcgagcagcagaggtaggatgttttgatagcaggtgctcaactaaaacccgaattgaatccatcttttggctttaaactgatgttcagatctggcattttggtgcacaacatgtagttggggattttttgacatttcttaagtgttttttcattgaacttgatcaaccaaagaaactgtattacatcaatattcatgacctgttagtctgaagctaaagcagaatcagattcagcaaatgcggatgtacaactatccaataagattgatcgagcataatcttgcaagattatgagataatgcatgtacaactaaataaagatacaggcttttctatactgaactggattttatggatcatcacccatggtcctctgtactcaaatcctttttttcttttttttaatggcatacaccccatggtaaatgaaaattgtattttctttctttctttttacctaaattcatacaatctggataatatattttatatgatcccttcttatacctgtggcttagctatttgtatttgtaaaccaacgatatacaatagaaataagccggtgcgatttgatgttaacgtattaattttttttccattttcaacgcacgggcacccaactagtataacgtaaaagttgcagttttgtgataatttttcacgctattgttgcagtaaactaaaacatatcgctaatgttgtagcaaactaatagttttgttactaaagttgcagttttctgaaatttactcttgtttttaagcactcaggcagtacagcataattgttgctatgctgtgcgtgcgccgatctggccacattcatcttgcttgattcactaatctaatcatcgtagtttgtttttgttgttccagctttccagctttcttttctctcttttttcactatgaccaaggaagagggaagggctcaaggaggttctgagcgggctgctcagagcaacagcaggtggcaggcaaccagtgcatcgcaggagataggcgcacagtgttagaaagagtttgttacatgtgataatgcgcatgagataataagatagaattagagatagatttctgtttttgagtcttatctcctcctttgtatgcgccactttgggagcttttcccaaacatatattaacacgtacagcgacctctaacgaggtgagaacacttctgcc

SEQ ID NO: 25016 - DNA, 2903 bp, Oryza sativa
  ref <308>: DATABASE ACCESSION NUMBER: AK100458
  ref <309>: DATABASE ENTRY DATE: 2002-08-28
ttggggcccaacaagccaacaaatagggagtagtgaggccttgtacaacccgacggagtgagagggacccaagccgacaaatccctagcgcccgcgactccgcaaatcgtgaccggcggcgatcgatcgatcgatgccaccgaaattgcggaggaggtcgacgggggcggcactatcccacgccgcgagtggagaagaagctcccaaatcatcggaaacgagtcctgctccagcggcggcggcggcgggcagtggaaggtggactcgatctagatcagcgaggagtcacctagggttggattcggattctaccgaccaccctagggtagtgtcgggctcttctgatcaaccgccgaagaagaggaagaagacgacaacggcggtggccgccgccgccggcagtacaaggctggcctcccggccggtccctggtcgctacccggattaccccagtttacggccagggcaacatgctcttagcaagaaacacatgagtgctgttcaagaatggatggaggagtgcagcaggatcagcaagctcgagaaacaagctcgtcctgaagatatccccactctcagagataacccccgggatcccctcactcctgatgccgtggtcagctcacaagacaaggccatggtgctgcgtgtggctcgttccgttgtcagtgtttcatcctcaaagcctgatggggaactgatttcccagtgcaccggcatcgtgattggttgggatggggccaacaagtgcgccaagatcctgacctcttgttctacggtgtgcgacttcgacggtgaatttattcaagctatccgttcgtatgccaaataggacaattacagaaggacggttgttattcttcaatgtacactatggtatcgctcttttggaggtcaagggagacttccagttgcaggtcccttcttttggcttgggcataaactatggccaggatgtatttgcattggctagggatgaaaacatgtccttaatggttaggcatggaacaatttcatggctggattatcctgggttattgaccaatccctatatgtttctgagttgtgatattcccgagggtggttcaggagggccggtggttgaccatgatggtaatatcattggaattgcatttgatagaaacccgggtccggttgttatctctatcactacaatcagaacttgcattgagatgtggcatcagtttagccgtgttgctcgtcccatgcttggcatgcaattgaaggctgtggaactactggatgtctctatgcgggaggaactttgtcttgagtacaatatcaccggcggtttcattgtgaatctggtaaaagttgattctactgctgagagaatcggtattagacgaggggacgtgattgtttttaaggataaccgttgttctactttacctcagttagaagattacctcctttctcttggttggggatacctgcagggcttaagctttacagtagatctcaaggttgaagttcataatctcgccgactcatataaggaaagcattactttccctgtaccgttctctgatgcttctaagcgggttgactgatggtgtatatgacaggtgctataagattgaagtcttagagatgctgtaagattgaagtcgcctagagttatatgactgaccaaaggatatgtaatatacttcttttaggataatttatcaagtcatgttatcagcgatgtaacctcattgcctaaatggttgtgctaatattttatatgaatattctgcaatggtgagatttagtaatttacaagatgagcaataaacacaaatgcaatgtaagcttgatagaattttttgaggtaaaacaaaaaaaacaaacctaagttacaggatatgacaccaaacaaaattgatagtcccatagtattccacataaccctattgatggagttcaaaatcttgcagttcagcacatactccggcttaggttgttgcttcatcaataagcacaatattactttggctgtgaagcttaattatggctttgcccagtatggttgattgcacaaaggttgatgggcctagatgacgaggacaaaatgtggagtcttatagaagaagtgtgggtggagatgctcttcttctccgctggtagatgtcgaggatacttgcatgccaagagccttggatcaggcgttgatattgtggctcctgttggcacatgcaggaatggaggcattccctgagaggcttcagaggagacaatagtgccgcttgctgaaaaggaagcctcgggagaacagacaagatggtggcactagtccttcaaattcccgagatttcaagcctctcagagcaagtataatagtgagctataagcttgctataagcttatgtggaggagagaggtaacaaaaaatcaaaggtgttggctctcatgcaagagctaacttaacacaaactccaagacaaaaacaataaatgtataagtgagagatagagataggagaagaaaattatagctaaaccttatagctaatctattatatgtgttagctttaagataggctaatactccagtagatagtgagctctattattatccttgctctcaatatcgatgaagaagatgcagctactccatctggaacttcccaaggcacagagtcttgtaatagctaactattgtgcacactaactcttgttaaactaaatttagttgatgtatcagctcatccccctaggtgaaggcagtaattcccatgagctcaaggagattgttgtctcaccatagcaacatgcagcttcatcattgtttgcgtaattgcgtttagtgtgtaattgtcttaatatgccagtgtaatgttaatgtccgttccatttgttgtataccatgtcagtgaatcaaattcatataattgtgcc

SEQ ID NO: 25017 - DNA, 1394 bp, Oryza sativa
  ref <308>: DATABASE ACCESSION NUMBER: AK100459
  ref <309>: DATABASE ENTRY DATE: 2002-08-28
gttgaacccccaatccaattccaatctccccctttcatcagcgccatggctctctcctccttctccatgtccctccccttcgccaagctgccttccacctccaaatccacccgcttccttcccatccgggcctcctctgccgccgccgccgcctccccttccttcgatttgcgcctctattggacatccctgatcgccgatgtggaggccgagctcgacgccgcgatgcccatccgcacgccggagagaatccactccgccatgcgctacgccgtcctcccgggcgccggcaacgagggcaccgccaagcgcgcgcccccggtcctctgcgtcgccgcctgcgagctcctcggcgcgccgcgcgaggccgcgctccccgccgctgtggccctcgagatgctccacgcggcgtcgctcgtgcacgacgacctcccatgcttcgacgccgcgcccacccgccgcgggcgcccctccacccacgccgcctacggcaccgacatggccgtcctcgccggggacgcgctcttccccctcgcctacacccacgtcatcgcccacactccgtcgcccgaccccgtaccccacgccgtcctcctccgcgtcctcggggagctagcgcgcgccgtgggatccacaggcatggcggccggccaattcctcgacctcgccggcgccaccgccctcggcgaggccgaggtcatgaaggttctgacgaagaagttcggcgagatggcggagtgctccgccgcctgcggcgccatgctgggaggcgcggggcccgacgaggaggccgcgctgcggcgctacggccgcaccatcggcgtcctgtaccagctcgtcgacgacatccggagcgcgtcgggcaacggcaagatgaggagcaatgccagcgtcctgcgcgcgctgggcatggatcgagcgctcggcatcgtagaggagctcaaagcgcaggccaagatggaggccgacaggttcggtgacaagtatggcgaaagggtgcttcccttgtacagcttcgtggactatgcggtggagaggggattcgagctgcaggatgcagctacaacgccgtaggcacggaccgcgcagaccaaccttgatgctaccggatatttgaagttctgagcaagtggttatatatggagttatatgctgctgagatttggtgagcaattcatctctgaaattataagtttcaatgagaaatataaagattacgccattgccatctagggcagatgtctggatacttatgctgcggttctgatctttagttagttgctgaaataagacgatgtgactaaatgaagaattcttaggataaactaccacaattgctatgccttggtgttacatgtgcttaatatatataatctgatcacaatttcaaagcc

SEQ ID NO: 25018 - DNA, 1327 bp, Oryza sativa
  ref <308>: DATABASE ACCESSION NUMBER: AK100460
  ref <309>: DATABASE ENTRY DATE: 2002-08-28
tgggagaacagaacaaaggtggagactgcgattcacttccactcccttccccactgccttcctcctctcactctcactccccctgcgaccgccgccgagaggccatggcggagcaagctccactggcgccgatgcctcgagtcaagctcggcacccggggcctagaggtgtccaagctggggttcgggtgcatggggctcacgggcgcgtacaactcgccgctcgacgacgacgccggcgccgccgtcatcgcgcacgccttccgccgcggcgtcaccttcttcggcacctccgacgtctacggccccctcgccaacgagatcctcctcggcaaggcgctgaagcagctgccgcgggagcaggtgcaggtggccaccaagttcgggattcggcggggcgccgacggcgtgcgcgccgtgtgcggccggccggagtacgtgcgcgcctgctgcgaggccagcctcggccgcctcggcgtcgactacatcgacctctactaccagcaccgcgtcgacaccaccatccccatcgaggacacgattggtgagctcaagaaattggtggaggaggggaaggtgaggtacattgggctatcggaggcgagccctgacaccatcaggcgagctcatgccgtgcacccaatcactgcagttcagatggagtggtctctctgggctcgtgacattgaacccgaaattgtgccgctctgcagggagttgggcattggaattgttccctacagccctatcgcccgcgggtttttcggagggagaggagtgacagaacaattgtctgctgaatctaatttgcaaggacatccacgattttctgctgaaaatttggagaagaataaacagctttatctgaaaacggaagagctggccaagaagcaccagtgcagccctgctcagctagctttagcttgggttcttcatcaaggggatgatgtggtcccaataccaggaacaaccaagataaaaaacctagatgccaacattgactccttaaaggtgaacctcacggatgatgacctgaaagagatctctagccaggtacgcgaagaagatgtcgctggtggaagacagtatacctcatttgcacattacacctggaagtatgctgacacgccaaagaagtaaagctaaaaaaatattagtatatcaaagatattgcctgattgctattctccctgcgtatgtgctggatggtgttaaatgtatgccttgtgaatgctctctgcggttctaataatgtactgccaataacaaattactgcacttccactcgcctttgagagcttcacgaaacatataaaacttgcttaagc

SEQ ID NO: 25019 - DNA, 1767 bp, Oryza sativa
  ref <308>: DATABASE ACCESSION NUMBER: AK100461
  ref <309>: DATABASE ENTRY DATE: 2002-08-28
gattgcgacacctcccgtacgtcaatgcccgtggccgccattgatggggaagaaggccggcaccacctcctcctggctcaccgccgtcaagcgcgccttccgctccccctctaaggacgactcccccaacaaggccgcccgcctccgcgacgacaccgacgacgacaagggcaagagggagcgccgcagatggctcttcaggaagtcctcgtcgccgtctcccgcgcctccgacaccgccgccgccacagcagcagcagcagcaatcgagggcggcggccgtgacggaggagcagcggcacgccatcgcgctcgccgtggcgacggcggcgaccgcggaggcggcggtggcgacggcgcaggcggcggcggaggtggtccggctgacgcgtccgagctccagcttcgtccgcgagcactacgccgccatcgtggtccagaccgcgttccgcgggtacctggcgcggcgcgcgctccgggcgctcaaggggctcgtgaagctgcaggcgctggtgcgcggccacaacgtgcggaagcaggccaacatgacgctccgctgcatgcaggcgctggtgcgcgtccaggcccgcgtccgcgaccagcggatgcgcctctcccaggactccatctccttgtccgccgccgccgcctccgccgcgccatgcggcagcagcaagtcctcctacagcgtcgacacctccaccttctgggattccaagtacacccacgacttcgccgctgccgaccgccgctccatcgagcggtcgcgagacggcagcagcttcgccgccggcgacgactgggacgaccggccgcggacgatagaggagatccaggcgatgctgcagacgaggaaggacgccgcgctcaagcgtgagagggcgctctcctacgccttctcccatcaaatttggaggaacccggcgccgtcggtggaggagatggacgtcgatgggcagccgaggtgggcggagaggtggatggcgtcgcgcgcgtcgttcgacaccagcaggagcaccgtccgcgcctccgcagcggcggcgcctgggcgcgcgtccaccgaccaccgcgaccaggtcaagacgctggagatcgacaccgcgcggcccttctcctactccacgccacgccggcacggcaacgcgtcgtaccacgcgtcgtcgtcgccgatgcaccgcgcgcaccaccactcgccggtcacgccgtcgccatccaaggcgcggccgccgatccaggtgcggtcggcaagcccgcgcgtggagcgcggcggcggcgggggagggagctacaccccgagccttcactcgcaccgccaccacgcgtcgtcgggcggcgcggcggcggtgccggactacatggcggcgacggagtccgccaaggcgcgggtgcgttcccagagcgcgccgcggcagcgcccggcgacgccggagcgcgacaggatgtcattcggcggcggcggcggcggcggcggagcgaagaagcggctgtcgttccccgtccccatcgacccgtacggcgcgtacgcgcagagcctgcggagcccgagcttcaagagcgcggcggggaggttctcgtcggagcagcggtcgaacgtgtcgtcgtcctgcgcggagagcctcggcggggacgtggtctctccgtcatccaccaccgacctccgccgctggcttcgttaatccgccgccggcgtcggcgaggtgttcgatgtaatgcccgtgaggtgttcgctgtaatgtttttttttttaccacgacctcgtaattcatcc

SEQ ID NO: 25020 - DNA, 3037 bp, Oryza sativa
  ref <308>: DATABASE ACCESSION NUMBER: AK100462
  ref <309>: DATABASE ENTRY DATE: 2002-08-28
ggtttttcgactcgaatatacccatcgccgccatcactgatccgccgctccccatcttctccgcctccgcgatctcgccgccgccgccgccgcccccaagctccccactgctccccgccgacgcctcccccgaccaggagctccccgccgacgagcgagcgagcgagccgaggggaaggatggggtacatcggggcgcacggggtggagacgctgaagcggtacaggtacagcgggcaggaccactcggtggtggccaagtacgtgctccagccccttctggagcagatgcgtcaccctcttcccgctctggatgccacctaatatgatcacactcactggattcatgtttctagttgtatcagcacttcttggctatatctattcgccccacctcgacacagctccccctaggtgggtccatcttgcccatggattacttctcttcttataccagacttttgatgctgttgatggtaaacaagcaaggcgcactagctcatcaagtcctctaggagaactttttgatcatggatgtgatgctcttgcctgtgcttttgaagcattagcccttggaagcaccttgatgtgtggaaggtttactttctgtttctgggtgattgctgctgtcccgttctatcttgcaacatgggaacacttctttacaaatacacttattcttcctttaataaatggacctacggagggcctgatgctgatatatctatcccactcttttacctttcttactggcgctgaatggtgggcacaagattttcggaagtcgataccccttttaagttgggtaccccttccatttattccagatatccccttatacattattgtgatgattcttatgatcctgtttgccgtaatccctaccattggatccaatgtcagcaatgtccaaaaagtagttgaagcaagaaaaggaagcatggtattggcattggcaatgctccttcctttcattgcattgttaactggagttgctgtctggtcttacctctctccttcagatattatgaggaatcagccacatctgcttgtgatcggaactggttttgcttttggatatttggtggtaagtttttaatttgttttgcccctagcatggattttaatcgatggtttaacacaggattctacctccttcctcagtgcgcaatcaccaattcactggagcagccactgtcatacccattgttgtcatgcttatcagttctaaccacatggttcctgctaggccttgcctatccttaaaaacagccacctgctatgagttcaaatttcaaagcaaccaggggcactccatgctccagttctcttcactatttcagcattcttcatgcttcagttagtgagagcctgagagggcaccaaggacaaaaatcgtttttgaaaccagccttgtttcaatacctgaggggtgtcaagtatccagttttagagtttagagtcaaaatgcggcctgctaagagtttagagtcaaaatgtggtctgctaagagcaagtaaaaacttcctacattttggaaatggatctttgttagtaggttactagaaaaacaataggctgcttcaatcaggttttgatcaacccatctaacctataaaaatactataaactatatgaaataatgaccaaattatacagaactgtgcagcagaattgcaaagggtccatatgcagataaatcaggccaatggtatttgggcatttgtatcactgttgtcttgtggcagcaattagttacgcaactgaacatgcctgccatcagctgaccttgccttttgatctggaaagggtggtaaactgaatactgtttagcttgttttgtggacgatatatcatattggatattcttgtgttcattaaatgtggatcagcatttcattaacttgcagttccttaattactttcttatagttttcattatagttttcatctttgcaaaactttcttatgatctactttgatctatctgcacagcagttataagtctaggaatttttatctaaccatcacaaatcactaattaggttatatctaaccatccaagttatattgcgacaattaaaaacttgatagtcccattatccgcctggatttttatgaaaagcatttatggctaacatgcacaacatattggtactgatatactgttgctgaagaagcacctaatgccacttggttcacctaatgtgccactgcgctttgttctttactgaatagtgatggagcatttttctgtagagtgagatttgcaaacatagtgcataatactaatctaccatcatccttgtttttccttcctggaattagtgctcatattttgagttgccatgcatggacagggaaggatgatacttgctcatttatgtgatgaacccaaaggtctcaaaactggaatgtgcatgtctctggtgtttcttcctttcgctattgcaaatgctctcacagcaaagatcaatgctgggattcctttagttgatgagctgctggttcttttcctgtattgcgcatacacagtgggcctttacctgcatcttgccgtttctgttgtgcatgaaatcaaggatgctcttggaatctattgcttcaggataactagaaaagaggcttgaatgtgttctgagttcttacatagcaataggaggcattctgtcaccttgtttcgttccagatatttttgcctttggccataccaaatctcatcggtgtgcatcctggggtcctgccccttgaacaccacaacaagcagtcgtttgatctgtttgatgcagatggatacttttggagtgtaatgcagaaatatctttagtcctatatatgtacatgttgtacacccagcttttgacgtacttttgggttccatagttaaggaatcgataggttttgtactatttagatgacaggaggatgaactattattgcaagtgtggagtcgtgccttgagcaaacaaaagcgttccatgattgtagctggttaatttgcatgtctaccataatgcgtcacctgttgtttcggcgcc

SEQ ID NO: 25021 - DNA, 1724 bp, Oryza sativa
  ref <308>: DATABASE ACCESSION NUMBER: AK100463
  ref <309>: DATABASE ENTRY DATE: 2002-08-28
gagtagtacagcgcacaggccacgcgtgcgcgtccaccgaaacagcggcggcgacgacgaggcgatcgattcctggacactcgcgccacgccaccccactgtccctgcacgctgcagctacccctactctaccactgccctctccggcagggaagcgaggaagaggcacgcaccacgaagtcgccacctcgatttttccggcgaacgacgcaagaataacacccccccccccttacctacggggatagtgatacgatggcgatggcggccgcttccgcctccgccatggcgaggcgggccgcttcgtggccacggctcctcctcctctcccgcgccttcgccgccgccgccgctgagccgaagcgggtgctcgtgccggtcgcggacggcacggagccggtggaggcggccgccaccgccgacgtgctcaaccgcgccggcgcgcgggtcaccgtcgccacggctgaccccgcgggcgacgaccgtggcctcctggtggaggccgcgttcggggtcaagctcgtcgccgacggccgcgtcgccgacctggaaggcgaggcctttgacctcatcgccctacccggaggaatgccgggatcagctaacctcagagattgcaaggtgctggagaagatggtcaagaagcaggcagagcagggtggcctctacgccgccatctgcgccacgccggcggtgacgctggctcactggggcttgctcaaaggcttaaaggcgacttgctatccatcattcatggagaagttcaccgctgaaattatccctgtgaactctagggtggtggtagatagaaatgcagtgaccagccaagggcccagcaacagcaattgaatatgctctcgctttggtggagcaactgtacggcaaagagaagtcggaggaggttgcaggacccttgtatgttcgtcctcaacctggggttgactatgtcatagatgagttcaattcagttgagtggaaatgcagtggtacacctcaggttcttgtgccagttgctaatggttcggaggaaatggaagctcttaatttaatagatatcttgcgtagagcaggagcaaatgttaccgttgcatcagttgaggataagttgcaagttgtgacccgccgccacaaatttaacctgatagctgatattatggtggaagaagctgccaaaagggaattcgatctgattgtcatgccgggtggtctgccaggtgctcaaaagctttctagtacaaaggtacttgtagatttactaaagaaacaggcagaatctaataaaccatatggtgcaatatgcgcttctcctgcttatgttctcgagccccatggtttactgaaggggaagaaggcaacatcatttccaccaatggcacacctgcttactgatcagagtgcatgtgacagtagggtggttgttgatggtaaccttatcactagcaaagccccaggctccgcgacagagttcgcgctagccattgttgagaagctgtttggtcgagagaaagcggtcagtatagcgaaggagttgatttttatgtgattatacacttgggcatttatgcatcaggtgcctgtcacctgtgagtgatgcttctgtgaataactacttatgctgctttcctaggaatgcataatataagcctatagcagcatgtggcaatccatgtgaatgaggaataaatgtacattatgagtatcatgtgtaaagagtcgtcgttgtt

SEQ ID NO: 25022 - DNA, 1802 bp, Oryza sativa
  ref <308>: DATABASE ACCESSION NUMBER: AK100464
  ref <309>: DATABASE ENTRY DATE: 2002-08-28
gagatctcatcctcatcatttggttagttggctgactccacacgcctcgccgtctcagtgtcgacagtgtcccctcccctcaatcatttcggtctccattccgagaaaaacaatccactagctcactagcttcgccggcgtacggacgcgcgccgcggggactggaggagcgcgcaaaaatggcggcggcggcggcggtggctgacgaagtcaccgtgctccacggcggggtcgtcgtcagcatggacggcggcttccgcgtcttccaggacggcgccgtcgccgtcgccggggaccgcatcgccgccgtgggaccgtccgccgacgtcctctcgtccttccccggggccgcggcgacagtcgacctcgccggccgcatcctcctccccgggttcgtcaacacgcacgtgcacacgtcgcagcagctggcgcgggggatcgccgacgacgtcgacctgatggcgtggctgcacgggaggatctggccatacgagtcccacatgacggaggaggactcctacgcctccaccctcctctgcggcatcgagctcattcgatccggggtaacatgctttgcggaagcaggtgggcagtatgtttcagaaatggcacgtgcagtagagttgctgggattgcgtgcatgcttgacaaaatcaataatggattgtggtgatgggttacctccaaactggagctcttgttcaactgatgattgcattcagtcgcagaaagatctatacgaaaagcatcacaacacagctgatgggcgtatcaggatatggtttgggttgagacagatcatgaatgcaacggatcgtttactgcttgaaacaagagatgctgcacagaaactgaatactggaatccacatgcatattgcagaaataccctatgaaaatgagctggtaatgcagactaagggaattgatcatgggacagtgacatatttagagaaaattgattttctgaggagcaatttgctggctgctcattctgtttggttgaataagcctgagattgggcactttttaaaggctgatgttaaggtttctcactgccccgcatctgctatgaggatgttggggtttgctccaattagagaaatgctggattctggtgtttgtgtctctcttggtacagatggagcgccaagcaataacaggatgagcattgttgatgagatgtacctagcctgtcttattaacaaagggcgtgaggcgtacatcactggtacaacgaacccaactgctcttcctgcagagactgtattgaagatggctactattaatggtgcaaaagcagttctgtgggacgatgaaataggttcgctggaggttgggaagaaggcggacatggttgttgtgaatccacttatatggtccatggtcccagtgcatgactgcattgccaacatagtttactgcatgagaacagaaaatattgaatctgtaatgtgcaacggtcgatggattatgagggaaaagaagatcgtgaatttgaatgaggaggaggtaattgcttcagctgaaaaaatagcaagggaccttctagcgcgagctggcatcaacctacccaatcggatgaactacttgtgaatttgtgatgatcgtcttgcattttgttcatgtgccactgcttgaatctgtccagtattctgcacggattgtatgataatctcctggccaggggtggtggtacctcaacatgtaaagtaaataagaaatttgctgcagcagtgttataattgcaaatccccccagcggtacagccagactgacaaaagtataattggtttcctctcc

SEQ ID NO: 25023 - DNA, 1705 bp, Oryza sativa
  ref <308>: DATABASE ACCESSION NUMBER: AK100465
  ref <309>: DATABASE ENTRY DATE: 2002-08-28
tgacgccgcacccgctttcctgtctcgaacgtacacacacgcatcccaaatggcccacgtcatggccgcctccgagctcgtcaccgccaccatcaagcgccccttccagaacgacgacgacaacagcagcaacggcaacggcaacgccgacgggaagcccaaggcgcggcgccgggaggccgacccggcggcggcgctggccgcggcgcgccacgagttcggcgagcacggcggggtgaacatgtccatcgaggcgtcggcgacgttcacggtgatggagccggacaccatgcgccgcctcttctccggggagctcggcccggagcgcggcgacctgtacatctacagccgccacttcaacccgacggtgctggcgctggggcggcagatggcggcgctggagggcaccgaggccgcgtactgcacggcgtccgggatgtccgccatctcctccgtgctgatgcagctcgtcggcgcgggggggcacgtggtggcgtcgcggtgcctgtacggcggcacgcacgcgctgctgtcccggttcctgccgcgcgcgtccggggtgcgcgcaacgttcgtggacgctgacgacgaggcggcggtgcgcgccgcggtgcgcccgggggagacgcgggtggtgtacgtggagacgatgtcgaacccgacgctggccgtggccgacatcccgatgctggcccgcgtcgcgcacgacgccggcgccaagctggtggtggacaacacgttcacgcccatggtcgtctcgccggcccgcctcggcgccgacgtcgtcgtccacagcgtctccaagttcatcagcggcggcgccgacatcatcgcaggggcgatctgtgggccggcgagcctggtgaacgcgatgatggaccctgcaggagggggccctgatgctgctgggcccgacgatgaacgccaaggtggccttcgagctctcggagcgcctcccgcacctcccgctccggatgcaggagcactcgcggcgcgccgccgagtacgcgtcccggatgcgccgcctcggcctccgcgtcgcctacccgggcctccccgaccacccgcaccacgcccgcctcctcgccatcgccaacccgggctacggcgccggcggcatgctctgcgtcgacatgggcaccgaggaccgcgccaaccgcctcatgcaccacctccagaacaccacccgcttcggcctcatggccgtcagcctcggctactacgagaccctcatgtcgtgctccggcagcagcaccagcagcgagatgccgcccgaggaccgcgctcgcgccggcatctcccccggcctcgtccgcatgtccgtcgggtacaacggcacgctcgagcagcggtgggcgcagttcgagcgcgcgctctcgctcatgcagcagcagcagcagcagcatcccgaccgcgacgccgccgccaagtactgcaaggtgtgacgtcacgagccccgccattgatggtgcgcattagcgacgatccgatttgttgtatctgccccgtgttgctggtttgtatatatagtttattatgtaattactagtgctacctataagtaaggtttaagctgttaaactgagtactatctgatcgctctggttcagatagttgaatggcacagctaagctgcttgttctctgggaaactgagtgtattggaataagctggtgaaatgttatatggacaatgtttctgcagc

SEQ ID NO: 25024 - DNA, 2803 bp, Oryza sativa
  ref <308>: DATABASE ACCESSION NUMBER: AK100466
  ref <309>: DATABASE ENTRY DATE: 2002-08-28
gagaactccaataccccatcgagccccggaatagtactccgcccgccttgcggaaacaaatcgaagaagaagaaggaagacgcagccgcgtgcccccccatccatggatctggagatcgtgggccggcacgcgctgctgttcgacgacgacccgacggcggaggtcgtcaactccggcggctccctcgtcccctgggccgccgtcggcgcggacgacctcctcctcgaccgccacgacgtccggcacctgctcgaccgcgtgcctcctcgcccccgccgctcctactccgcggccctcctctctgccccctctctggatggcgtctccgaggctgagctcgaccgcgagcgcttcctcgacctcaccgccgacgatttcggcggcgagggctctcaagatgcggtctcttcaggaaatgggacagatacaggttgggctgattataattctgtccctttctcatatgggagtactgctggttcagatgatccaaataatttgagcacatattattgcccatcttttcccgtgcctgacagattgttgaataagctgcctccttctgagaaggttcatcaaattattgcaagaactgctctatttgtcagtgagcatgggggccagtcagagattgtgttaagggtgaaacagggtagtaatccaacatttggtttcttgatgcctgaccatcatctccacagctacttccggtaccttgtagatcatcctcagttgttgaaagatggtctagatgctgattcaaacaagggctgcaaaactgccaatagtgagagtgggcatgatgcatcatcaggcggggctttgtcattgcttggggctgtctatgagtctggagatgaggatgaaggcatgcttccgcctagtccaaaaagcacggttcctggaaaagacgtggttgtgcatgagcaaggtcatgaaagctctgtatctgctatacattgcaacgaagaaacacgggatggtcagaaagcaacggcagcagctactgttgcagctaaagataaatctattttgactaagaagaacccaatgattactggcagcagccttcttgctgctcgcctagagaaggccaaagatgccatgatggcatcaagtacgtcagatgtttctgacacaaaagttgtgattctggaaccaccatctttcttgaagcgtacaatggagaaaatagttgaatttattatcaggaatgggaaagagtttgaaggaaaactcattgagcaagacagaacaacaggaaggtttccatttcttctgccatctaatccatatcacccgtattatctgaagcttctcgaggaaactcaagagtccaagtcccgtggtggttcttcagagcccaaagacagaaaaagctcttcagagcacaaagaccgaagaagctcttcagagcagaaagacagaagaagcccttcagagcgcaaaggtagtaatcatggtaagggagaaagtaaaagcaagaaacggtcaagtactagcaaggatgccagttctcctgatagaagctctgctgagccgtcagagaagcagctctatgacaaacacaaacaagggaagggaaagttccacatgatcattagtggggccaagaaggaacctcctcggaatgtcactgcagatgaagctgctgctattgttatggcagctactcgtggatttggccctgccaatattcaaacaaacacactgaaggacactagtggaattggtcagacccgtggagataatggacatacttcaagctttggaagtttctcctctttacaggacccagatgtaccatccaaacctgtttcaaatagtgaggcatgtacctcactcacaagtagtggtcagcctaaaaatgaaggcactggaataattgatgatgattggattgcaaacactatcgcaaaagctgctgctgttgcagcctctaaagaagctgattcttctgaagcatcaatgacaaaagagcagaagctgaaggctgagaggcttagacgtgcaaagatgtttacctctattattaagagtggtggcagcaagatggctgatttgtcaacttcagctgatcaaactaatgaagctggaagggcctctcctggtgatttgaacttatctgagtctgatccacaaccatcagctaaggaacgtgaaggtagctctgtgccatttgaacgtgaaggctctaatctggccaagcaggagaaagactctgatgacgaacggaacagggcaaggaagtataggaaaaaacatcacccagaatctgacgaggagaactatggttcagaggagagctataaacactctaggaagaagcaccgttcagaggattcaagagctcatactagtgatgttcacaaacataagctcaagagacactccaaggatctggaacccaggcatcataggcaccgtgatagctcttcagaagatgagcatgagcacaggagctccaagtcaaggcatcgtcacagggatgactatcactatcacgaggatgatgagcataggagttcacatagacaccagagggaccaccgttccagttcaaaaaggaaaaaggacgatgaccgagataagagcaaacaaactatagttctcccagaagtctcccagaaccaggaaaagccccctggtgacactgctcaatcctcccaggcaacaactgaagtgccgagtgagttgagagcaaaaatcagagcaatgttgctagaaacactgtaaatctgtaataccctgtggggattatgctgtacaatgggataatgtagccaactctccttgttcagc

SEQ ID NO: 25025 - DNA, 2535 bp, Oryza sativa
  ref <308>: DATABASE ACCESSION NUMBER: AK100467
  ref <309>: DATABASE ENTRY DATE: 2002-08-28
actgcaaacctgttgcgtgcaacaaaaacagctgacccaccagctcccttctttgcctcctgcaaataatcagtcctgccagcagaatccttcggaactatatagagttcataggagcctccatccacatcagagcaaatcaggacggcattttcagttggactatacgacagtgtcctgggtgactgattcaagctgaccgatccaggtcttcttattggagccaactgaacctccttctgtgtggagtattcaaagaaccgaagaaaacggtccttcacatagaagacagtatcaccactcacagagaaagctggacgttccctctctaatttaaacacaatcataccattgtcatgaccagcggcaagaagattcatctcagggtgggcagcaagaatccagaaacgatcatgttcccgcctgaatgtttgaataccagttcgcttggtggcatcccagacacgaatgcttttgtcctctgagttggacacaatgatgtcttgctttgcatggaacatcacgcaggacacattattcatgtgcccccgcaaagtatcaacttcccaagccttggtgtcattcattctccatagcttcacttgccggtcatctgccccagaaacaatgagcggcaatgtggggtgaaatgacgcccagttcaccccacggtcatgcccttccaacacatattttacaactgcatcaacacctccaaacagatcagtgttcatctgggtgaggcgcaggatgtcatccgcaggtgacaccgtcttcttcctcaaagcaccaatatcccatacacggacagtctgatccagtgatgcggacacaaccagatcctccttgggatggaatgatgcgcacatgacatagtggttatgtccagtcagcacagccacacatgtgcgtgactgccagttccatatccggattgtctggtcatcactagcacttactatccatgggtactcgtggtggaattgcacggtgcgaatgtagtcaaggtgcccatgaagtgtgaagaggcagcggtgtgtcttgtaattccacaccttaatcttgtaatcatcacctccggagacgaagagcggctgggtggcgtggaagtggacgccgcggacggggccgtcgtgctcgtcgaagcggtcgaggagggtgcccatgcggtagtcccacatctggatcaccccgctgtggaggctggccaggatccatggccgccgcgggtggaagctcagccccttcacccggttgctcttcgtctcgaacttggtcagcatcttcgctagccgtcccccagcggcggcggcggcggcagcggcaggcgaaacccctagccgctgaggcgagcggaggagggagagagagagagagagagagagagagagagagagagcagcggaggagatggcggcggcggcggcggcggcgaccatagggatgatggacagcgcgtacttcgtcgggaggggggagatcctcagctggatcaatgccaccctccagctctccctcgccaaggtcgaggaggcggcgtcaggggcggtgcagtgccagttgatggatatggttcaccctggggtggtgccaatgcacaaggtgaattttgatgctaagaccgagtatgacatgatccagaactacaagattcttcaagatgtgttcaacaagctgcggttgagcaagaatattgaggtcaacaagcttgtcaagggacgtccattggataacctggagtttctgcaatggttgaaaagatattgtgattctgtaaatggtggaatcatgaatgaaaactacaatcctgtagagaggaggtctaagggttgcaaagaacgcagtctcaaaggttccaacaagtcgtccaaatcactacaagctaatagattgtctagtgcaaattcagctgatggaggtccatgcgttggtaaagtcaatgttatctctgaagagcattacatagaacagattcagcaattatctgagaagattgcaggcctgaaaatttctatggatagcgcggagaaagaaagagacttctacttttctaagctgcgcgacattgagatactgtgtcaaagaccagagttggagcatcttccgatgaccaaggctgtacagaagatactttatgcggctgatgcaagagattcgccattgcctgaggctaatgaaataatcacccggtcaccaagcatgttcccagatgaagcctagggagaaatggcatcaatacactcttaagctatatttagataattttgtggctatcctattttgtcgaatcgttgtaaatgagtaaataacgcttgacattagctacttgtggcaagtccaccgaagatatcttcggttctgacttgaatgtcaacttcctagaactagttgtgaactgaatatgcattagcaatgctcttctctcgtttctgatctccttggagatattttatggcattcgacagctcgtaacttgctttttttctggaatggttatgttggattatttatcttgatgctccacgtttgattttc

SEQ ID NO: 25026 - DNA, 1751 bp, Oryza sativa
  ref <308>: DATABASE ACCESSION NUMBER: AK100468
  ref <309>: DATABASE ENTRY DATE: 2002-08-28
gtctccccttccaccgaaaccctagggatggcgtcgccggcgtctcggtgcgtcctgctggatccaggtgtgcccgactacgtgttctccatcggtccaacagaacaagggtgggcgtctatcgacttgaagaagaagaggtaccaagggtgcgggaggtacggccccttgttggcggagagcgtgaagctctatgtgcgcctcgccgaggagcacccggctctctctcggttggccatctgcgccgacaagaatatcatccgcaacatcgtggcggaagaactcaagaagaagaaagcttccaaggccgccgaatcttcatcccccggcctcatggtgccggatctggcgattcgcgccatcgagttcgacaagatcgatgagatctcaggtgtcactgcccgcgtcgaggtcgcagacaagaacctcatggtcctctccctgtccttcgtcttcacatctagcaagcactacctcctctatgatgccattcacgcatccatgtccatgatccccatcccgaattggtgctgcgatatctacttaccgtcgaaccctctccctgtgcggtacggtgatgagtacgccctagtcctctttgccaagaactatccctacaagagagaaggacgatccacctgcattgacttgctctacctgtggacgcctccaaagtcgtcgtcgcctccaacgttgctgccaccgccgccaccgccgccgcgagagaagatgtacccgaatccctccggtgaaccgtggcacaccaggaaaccgcgcttctcgaaggagacgccagcgtccttctgccaccacgtcaagttcacatccagtagccatgctttctgggctgatctcaccaagggcgtcctgtgctgccgcatcaaggacctcttggacagcttcttcgtccattttgacttcattgagttgccccctgggtgcaagtctgacgcccttgatgacaccgatactgggccagcggagatgttccgaaccatgggctgcagcactggggacttgatcaagtttgtctccatctccttcgatgattctgtgccggaggacgacaagacggtgacggagtggacactggacatgggtaccttgcagtggaccaagggcgaggagctgcgcttcggaactctgtgggaactggatgacttcaagaaggatggattaccggagaccgagccagtgtaccccctgctgagcatggaggaaggcgatggtggagacctttacttcatactgtccaggccaatcatgcggtgggaggaccctgcggtgcaccacgtctgccgattcaacatgacaagcaagaagcttgtgtccaaccctctttcctggcgcccagataagattgttccttctggtttgttgggctgtgaattcttcagacaccttgatagtcagcgccttgttcctgacaataggaagatggatgcgggcaaagtgcaatcctgggtcgagatggagtcagcattggaggaagttgatgaaagcatgcagagagagatatcacggaagcaaatggtgtggtccgggagccagctagattgttttgccaggcaaattagggagatcaaatgctgattagggagatcggactctgaattccatcattcgatgttcacaagctgggttctttaatacttctgtttattggtaccagtatgtttttgcttgtcgatctcacaaccttatgtatgcactgaagtaatttgaatttatcttgggtgaactgcttttgc

SEQ ID NO: 25027 - DNA, 2609 bp, Oryza sativa
  ref <308>: DATABASE ACCESSION NUMBER: AK100469
  ref <309>: DATABASE ENTRY DATE: 2002-08-28
ggccggccgcacaccacgctgatattcccgtgcgccgccacgatgcgcaacggcaggccctctcccagtcgcaggccacagccgcaaggcaagccccagatcgggtgtggcatccccccacgtcgtcgcggtaaccttctcttcacctgcgatcggccaacggcgccgtccccgcctgcaccggcgagcggcgagcggcgaccgtagcctgggccctgaggagatgagggtgaggctccaccgccactggatctgatctgccaccttccacctgcgagcggtttagtggatgttgtcaaaatcaattcaccgaagcatacttcgctgtggactgagcatcggttggatcaaccctcttgcggaacagaaccttgggtctatttgggtgcttcttagcttcattttcccaaatttctattgtttctatattgaccatagaatcaagagcaacttcctcaaggtaatcatggtactcaatcttgatttcagaaagaccaactagatccttgcagagcaattggagtgacaggagatgtggcaaagctcctttttcaactgtagggagattgggattttgcaccacaaggcataagtgtcgcatacgtgggaagtcaccattttttatgataaagccctgaaggtcagattcaaccagtttcagataaagcaagtggtgcaatgtgcaaacgtttgatagatcctccttattcagatttgttgatgaaaggcacagctctgtgagaccacacagtgatgtgatgaactgtggaaaccggctcaactcgccctgcagtttcaaggagctgagataaccatacgacttctccagacaacacagtagacggttaggaaattttctggatcgaagtgacagagaatgagcaccagtagtgtccatgccagcctgagtaaacttctgaatagccgctgaaattaagctgatactgctattacgttcagctgcgggctcgcaccatatcttgacctttcttagtttattcatatgaaccatcaggcgaggaaacaaagagttcttgtctacaacaaaacctgctagagtttgcaatttacttttatctgataatatcttctctattttattcgtttcaaggacccaaaggccccttgcttccctaatcttaatctttccaaacaggtgagctagatgtggcattataatgatttccacaggcaatgtgtttatccttgtcttcctcaggccgagtgtctgtaagcaatgcagccctttattgatttttctcggaatatatgtaatggtgctcccaaggccaaggtattttagatgcaacagcttgtatatgtacttgacatgatcgtccttgagatcatcacattcttctagatccaagaccctcaacagctcacacttggcataatctaaagcgaattcccctgcatttccaaagatcgtcagagacctggcacgaggttgcttaccctttggattagttccacaatccatgtatgattgatttccacttgtaaggctctgggttaagaagaggtggcggcatttgcttcgatctgggtcatggagggatgcaatggaattatcacacctggacttgtgcagcatgaattcgtgcatgataccgtgagccctgcagttcttcgcccttccattgttggtaacatccatcgacctgatgatatttcggtccattagctcctccaagtttgcatctgcaacctccagtgaactgcgaggatattggcattgtacatagccttcagctaaccatcgcctgatcagactgctccttctgatggaacagccattggggaacacagtcgtgtacagtaagcaggtcttgaggggatggccaggcagagtgttgtagttgttcgcaagaacttgtcgcagttctgcaaaggcgtgctccttctcaatgtgatgacctaggttgcagcagacttgatttcggtaacattcagtgatcctttctcgccatagaaagtttcccacactaaccagagcaagcgggaggccgtcgcatttctccagaatcgatggcaagtccaactccaactcaggagagtattcctttaggacagattgcagcaaatccttggaatggttcacattcagagttctcatattgtacacagaaccggtaccatggctgcaggcatttgcaactggtttaatagtcgttgtcactagtactctgcttcttgtttctgtagggaaggttgattttatacagttccactgcttctcctcaatatcatcaaacacgagaaggtacctagcaggtataatggaaatacagaagtgaatttaattcattgggagaaataacggttgtcaagagcatttttcaggacaagcaaactagctaattgttgttaatgatccaaaataagccttttttgtgtcggacaaagtgtgaagcagtcaataacttaagttttaacaggtaagttgtacttgtacatgcagttcagatagttcgctatatacggtgaatccaatttcaaagaagaagaaaaaagtgtaactgtaaatgcgaacacatgctacgaaattgtaagatagaactgatttcatctgaaggaaattaaattgctgggaaatgagctgaagc

SEQ ID NO: 25028 - DNA, 1833 bp, Oryza sativa
  ref <308>: DATABASE ACCESSION NUMBER: AK100470
  ref <309>: DATABASE ENTRY DATE: 2002-08-28
gcttttcacctccccacgcccgaatcgacgaggcaccgaaaaaaagaaaaaaaaacacacaaaaaataaagaagggagaacgaagccgaccacccccatcggttccccttcctcctcgcagatctccgacgccggccggccaccgccatgaactcctactccggcgaccgctcctcctcctcctcctcctcccgccccaccaccacctccttcgactcctaccagttcgacttcggcgtcaactcgtcccgctcctctgcgtcccgccccctcagaccggggcccggggccaccgcggggggcgctgccgccggcggtgtaggcgtcggcggcagcgcgtggacgcaccagccggctaagacgacgtcgtggacccaccagccatcgcccgcctccgcggcggcgggggctggatccgggcccacgtccatggtcggcgacatcttcggccggagctggtcctccgccgcgccgtcctccggcctcggcatcccgcaggccaacaaccccggcctcttcagcgacctcctcggctccgcgctcgggtcgtcctcccgcggccagcccaacgcgccgctcagatcttcggcgccgcagacctacaagccggccaacgccaacccaaaccctagcggctctccgttctcgatgggcggcatggcgagcacgctcccgaagacgaccaccgggtcgccgatgtcctccggtggtggcgggtatggtgttggtggccgtccgatgaagccggcgggcatggcgtcggcggccgcggcacagccgatgatggggcagaagaaggatccgttcggttcaatagaccccttcgctgcgaagcccggttctatgaatgctgcaaagaaggctaatcccgtcaagccggatcaaggttttggggcgttccaaggcgtgaattcaggtggcattgcaggattatcgggcttccagaccgctgacagtggatttggtagcttccagagttccggtgctgtgaaaccttccagctttactccactggcaccagctccagcgcctgctcctgcggctgctgcagcgaactccggtgtagatcacttggactcgctgtttgcttcgacaacagctgctccgactgcggtgagtaatggtggtggggggggtgacatgtttggtgagatggatggctgggtggatgtggaggcagattttggtagtggtgacagcggtggcgcaaccacagagttggagggactcccaccgccaccgtctgggttgacagcatctgctgctaagtccaaagggatggataattacaagggtgggcagtatgctgatgcgatcaagtggctgtcatgggccgttgtactcattgagaagtctgggaagtatgctgacattgtagaggtgctgtcatcaagggcttcatcttacaaggaggttggggagtacaagaaggcaattgccgactgttcgaaggtactagagaaagataaggataatgtttcggtgcttgtccaacgtgcccttctatatgagagctctgagaaatacaggcttggtgcagaggacctccgtttggttctgaaaattgacccagggaataggcttgcgaggagtatgatccatcgcctgaacaagatggctgactagaggtgttttgctagtgcattgtgtacaaccactgtaatccaccttgacacgagaactgtgagttattttgaattgatttactatacttgtgcctttgggggaataatttgccgatgtgttgttataaaccgtgggattacatctttacctacagtatattcttttatttgtataatcatataatgtatcaagcttgctttaagaatt

SEQ ID NO: 25029 - DNA, 2145 bp, Oryza sativa
  ref <308>: DATABASE ACCESSION NUMBER: AK100471
  ref <309>: DATABASE ENTRY DATE: 2002-08-28
gatggcgtccgcgtccggctcggccaccctcctctaccccaaaaccccgcaatcccctcgcctcctccgccgcaacccccactactccggcctccgcctcgtccaccccctcctcctcgccaccgtctccccgccgcctcccgccgccctccgacgcaggcgcaactccaccaccatccatgcatcctcctcctccgccgccgccgccgccgccgccgcttccttccccgcctcctcgaccccgcctccgcgcccgccgcggacggacccgcccgaggaacaccccaccgtggcccgcgcaggccgcagcaagaagcacaggaagccctcggggggacgcatcgagggcggcggcgacgtgcggcgcgaggccaagtcccgcgcccgcatccgcagccgccgcctcggcgagaacgccttctaccggaggaagcggcgcgccgccaaggagaaccaggccgacgccttcaccgacgccgagctggagatgatcggcctcggctacgaccgctccgtccgcttcatggacgggcccgacgacccgcgcctccgccaccggcacgactggtacaggttcggccgctacgggccctactcctggcgcggcatcgtcgtcggcccgcccatccgcggccgcttctccgacgaccgcgtctccctcatgtccgaggtctccgaccacgacgagtgggaccgcgtcgagcagttcgacatgtccaaccagttctccaaccgcctcaacgagctcgacgccgccgtcggcttccggtactactgggtcttcgtgagacaccctaggtggcgccccgacgagctcccctgggagcagtggacgctctccgcggaggtggccatccaggccagcgaggagcagcggcttgacaaatggaacctcatggggaggcttggcaacccaacgcgtgagctgatcacacggtgcgcggcatggacgcgcccagacatcatatatgtcaagcggccgctctaccagtcgcggttcgagccgcagaagaatttctatagccagctccgccctttggtcgatcccgtgacagagaaccagttcttgtttgatctcgagcatgatggccaggtcattcgcactacctacttcggtggcctatgcaggattgtgaaggcgagtccaaaagcttatgtggatgatgttgtgaatgcgtactcgaaactgagcgacgtggacaaaaacaggtgcctggagttcctgctcacaaatcatcccatggaactgctccatccctacaccaaggaatggaaggtgaagctagaggagatggagcttggatgcgatgcgcctgatgataacgagagtgacgatgagggtggtgatgagagtggaactgaggttgttgattgggttgaggatgatgggtttgatgagggtggtgataccgatgatgatgaagaacctggttatgatgacgacgaagtaatcgatgtcagggaagaggtggaaacagaagaagtagaaagtgatgatgagagtgagaagtactgggatgagcaatggaagcaggccatgaaaagttctgataaaatggagaagttggtcaagacaagcatcgaagcgtcaaatgagtataacaggcgacggatgcaacaggagaaagagatggaattgagaatggcccgtgcaaacacaatggttatgaagcaggagcagactgaggatgaggatgagcagcaggagcagattgaggatgaggatgagcagcaggagagtccaaggggcagaagcgcaaaagataagcgcaagagcaaggctcctgggcactttctgagggccgctgtccgaccattcacctacaggaatcttgtgaaagaaattgttcttatgaggcatttcattgttgatggagagatagattagctttaaaatgctaagatgatatattttcagagccactagataactgtagagatggcagaaacaggtacctgcaattcctcaattgtgttcaattagtggatcttaccaattttgatctgtgcccttagggaatagtcagtcatgatgtaatccttcctttgtggaattttcagtaaattttcgagaatagaagcaactacggtatctctgaattctgttatactgttttatagtcaagttggagtttggctcaattc

SEQ ID NO: 25030 - DNA, 1458 bp, Oryza sativa
  ref <308>: DATABASE ACCESSION NUMBER: AK100472
  ref <309>: DATABASE ENTRY DATE: 2002-08-28
gaacttgggcgatcttggtcgccgtcgtcgtcgtcgtcgtcgtcgtcgtggaggcggttcttggcggaggaggagtcacacaggagtgggtgagagagggggtacatgaggaggtggggtgaggggggagggaggaggaaagctggggaaggagttgggcttgctggggtgcgtcaatgaggtggtggcggcggtggcggcgtcgtggggcgcgatgagcgacggggcgcgcgtggaggcggcgccgcggctcgcgcaatggcgcgtcgacgtgctcccctgctacacctaccgcaagtccgagcccttccgcatcggcctctggaactggtacctatctgtggagagaaataacaagcaaacttgtgttaaggtctttgcggagttatcgaattctgccaagaatacaaccccagcccctattgcttccttcatcacaaaacttctcatatcttttcctccaaatcagaagaccatagttcatccaggaatttttgacaagccgctgaaacacgaaggttttgtgtgggcaattgatagtactgttacaggaagatttgtgattgagatagagtttcttgacctgaaaattgcagatccatctggtggtgaaccagcctcaatttgggcttcccaccaaatcaagaaatcttcagacaacactgcactgtcatccttggcgagaatgctgcaagaaggcatcctcaccgacatcacaatcaacgctaccgacggcagcattatggcccaccgtgcaatcctggccagccgttcccctgtcttcaggagcatgttctcgcacgacctcaaggagaaagaactctcaacagttgacatctctgacatgtcccttgaagcatgccaggccttcctcaactacatttatggtgacctacgcagcgaagagttcctcacccacaggttagctcttctcagagctgccgataagtatgacatctctgatcttaaggaggcatgccatgagagcctgttagaggacatcgacacgaagaatgtgctcgagaggcttcagatggcgcacttgtaccgattgcaaaagctcaaggatggctgcttgagatttctggtagatttcagaaaggtgtatgaaatgcatgacgatttcaaggtgttcctccagacagcagacagggatatcatagctgaaatcttccaaggtattcttacaacatggagtgggcgataagcatgtttatacggtatatctggtttggttcagaagcattctttccagaattgttgctggtaaagcatgtaaatatatagtactacattttacatgccatcaaattggctctaaatttaatgtatatataccttgattggattttgtacatatcatatatgtaaatctaattcttgtatccgactccacgtattgtaacaattctgctgatctggaagaaaatattacttcagatttccattttgtaatgc

SEQ ID NO: 25031 - DNA, 2914 bp, Oryza sativa
  ref <308>: DATABASE ACCESSION NUMBER: AK100473
  ref <309>: DATABASE ENTRY DATE: 2002-08-28
gctcactccccgccgccgccgccgccgctccatcctcctcacggagaagcgcgggaaatcacacctcgtcgcagccaagatctcctccagtccaaacgcatcaaagattccaagatgtgctctggagatgatattgatggagacatgagggttgaagcaacacaacacagggatataaggcgctacaagtgtgaattttgcacggttgttaggtccaaaaaatgtctcatccgagctcacatggttgctcatcataaggaagaactggacaaatcggaaatctacaagtcaaatggggaaaaggttgttcatgaaggtgaccacacctgccaagagtgtggtgcttctttccagaagccagctcatctgaagcagcatatgcaaagtcactctgatgaggttggcatttctcatatgtgcatacaacatgatattgcttttttgttggaatggtgctgggattagtttttttggaaacatttaaacataacattcttgtatggtttttctccgtccgctgatctggttgtcaaagaaattgttcttatctacttcaatttgctaaaaacaagtgttttgcaggatatagattcttaactgtgtgaagcattggatcccaaagaactccaaaatgcgatgaggcatatttaatcttgtctggactagtaacaggttgggatgaccacctgtgaagctccaacaggattgcctcctcacgctctttcaggaggtttgtccttgcttgtattagttcttttcttttttactattttgattattattcaacttcatgggatagcctgcatctccttgtttccaattaagtactaatgtctcctttgttgtatgcacatgtgctggaattcattgtttatcaatttgccttgtggtatgctatacatgatatctttaatttttattagtaacaaggttttttacagcatacatatacataaatagtgtttttttacagcatgcataaatggtgaaaactgattactgcttaattattgactagttgctggctattttacatttttttgatattgcaaatcttgtgaaatggatccatgcagtgaatttgggaggttatcttctcctttgttctaatgttctctctcactctctttgggcttctggaacctggttttggaggtccttagttggaacaaagaggggatccaagatcaaaataccatctcagaaagctagggccttctgtaataggttcatttagctcgctatggtgttgatatctccatcatatacaaaactacaatatgttccgttgcaaattatatatgaattgttttagctgataaacacctgtgcacaactttttgctgataaatagtactacttcttataacctgaaacggagggagtaggcattgaatagaataggttatggatcctttggagaataaggttagcaaatatccttcattcatcctactatttctttggatctccttttgggagctttgagaagaggtgagaggatccaacatcaaaatgtcacctcagaaagctaggactattcatcattggttctcagctcgctatggtgattatactcccttttatctctatcatcttaatggaaaacactgaacatttaggtattcgttgcatattccgttaaccagtttactagataatttattttagataatttataagtatgaaagaaatgtgtaagcttacagcagcttcagttttgactcgttcccttcttgactgtagagatcgttcatttgcccacttgaagactgccctttcagctacattaggaaagatcacttgaaccgtcatatgcttaagcatcaagggaagttgtttacctgctctatggatggttgtggtaggaagttcagtataaaggcaaatatgcaaaggcatgtaaaggaaatccatgaggatgaaactgctactaaaagcaaccggcagtttgtttgcaaggaggagggctgtaacaaggttttcaagtatgcttcaaagatgaagaaacatgaagaatcacatgtgaaattggactacgtggaagtagtctgctgtgaaccaggctgcatgaagacattcacaaatgttgaatgtttgagggctcataatcaggcttgccatcaatatgttcagtgtgatatctgtggggaaaaacacctgaagaagaacattaaaaggcacctacgagcccatgaggaggtgccatctactgaaaggataaaatgcagttttgagggctgtgaatgctctttttccaataaatcaaatttaaccaaacatataaaggcgtcccatgatcaagtaaaacctttcgcatgtcgattcacggggtgtgaaaaggtgtttccatacaagcatgtcagggacaaccatgagaaatccagcgctcatgtatacactcaggcaaacttcacggagatggacgagcagttactctcgtgtccgagaggtggacggaagaggaaagctgtgactgtcgaaactcttacgcgcaagagggtgaccatgcacggcgacgcttcgtcgttggacaatggaactgagtacctgcgctggttgctttctggtggggatgatgattcgagccaaactcattagccgtatcatctttgcatctgattgtgatggtcatggtgtcaatggctcaatgctttgtcgtaaaggggtgtgctagcccactcacgttggtagttagatggccgtggtgtttttgttgtaagtagttggtctgaatttagaaagtgcagcagttttagaggaagcctactagtagtatatatttgtagcataatggcgcagtttgagttgtgagttgtaagtattttgattctttactgttttgaccactgttcttggaacctcaaaattatttgacttgttgaatgcaaaaaatgatgtgattacaagtttt

SEQ ID NO: 25032 - DNA, 2173 bp, Oryza sativa
  ref <308>: DATABASE ACCESSION NUMBER: AK100474
  ref <309>: DATABASE ENTRY DATE: 2002-08-28
gacgcgcgcggcgcgaggaggcgggggagggcgaggcgacgcgcgggaaaaggggggaggaggctggagggagcaaagcatccatctgcggcgtcggcgtcggcgtcggcgacgccatgggtggctgctcctccgccttcgcggtttccaccaggatgatccgcttcagccgcggccgcgtgccggcggccatcctccccgtcaccagcaacgacgagccctgctgcagctgctcccctgaaaacaacaacaaaaacaacgacggcggcggaggcggatgcgacggcggcgagcaccagaaggggaagtcgtggaggaggtggcagtacaggagatgcggcggcggtggcggtggcgggggcgggaggaagaacgccatcctcggggacgcggccgacgtgaagacggcggcggggttcgcggagaggtacaggctgggggcggagctggggcgcggggagttcggggtgacgcgaacgatgctccgacgcggccaccggggaggccctggcctgcaagacgatccgccggaagcggctgcgccggtgccgcggcgacgccgaggacgtgcggcgggaggtggagatcctccgccgcatctccgccctcggcgccggcgccgactccgtggtgcgactccgcgacgcctgcgaggactccgacggcgtccacctcgtcatggagctctgcgagggcggcgagctcttcgaccgcatcttcgcccgcggccactacaccgagcgcgccgccgccaagctcgcccgcaccatcgtcggcgtcgtccagctgtgccacgagaacggggtgatgcacagagacctgaagccggagaacttcctgttcgccaacaagtcggaggactcacctctcaaggccatcgatttcggcctctcggtgttcttcaagccaggagaaagattcacccaggtggttgggagcacatactacatggcaccagaggttctcaacagaagctatggcccagaagcagatgtctggagcgccggcgtcatcctctacatcctgctctgcggagttcctcctttctggggagacaatgatgagaaaacggtgacggcgatactccagggtgggatcaacttccagagggagccatggcccaaggtgtccccgcatgcaaaggaccttgtcagcaagatgcttgaccccgatccttctacccggttgacagcaaaggaagtccttgagcatccttggctcaagaatgccgatagggctccaaacgtttcgctcggagagattgttcgatccagactgatgcaattctcagccatgaataagttcaaaaagaaggcacttggagtcgttgccaagaatttaccggtggaggagatggataaatatactcagatgttccacaagatggacaaagacaacagcggtaatttgacgcttgaggatctgaagttgggcctccagataaatggtcatcctgttccagagacagagatcgaaatgctgttagaagctggtgacatagatggaaatggaacattagattgcgaggagtttgtaacggtattacttcacatatagaagatgagtaatgaggagtacctacctaaagctttcaagttcttcgacaaagatggtaatggtttcattgaaatggaggagttgatggatgctttaggtgatgaactgggccctactgagcaagtggttaaagatattattcgagacattgacactgataaggatggtcgcattagctatcaggagtttgaatcaatgatgatatctggatcagactggagaaatgcttcccgacgatactcaaaagcaaatttcagctccctcagtcgtaagctgtgcaaaggaaattcatgaaacagaggaggatctgagcaacagttacttactgagtgcatcaagcaatcaactaaaaacaaagcatcagtggacagcctaaaatataaaaccagattactgggtagaggacatcagcagggtgaaaggagattttgtatctcagttgcatagatgacaaggttcatcaagcagcgagccctatagcatcgtcccttgtaatggaatcaagacattccatatctaggatatatattcatgacttagcataggcacatgtaagggaagcgccgacatgcaatccacttaccaaatgttgatgttttactactttgccaaattt

SEQ ID NO: 25033 - DNA, 3462 bp, Oryza sativa
  ref <308>: DATABASE ACCESSION NUMBER: AK100475
  ref <309>: DATABASE ENTRY DATE: 2002-08-28
gagcctctctctctctccccctcccattctgcgcattgctctctgcgcgcggtcgcgtgctgctgctcgcggcgccccggagcgtctcctttgggggagaggagaggagaggagaggagaggggggtgagccatgatggagtcgggggtcccgccctgcgccgcgtgcggggacgacgcgcacgccgcctgccgcgcctgcagctacgcgctctgcaaggcctgcctcgacgaggacgccgccgagggacgcaccacctgcgcgcgctgcggcggggagtacggcgcgcccgacccagcgcatggccagggggcggtcgtggaggaggaagtggaagagagccacgagccggcggccggcggtgttcgcgagagggtcaccatggccagccaactcagcgatcaccaggatgaaggagttcatgccaggactatgagcacccatgccaggacaattagcagtgtctctggagttgggagtgaattgaatgatgaatctgggaagcccatctggaagaacagggtggagagctggaaggagaaaaagaaagagaagaaagcctcagcaaagaaagctgcagcaaaagctcaagctccacctgttgaagaacagattatggatgaaaaagacttgacagatgcatatgagccactttctcggatcattcctatatcgaagaacaagctcacaccttacagggcagtaatcattatgcgtctggtagttctggggctcttctttcactaccgtatcaccaaccctgtttacagcgcctttggtctctggatgacatcagtcatatgtgagatctggtttggattctcctggatcctggatcagttccccaagtggtgtcctatcaatcgcgaaacttatgttgataggctgattgcacgatatggagatggagaagattctgggttggcacctgtagatttctttgtcagtacagtggatccattgaaagagcctcctctaatcactgcgaatactgttctgtccatccttgccgtggactatccagttgagaagatttcgtgttacgtgtcagacgatggttcggctatgctcacatttgaatcacttgcggaaacagcagaatttgctaggagatgggttccattttgcaagaagtactccattgagccacgtgcccctgagttctacttctcacagaagattgactacttgaaggacaagatacacccatctttcgtcaaggagcgtcgggctatgaagagggattacgaagaatacaaggtgaggataaatgctttggttgctaaggctcagaagacacctgaggaaggctggattatgcaagatgggacaccatggcctgggaacaaccctcgtgaccaccctggaatgatccaggttttccttggtgagaccggtgctcgggactttgacggaaatgagcttcctcggctagtctatgtttcgagagagaaaagaccagggtaccaacaccacaagaaagcaggggccatgaacgctttggttcgagtatccgcagttctgacaaatgccccttacattcttaatcttgactgtgatcactatgttaacaatagcaaagctgttcgtgaagcgatgtgtttcatgatggacccttctgttggtagagatgtctgctatgtccaattcccacaaaggttcgatggcattgatcgcagcgatcgttatgccaataggaatgttgtgttctttgacgttaacatgaaagggcttgatggcctccaaggtccggtttatgtgggaactggttgttgtttctataggcaagcgctctatggttatggaccaccatcactgcctgcgcttccaaagtcttctgtctgttcatggtgctgctgctgctgtcctaagaaaaaagctgaaaaaagtgagaaagaaatgcatagagactctcgacgtgaagaccttgagtccgccattttcaatcttcgggaaattgacaactatgatgagtatgaacgctcgatgcttatctcccagatgagctttgagaagtcgtttggactgtcatcagtgttcatagaatcaactcttatggagaatggaggcgttcctgagtccgcaaacccatctacactgatcaaagaggccattcatgtcattagctgtggatatgaagagaaaactgaatggggaaaagagattggctggatctacggttcagtcacagaggatatcctgactgggtttaagatgcactgccgtggctggcgatccatctactgcatgccgataagacccgcgttcaagggatcagcgccaatcaacctttctgatcgtctccaccaggttctccggtgggctctcggttccgttgagatcttcctcagccggcactgcccactctggtacggctacggtggtggtcgtctgaaatggctccagagattgtcctacatcaacaccatcgtctacccgttcacctctcttcctcttattgcatactgttgcctgcccgccatttgcctgctcacaggcaaattcatcattcccacgctctccaacgctgcaaccatatggtttcttggcctcttcatctccatcatcgtgacgagcgtcctggagctgcggtggagtggcatcggcatcgaggactggtggcgcaacgagcagttctgggtcatcggtggcgtctccgcccacctcttcgccgtgttccagggtatcctcaagatgattgctgggctggacaccaacttcaccgttacggccaaggcgacggacgacaccgagttcggcgagctgtacgtgttcaagtggacgacggtgctgatcccgccgacctccatcctggtgctcaacctcgtcggcgtggtggccgggttctccgacgcgctcaacagcggctacgagtcctggggcccgctcttcggcaaggtgttcttcgccatgtgggtgatcatgcacttgtaccccttcctcaagggtctcatgggtcgccagaaccggacgcccaccatcgtcgtgctctggtctgtcctgctcgcctccgtcttctccctcctctgggtcaagatcgacccgttcatcggcagctccgagaccaccaccaccaacagctgcgccaacttcgactgctgagcgacatttgtgctccaggagcatcccgtttggcggtgttttgccggtattgcaaatgtgtgtatctaatgcgacgaagacgatgggtggtttcctctctctgggctttgtcctcgatctgagaggtgttgtaggttagtactccgcatgaaaatgttcattgtattgttattgtctgtgatataagaagttttgatgttgaagccgctgaaactatgagagggcaccgttaaatccgtttaatcatacttgtagaaaaaagagggggaaagaaaaggttttcttcggtgaacttgaaattggactactgatcagtttgtaatgttatatgactatatgctactgaatcttatcttatgc

SEQ ID NO: 25034 - DNA, 2540 bp, Oryza sativa
  ref <308>: DATABASE ACCESSION NUMBER: AK100476
  ref <309>: DATABASE ENTRY DATE: 2002-08-28
ggtttggactactccccaccggccagtggccgccgcgccgtcgtccgccgcaccactccatctccgatctccctgagtcgctgggagggctccagcatggtccggcgaggagccacgacccgcggcacatcgacatatcggcggcgggaatggtgtgctttgtcgccgtcgtgggggggcacggcctggaagcggatctccattgccgcagtcgtctccaaggtctcgggcgacaagcgcttcgatctatttgtgaccgagaaattggagctcgaacagccatggcggaacccgtgggcgaacgagcaatgccccccaaccccggcgtcacagcaaggtcctgacgatgttggaaaaccataaatgtagtgcctcagttttatcattgaattggactaatcactaatggggtggggcatcttctgcatgtgatgtttagtttcttcagataactttgctttcatgtttgtttaattttagatttctaggtagtacttcattttgcaaaagatgaaaagattaaacttggtcgaagtcacttggcacaaatgatgctaacaaggggcgcgaggagccagcactgactggaagcaggtctccagtggcacaggcctctacaaggtctccgatggcttgttgagcaatccgaccccaatatcctggagctttctggctgttagcttcccttccatctcagtttaccatgggaagaccttaccttcctagattgtgcactactcatgttgacttcagtattatctcatacatgatcctcttctctctgttgaatacttgaatttggtgatgttcaaattacttcaatattaattaactctgctgatgcctgttagtactgaacaacttatcattttggaaaccatggctgtaatcttctccaaagataaaatttacagtcaagaatttctgcttattcaattaagaagaatagaaagaagcactcatagaggttctcagttacaatttggatgaaatggatgccacaactaacagtaataaaattgctagaactagttatgattcattttcttagatacattttatcaggacataattataggtatccatggattagtcttctatctccttggattgcccccctcccagtgtataatgccatttcttttttggacagattgtgccagttgaatctatccatcaaggccaaatcatgagcaaccaattttccatgtatgaatgaagaatttacactttttggctaaatggattgtagtctcatcctccatgatccacaagtgagcaagatgaattacatggccatcccatgaaggttaacctcatttttatcagtgaattgaattttgaggatagtacttcagtttgcagaagatgttcatatcaaacttggtgtaagtcactcggcacaagtgctgctggcaagatagtagagagtagagaaacaaggctggactggagagtaccccagtacaatgtaaaacaactgctggctaggctcgtcgaaactctaggacatatatgacccgtttgcgtaagtggaggtgacacatcttgctggagttggcttgtagacaataacccaactgagtttttagaaaattgtggcagtgtagtattttgctgctcgctttagattgcagttaatcagtttcaaaggaatcatactgttaatcggttgagcacagaaggagaggccctggaccatggtggcatatcggatgggagatgatgtagatggcattttcagatcagtggctgaatatatcatcggtgatggagctgataacagatactggacgacaaattggacgggaaatggttgcttcgcctggaggtggcctatcctgtactcctatgtaggacactccaggttgtcggtcgcccaggccatggttaatcatagatgggtgcgagatttgcagggttccttgttcaatgaagccttgggtgacttctttcagctttgggacgaggttcatgatgtggctctacagcctaatgcagatgcaatcagattgaaactgactggagatagggcaattctcggctgcctcggcatatgatcttttcttcatggccaaagaggactgcccttatggagagatgctgaggcactccagactccagagcaccattgagagtctgttttttcatgtgactagccctgaaaggaagatgcctaacggcagacaatctggcgaagagaaactggccccacgatgaagtctgtccactctgccagcgagataatgaggactgccaccacctgttcgtggcctgtaattttacaatcgcggtttggcggttgatgaggagctggattaatgttgactttccaatccctggtgatgaagatcaaccgctcacagacaggtagcttcgggccaggatgcattttcatgtaatgtaagatgtaattgtaagtatacatcctggtacttgacatgaattagggagctgcagcgctgttttgcagctgctagcatgttctgtaaattgatgcaagaaaagtgacagggtgccagtggcactcatgttatctg

SEQ ID NO: 25035 - DNA, 3143 bp, Oryza sativa
  ref <308>: DATABASE ACCESSION NUMBER: AK100477
  ref <309>: DATABASE ENTRY DATE: 2002-08-28
gtgcggtggggggcatttcatcgaacaccattcgcgcatcgctctccccgagcgaaccgcattcgttacgttacgttacgtgcgagatgaatcaacttgtcaggtacaaacacaaccggagaatttgcttttgtttatactggagttatacgatgtgatcctgatccaggctcagttcgacctagcccctgcttatctttgcttgtgggtcgttgtcgccgtctttggttacgctaggagaagcatctctctttcttgcgtaggtaatcaactatcttaatttttcttttgtgtcttgattatgtgcaacaccgagtgatgcgaatgggatgtgttcctttcgatgttttttctatataagctctgaaacttggacttttgcaacaaatggttcgggtgcagatgagctgtttgacgaaatgcccaggagattcctgcgtgcgttgcatgcccagcggcggtttgactctatttttcctttagtatggtgtctgctctctggtgatctaatgtaccattttctcttaaccttgttttacccaatcttaatgcaaagatgcataaagagaactctgcatattcctgttttctcttaaccttgtttcagagaaccttgttttctctgaactctgcaaaagattttctgcatattcctgaaaaaaggagaactctgctccggtgcttttaactagacttataaaggctttggcataggattcctgtattggttgatgcaaaatctgctggtaacagtcagctaaattcgcttaaaaagtacacttctttgggtcttcttgctagtgcaggtagagaagcaccatggccttcctggtttcttaggtggtaaacaggcaaagaaagtaaagcaccaagtggcgccattgctgcaatgaaatcaaattattattagcaagtggatgaaaggaaaagaatacacagcctggaagagctttcaacttgaatccccttgcaattgtgtaacactacttgtccttttcacattgcatcatcgttgaaacatttggattttaatacaaaaatcattgtgggtagattttgcctcaaaaagtgctttcatactgttttaattttgtcaggtttttcagacgttttgcaatagagaatgtcaatgtccattgtgacaaaggcagttggtggcaagaaagggaggagaatctataacagctctcttctgcaatctgcattgccctctctgttctcatcaggttttagccacactgcttcaatatctctttccatcttccgtatttaagtgatcggcactcagcagctctgtgagatatctcttctgggatctgcagtttcaagcatctcccataggagagatccagtgggaatccgtaggttctagcactatgggcacagttttggatgctctcgcttggaaattcttggaaaagctgggtcaacttattgaggatgaggttatcatgacattaagtgtgaaaaggggtattgagagcctgaagaaaaatctggaattcttcaacgctgttcatgaggatgctgaggctctggccatggaggatccagggatagattcatggtggaagaacatgagagatgttatgtttgatgtcgatgacatcgtagatcttttcatggttcattcacagaagcccttgctgccaccaaggccggtatgttgcaatcagcccttgttctctagctttgcaaagttttcatttgatcacatgattgccaaaagaattgataatataaatgaaaagtttgaagaaattaaaatgaacaaagagatgtttggcttggagagaaccaacgggcaacaaatccagataacaattgttgacagaagtcagacatctcctgtagatgaacttgaggtggttggagaagatatcagaagggctattgatgacatcgtcaaaatgattgttagtagtaactacaatgaaagcaggtcaactgtttttgggatccaggggatgggaggcatcggtaagacaacattagctcaaaagatatacaatgaacagaggataagggagaaattccaagttcatatatggttgtgcatttctcagaattacacagagaccagtttgttaaaacaggcaatcagaatggctggaggaatttgtgatcagctggagactaagactgagcttctaccgcttctagtggacactattagagggaagagtgtttttcttgtgctggatgatgtttggaaatctgatgtatggattgatcttcttcgtttgcctttcttgagaggtttgaattctcatatccttgtgacctcaagaaacctggatgttttggttgaaatgcatgcaacttatacccacaaggtaaacaaaatgaatgattgcgatggcctagaactgctgatgaagatgtcattagggccatacgggcaaagcagagaattcagtggtgttggatatcaaattgtcaaaaagtgtgatggccttcctcttgccatcaaagttgttgcaggtgttctatctactaaaagaacaagggcagaatgggagagtatccgagatagcaagtggtccgttcatggacttcccagagaactaggaggccctctgtacttaagctacagcaacttaccccctgaacttaaacaatgctttctctggtgtgctttgttgccgtcaaattttgtgatacgtcgtgatgctgtcgcttactggtgggttgctgaaggtttcgtgacggaagtgcatgggtactcaatacatgaggttgctgaagagtactaccatgagctaatcagaaggaatcttctgcagccacgaccagagtttgtagacaaaggcgagtcaacaatgcatgatctattgaggtcacttggtcaatttttgacaaaggatcactccatattcatgaacatggaatatagcaaagccttaccaaatctacgccacttacgtatcagcaatgatgtagaagaaatacctgctatagaaaagcaaaagtgcttgaggagcctcctagtttttgataacaaaaacttcatgaaaattaataaggacattttcagagaactcaagcatatccgtgtcttagttctcagtggaacaagcatccaaatcataccagagtcagtgggaaacttcttgttactgaggcttctagatctaagctat

SEQ ID NO: 25036 - DNA, 2683 bp, Oryza sativa
  ref <308>: DATABASE ACCESSION NUMBER: AK100478
  ref <309>: DATABASE ENTRY DATE: 2002-08-28
gacttctcccctgtctcttcctcccacaactcccctcccgaaccctaaccctagctctccccccgcgccggcggcggccatggcgctcatcaccccagctagcggcgggggcggcggcggaggagacaaagccccaccgtccgcctccgacccgagcctcgggttcctcactaagcgcgacacggaggtgaagctgccccgggcgacgcgggtgaagaacaagacccccgcctcggtccagatcaccgcagagcagatcctccgggaggcgcgggagcggcaggagcccgagatccgcccgcccaagcagaagatcaccgactcaatcgagctctccgagtaccgcctccgccgccgcaaagagttcgaggacgtcatccgccgcgtccgatggaacgtcaacgcctgggtcaagtacgccaagtgggaggagcagcaacgggacttcgcccgcgcgcgctccgtctacgagcgcgccctcgacgtcgcccaccgcgaccatacgctctggctcaagtacgcagagttcgagatgcgcaacaggttcgtcaatcatgcccgcaacgtctgggaccgcgccgtttctctcctaccccgggtggaccagctgtggtacaagtacatccacatggaggagctacttggcgctgttgccaacgcccgccaggtgttcgagcgctggatggcctggcgtcctgacacagctggctggaactcgtacatcaaatttgagctgcgctatggtgaggtggagcgggcaagagctatttatgagcggtttgtggctgaacacccacgaccagatacgttcattcgatatgccaagtttgagatgaagcgtggagaagtggagcgcgcgcggcaggtgtaccagcgtgctgcagacctgctcgcagatgatgaggatgcccaggtgctgtttgtagcctttgctgagtttgaggaaaggtgccgggaggttgagcgtgcccgagctatatacaagtatgcacttgatagggtgcccaaaggccaggctgaggagctgtacaggaagttccttgcatttgaaaaacagtttggtgaccgtgaaggaattgaggatgccatcgtgggtaagaggagattccagtatgaggacgaggtgaggaagaaccctctcaattatgattcatggtttgattacattaggctggaggagagtgttgggaacaatgacaggatcagggaggtgtatgagagagccattgctaatatccccccagcagatgagaagcgttactggcaacgatacatttacctatggataaattatgctttgtatgaggagcttgatgcaaaggacgtggaacggaccagggaagtttacagcgagtgtctcaaattggttccacacaagaaattcacttttgccaagatgtggctcatggcagcccagtttgagataaggcaaaggaatcttaaagctgcacggcagatactcggaaatgccattgggatgtctccaaagggcaagatattcaaaaagtacattgagattgagttgtatcttggtaattttgaccgttgtaggactctctatgagaagtatattgaatggtctccagcaaactgttatgcctggaggaagtatgctgaattagagaagaaccttagtgagactgatcgtgctcgttccatatatgagcttgctattgctcagccagcccttgatacaccagaagttttgtggaaggagtacttgcagtttgaaattgatgaaaatgaattcgataggactcgcgaactatacgagagattgcttgatagaacaaaacatttgaaggtatggataagctataccgagtttgaggcctcggctggtttggctggggaagacggtgagagtgaggagattaagaaagaagttagttatcatgaacagcagatagaacgggttcgaaggtgccgagcaatctttgaaagagcattcgaatacttcagaactagtgctccagagttaaaggaggaaagagcaatgctccttgaagaatggcttaacaaggaggtgagctttggtgaccttggtgatgtcaccttagtgcagaaaaaggcgccaaggaaagtgaagagaaagagaccaattcctacagaggatggctccactgttgcgtatgaagagtacattgattatattttccccgatgaggttgcgctggctccaaacctcaagatccttgaagcagcctataagtggaagaagcagaagacagatgatactgatgatgtctgagctaaactgccactgtttctgtggtcacgaatgagctaatcgttgtcaaaattagatctgaaggtcttctacaatgctgggtaaagttgtgaatgtgccctacctgatcatgtggtgtggtgctggcacttcgatcaattcagttttacatctgtatgtctgatggatagaaactgaaacaagttcatagtctttaatttagttttggcatgcatgatcttgtttcttgctcacgatatttgtctctaaggtccaaaataggagacggttgttccttttagttttcttttatttatacatcaataggtaggcagctccagccatattagtctaagaatggcgcattttgtgtaaagaagctgcctgtaaggtgcggttgtgtaccagtgagatggactgtgaaaacttgtcttgctgatggtatccaatttt

SEQ ID NO: 25037 - DNA, 2265 bp, Oryza sativa
  ref <308>: DATABASE ACCESSION NUMBER: AK100479
  ref <309>: DATABASE ENTRY DATE: 2002-08-28
gtcttccctctggcacagctaatccaaatcctcctctttttcttgtttttttttttctttcttcgtcttctccaacgcccaaagtaaaacaaaggaaaaaagaaaagccgcatccaagaacgcaccagaaatttcggcgacggttgcgcgcgaatccatccatccaccggcggtcggagggcggcggcggcggagcaattccgcccaaccaagcggcggagtcggtgcgggcgaaatttccgggttggtgcgcggggcttgggttggtggtggtggactggtggtggtgtgtgttcttgggagtggatctggcaggaggctggcgatggggaggcgggagtagggggagcggcggattggagtgggaggcgcggtgttgggggctcccatgggcggatgcttctcgctggaggagcaccggctccagggcaagacagaagctggtgggccagatgggttaaggaaatgcaaatctgattctaaagctacagcaagtgtccttgcccctccaaaagatgtggaggacctgcaaatcgaaggatacggaaatgttaatattttcacatataatgaactaagagcagccacaaaaaacttccggcctgaccaaattcttggagagggtgggtttggtgttgtttacaaaggtgtaattgatgaaaatgttagagcgggctttccatccacacaagttgctgtgaaagaattaaacccagagggatttcagggtgacaaggaatggttggcagaagtcaactaccttgggcaacttagccatccaaatctagtcgaactgattgggtattgctgtgaaggctctcatagactgcttgtttacgagtacatggcttgcggcagccttgaaaagcatctttttcgccgggtttgccttaatatgccatggtctactcgaatgaagattgctctaggtgctgcaagggggctggaatatcttcacggagctgagagatcaattatatatcgagatttcaaaacatcaaacatcttgttagatgcggattataatgccaagctgtcagactttggcctagcacgaactggacctagtggagaccaaacccatgtatcaactcgggtcatgggtacttatggctatgcagctcctgaatatgtcatgacaggccatctgacagcacgaagtggtgtctatggctttggtgtcgtccttctcgagatgatcataggcaggagggctgtggacaagagccggcctagccgtgagcacaacctagttgagtgggcacgtcccctcctcgtgcacaatcggaagctgttcaggattatcgatccaagaatggaagggcagtactccaccaaggctgccattgaggtggcaggccttgcgtaccgatgcttgagccagaatcccaaaggacgacccaccatgagccaggttgttgagacctttgaggctgtgcaaaacatgcctgaatgccaagacatactcttgcagaactgcatgacgggtgcagtgacactctacgaggttgcaaaggaccctacggagagcgtcgagccggagaagataaaacaagaacaaccagcagcaaaaacggtcaccgtggcaccggcaccggtaaatggaaaacccgtgcctcagagcaggagaacacggccagggaatggccggagcaagagcgagccgtctttggaatgcaagctgtacatcccatctccagactctgatggccagcagccaggcctggaggcattgtcatccccttccagagatggaagcataaaggatccaccggacgaggatttgtacaagatataaaagtcacacagaagttttttatgacgattcaagttttcgctaccggcgatttcgcattgccatccatccatcttgttgtcaagatcgatcagagtcaaagttggtgttaaaattttttctgatggcggaagaactctacctcgttaggtttcttgctgttccgactagcaattgtatgtagagaggagcgttgtggaaagcatttgtaatgtgagatgcctgccgcgacgaaaagttcgtgttgtaaacttgaaaccattctctgggaagaggaagatccacatcataatcgatgtgtcagtgttgttgttgctcgagtgtttttgacttttctgtatagatgatgatgtccttgcaaacttggtacagttctacaggaaatcaacaagaagatggaaaaatataagatgaatcagtgtccgtttgttgacagtttgtttttggagtatggttttgttttcactgcc

SEQ ID NO: 25038 - DNA, 2974 bp, Oryza sativa
  ref <308>: DATABASE ACCESSION NUMBER: AK100480
  ref <309>: DATABASE ENTRY DATE: 2002-08-28
ggagcgcgttcttgacattatggagcgcggtggtggtggtggcagcagtggcaccgacggtggcggcggcggggttcagctgccggggcggggcgcggccggtggtgttcaacttcggggactccaactcggacacgggcgggatggcggcggcgatggggtggcgcatcaggcggccggagggccgcgccttcttccaccaccccaccggccggttctgcgacggccgcctcaccatcgacttcctctgtcagttaatcttcaccttccttcctgttcctcccttcctgctcctgtagcttttgcattcgtcgagttctctcttctcttcgccttcttcgataaccatctctttgcttgaatgtagtagtagctgcgtttcttgcgatttttgcacttgagagaaacatacctttccacaatttcagtgagaaggcattgctcttcagtaaattagaaaacaaacagtttattttttttcagtgagaaaaacacattcccactgaactgactggtgtcgtgaaatccacattggatcttggactgactcttttctcacttcgaacatttcttgagagcatgtgtttggcgcaaatttttttgcacgaattttgcatgagaacaccgaagcacaaattatttcatccagattaaccttaaattcgtacaatggagaaatttgtttcacacactcagggcactggccatcttgccatttccgaaaggcaactcctttctaagctgcaggattctccactctccatttctccagtaccgtatgagtaaattcagtactgctgctgaagcctgaacttaattgcatatcttggacggcttagctacgaagcactaaatatccatctcacacacatcatgtggactgctgcgagattagttggtcggttgggggtccctgcctttcatgtgttcattcaatccccctgtccttgtgaacaccaggacatccatggtcactcacagcccagctgttctttcttttgacatgggagcatgtctttttctgaacctccttgccctacaccacttccaataaatggagtgctttgcctttgcttgcgcgtgagcatccaagctttgtaaagagaactagccaaggatggcaaaaggctaggtactgatactaattactaaatgcctaagacttttgatgtgaacattcagtgcttgtgcttttcgtcgagtgaggaggaagctttggcatcacctggtggcattcagactgttagtgaaaaaagagccgaaagccggttggtttccttgagaaactagtgaagaccgaagagtgtgtaattttcgcctttctatctttgtcaaggcacacttccttttgactgagtgtccagttgttgcaattgagatggactgtgattatttgacaagatcctataatgtccttccgttatctgcaaatacatcctatcttaagctttgttcttttgcagaaagtaccggatgaccaaaatgaacagcatgtcggtacttgtataggaagatataagccactaatcttaaattgtttaattgtttatggtattgtagtagcatgtcatttctgaagagatgtggtgtactcacaggtggcgttgagttaattagctaattacctaatcagatagtattggctagaaatcttctttcttccagtagttgctaaaatcttctgcccaagtttgcacatcattcatgagttgcctgattgtcgaatcctgttctgcatgtgccactgcagaaaatgactttgttacgactaacactgtatttaaatagcatctatacttccatctagttcagttgtttgcatctctgaaatttcatacctctatgatttatatatgtcaagtttggtggatatagttgtttggccttttactaatattgtgtccatggatgaccaaaatgcatccaggtgaaagtttaaacataggttatttgagtccgtacctgaaggcattgggttctgactacagtaatggtgcaaattttgccattgccggttcagcgacattaccacgggatactcttttttcattgcacatacaggtgaaacaattcttgttcttcagagacagatccttagaactcatcagtcaaggtctacctggtccagtcgatgctgaagggttccgaaatgctctatacatgatagatatcggacaaaatgatgttaatgctcttctgtcctacttgtcttatgatcaagtagttgcaaggttccctccaatacttgatgagatcaaggatgctatccagactttgtatgacaatgggagccggaacttctgggttcatggaacaggggctcttggctgccttcctcagaagctctccattcctcggaagaatgacagcgatcttgattcaaatggttgccttaagacctacaacagagctgcagtcacattcaacgcagcgctgggcagcctctgcgatcagttgagcacgcagatgaaagatgcgactatcgtttacaccgatctgttccctctcaagtacgacctcattgcgaaccgcacaaaatacggtttcgataagccgctgatgacatgctgcgggtatggtgggccgccttacaactataacatcaccataggctgccaggacaagaatgcctcctgcgacgacggctcaaagtttgttagctgggacggtgtgcacctcacggaggctgccaatgccattgtggctaagggcatactgagctctgactactccagacccaagatcaagtttgatcagttctgcaaagtctgatgatagatactctaccttaaaatcctaatagctttcaagttgaggaaaataggagagtaagagagaaagtggcatttcatttcatccaggtccaaaatggaccttcatatgtgacaataatatttctctgttcattttcaagggaatgcgatttataatttgttccccctttccatggttatatggaaacatgatatgtagc

SEQ ID NO: 25039 - DNA, 2156 bp, Oryza sativa
  ref <308>: DATABASE ACCESSION NUMBER: AK100481
  ref <309>: DATABASE ENTRY DATE: 2002-08-28
gctccgctgcggaaaggctctccctttccgagctcttcccgagctctcctgcttgttcttggggccggggaagattcttgctgctctgaatcagaggtcaagtagtatatcatctgtgagttaaggaggatggcaggagttggcactcagccgacgagcctcaggaagtatcttggagccctcaaggacaccacaactgtgagcttggcaaaagtgaacagtgattataaggaattggatattgcaattgtgaaggctacaaaccatgttgagcgtccatcaaaggagaagtacataagagaaattttttattccatttctgcttcaaggccacgagcagatgtagcttactgcatccatgcccttgcaagacgtctttccaagacacgcaattgggcggttgcattgaagacattaattgtcatacatcgcgcccttcgagaggtcgatcccacttttcgtgaagagcttatcaattatggcagatctaggtcccatatgctaaacttggcctactttaaggatgattctagtgcaggagcttgggatttttctgcttggatacgcacttatgctttatatttagaagagagacttgaatgtttccgagtgctgaagtatgatgtggagacagatcctccgaaaactcgggatcttgaaactggtgatttgcttgatcatctgccagcattacagcaacttctttttcggctccttgcttgccagccacaaggggcatcatcttacaatgtcataatccagcacgcactttcaatggttgctctggaaagtgttaagatctacactgctattagtgatggtacaattaatctggttgacaagttctttgagatgcaaagaagtgatgctgttagggcacttgatatatacaaaagagcaactaaccaggctgaaagactatcagagttttatgaagtgtgtaaaacgatacacattgggcgtggtgagaagttcttaaaaatcgaacagcctccagcttcattcttagtaaccatggaggaatatgtgacagaagctcccactgtagctcaaaaagataaggtactggcaatcgaatacaagaaagaggcagaggaggaagaaaagccggcatcgcctcctcccgctccagagccagaaccagaacaagaaccagagccagagcctgaaccagtaaaagaggaagcacctaaagaggagccaacagatttgctgggtctgaacgaaccgaaccctgccgcagccgagatagaggagaagaatgctttagcccttgccattgttccgatagatgatgtacctaaagttgcacctgctcaaaatggagtcactggctgggagctggcccttgtcaccacacccagctcaaacgaaactgctattacttcaagcaagaagctggctggtggactggacttgctcacgctcgacagcctgtacgacgacgcgaaccggagagcgagccagccgacgagctacaacccatgggatgtcaaccccggcgtcgccggcgccggcgccgccccgatgatgcagcagccgatgatgcacgacccgttctacgcctccagcggctacgcggcgccgcacaacgtgcagatgaccgccatggcgcagcagcagcaggccttcatgctccagcagcagatgatgatggccgccgccgccgccgccgccgcggcgcccccgcctcaggtgttccaccaccaccagcagcagcagcagcatctccaggccaacccggcgaacccgttcggcaacccgttcgccgccgccgcagccgcccaccacccttacggcgccgccgccgccgccggcaacggctacacggggctcatatgatgatcatcatccagctccggcgatgtcggtcgtcgtcgcactacttccaatgtcgattcttttttggctggaaaaatttgtagctttctctcattgttgatggtttgtagcacacacaggtagaagaagaagaagaattcggtggtgttcgtccgattcggacacgtcacacgtaggtgcttggggtaatgtatgtacgtatgcatgtatgtatatgggtatgggtatttttggtatttcttcatgtgggtgggtgattcgggataagattaattattggattattcatggacattgatcgagtacgattacat

SEQ ID NO: 25040 - DNA, 3554 bp, Oryza sativa
  ref <308>: DATABASE ACCESSION NUMBER: AK100482
  ref <309>: DATABASE ENTRY DATE: 2002-08-28
gttgaggatgcggcttcgaagttgaactaggcggcggtgggcccaccgcttccattcttctcgcctttttcttccaccgttgcgagttctctctgcctgcgctgcggctgcacccttccccaagtcggatttccattgcattctcgattccattccttccccctccccctctttcttcgacttggacttggccttccttcttcctcctcaacctcgacctcgatctaggtctacgctccgccctccgccccccgccccccgccgccgccagggagggagccggagccggagccgatcgatggcgtggctccgcgccgcctcgggcctcgcccgccacgccctccgccgccgcgtgcccgtcgcttcccgtttcttccactcggcgcggccggcctggaggtcctccgccccggtgccccgcgccgtcccgctgtccaggcttaccgacagcttcctcgacggcaccagcagcgtctacctcgaggagctccagcgcgcatgggaggccgacccctcctccgtcgacgaatcctgggacaacttcttccgcaacttcctcggccaggccgcgccctcctccgccggcctctccggccagaccatccaggagagcatgcagctcctcctcctcgtccgtgcctaccaggttaacggccacatgaaggccaagctcgacccgctccgactcgacgaccgcgccgtcccggacgacctcgacctttccctctacggcttcaccgaagctgacctcgaccgcgagttcttcctcggcgtttggaggatggccggtttcctctccgacaaccgccccgtcctcaccctccgcgagatcctcagcaagctcgagcaggcctactgcggccccatcggctacgagtacatgcacatccctgacagggacaagtgcaactggctaagggacaagatcgagaccgccaagctcaaggagtacaacaaggaccgccgcctcgtcatgctggacaggctcatctggagcacccagtttgagaacttcctcgccaccaagtgggccactgccaagcgctttggcctcgagggcggcgagaccctcatccctggcatgaaagagatgtttgacagggctgccgaccttggcgtcgagaacattgtaatcggcatgccacacaggggaaggcttaatgtgcttggcaatgttgtccgcaagcccttgtcgcagattttcagtgagttcaccggtgggactaggcccgtcgaaggcgaggatggcctctacactggaaccggtgatgtcaagtaccatctgggcacctcctatgacaggccaactcgaggtggaaagaggatccacctatcgttggttgcgaatcccagtcacctcgaggctgtcgatcctgttgtcataggcaagacgcgggcaaagcaattttactccaatgatcttgacaggacaaagaacatgggcattctcatccatggagatggcagctttgctgggcagggtgttgtctatgagacacttcatctgagtgcccttccaagctatacaactggaggaaccatccacatcgttgtcaataaccaagttgccttcacaacagatccaagagccggcagatcttcgcagtattgtacggatgttgccaaagccttgaacgctcctatattccatgtaaacggtgatgatctggaggcagttgtacgagtttgtgagcttgcagctgagtggcgccagactttccattctgatgtggtagtcgatctgatctgttaccgacgatttggacataatgaaatcgatgagccctccttcacacagccaaagatgtatcaggttattaagaaccatcctagttcattaaagctttatgaacagaaactgctaggaacaggcgaagtctcaaaagaagacgttcagaagatccacgagaaagtcaacagaatcctgaatgaagagtttgcaaaaagcaaagattatgttcccaataagagggactggctttcggcttactggactggcttcaagtctcctgagcagatttcacgcgtccgcaacactggggttaatccaggggtgctgaaacgtgttggacaggcaattactactttacctgaagacttcaagccccacagggcagtgaagaagatttttgagcagcgtgcagcaatgatcgagagcggtgaaggaattgattgggccgttgctgaagcccttgcctttgcaacactcattgtggaaggcaaccatgttaggctgagtggacaggacgtggaaagaggaacttttagccaccgtcatgcagttctgcatgaccaggaaaacgggaggaaacattgcccacttgaccatgttgtgatgaatcaaaacgaggagctgtttaccgttagcaacagttcactttcagaatttgctgttcttggttttgaaatggggtactccatggagaaccctaattcactagtgctctgggaagctcagtttggtgacttttccaatggtgcacaagtgatgtttgaccagtttttgagtagtggagaggcaaaatggctgcgtcaaactggccttgtcgttctactgcctcatggttatgatggccaaggcccagagcattccagtgcccgtttggagcgctttcttcagatgagtgatgataatccttttgtcatacctgagatggaaccaacactccgcaagcagatccaggagtgtaattggcaagttgtgaacgtgacaacgcctgcaaactatttccatgtgctgcgtcgtcagatacatagggagttccggaagcccctgattgtaatggcccccaagaacctacttcggcacaaggattgcaagtcaaatctctctgagtttgatgatgttgaaggccatccaggtttcgataagcaaggaacacgcttcaagcggttgataaaggaccggaatgaccacaagcaagtcgaggagggtatcaaacgccttgtattgtgttctgggaaggtgtactatgagcttgatgaagaacggaagaagactgaacgcagtgatgttgcaatttgcagagttgaacaactttgtccattcccatatgatcttatccagagagagctaaaaagatatccaaatgcggagattgtctggtgccaagaggaacccatgaatatgggcgcatatagttacatctcccctcgcctgtacgcctctatgaagactcttgggcgtggttcattcgatgacatcaagtatgtgggcagggcgccttcagctgcgacagctactggcttcctgtcggttcatgcgcaggagcagacagagctggtaaagaaagcactgcaggcagagcctatcaagttcccctgatatgatgcatctgtggtttccacttggtgcttatacttgtgcaagacaagtgtgtgcgagctcagctcgtccagcctttgcacacataccataccatcttaaaagttttgctatgtatttacaagctactgtttctctagcttgtttgaggcgattcgatttgaatgtcgtgaataatgcactatttgagccttcttatcgttgaggaggaacctgtttcgacgtgagc

SEQ ID NO: 25041 - DNA, 3538 bp, Oryza sativa
  ref <308>: DATABASE ACCESSION NUMBER: AK100483
  ref <309>: DATABASE ENTRY DATE: 2002-08-28
gacagatccaacaaacgcccaaagaaaaagtcttttgagatacacaccaatgagcctaactgactagctagcgatcgaaacaccctgctccagatcgatctggcctagctagggaccttgctgcgggggggcaaccatgtcggtctcactggaggatctcaagaaggagaacgtcgacctcgtcagtgttcttcatcattccgccaatattgcgttcatccgtgtgtgcgtgtgatccgtgtgtcattgtggcgttgttggttggttggttggttgcaggagagtataccgatccaggaggtgttcgccgtgctcaagagctcgccgcaggggctcacctccgccgatggcaacggccggctcgagatcttcggccgcaacaagctcgaggagaagaaggagagtaagctgctcaagttcttggggttcatgtggaatccgctctcctgggtcatggaggccgccgcgatcatggccatcgccctcgccaacggaggggggcggccgccggactggcaggacttcgtcgggatcgtgacgctgctcttcatcaactccaccatcagcttcatcgaggagaacaacgccgggaacgccgccgccgcactcatggccagcctcgcgccgcagaccaagttgctgagggacgggaagtggtcggagcaggacgcggcgatcctggtgcccggggacatcatcagcatcaagctcggcgacatcatcccggcggacgcgcggctgatggagggcgacccgctcaagatcgaccagtcggcgctcaccggcgagtcgctccccgtcaacaagatgcccggcgacagcatctactcgggttccacctgcaagcagggcgagattgaggccgtcgtcatcgccaccggcgtccacaccttcttcggcaaggccgcccacctcgtcgacagcaccaacaacgtcggccatttccagaaggtgctgacggcgatcggcaacttctgcatctgctccatcgcggccgggatgctgatcgagatcatcgtgatgtacccgatccagcaccggcagtaccgcgacggcatcgacaacctcctcgtgctgctcatcggcgggatacccatcgccatgcccaccgtgctgtccgtgaccatggccatcggctcgcaccggctgtcgcagcagggcgccatcaccaagcggatgacggccatcgaggagatggccggcatggacgtgctctgcagcgacaagaccggcacgctcaccctcaacaagctcaccgtcgacaaggacatgatcgagccgttcgtgaaggatctcgacaaggacgcgatcgtcctgtacgcggcgagggcgtcgcgaaccgagaaccaggacgccattgacgcctccatcgtcggcatgctcgccgacccaagcgaggcccgtgccggcatccaagaggtgcacttcatgccgttcaaccccgtcgacaagcgcacggccatcacctacatcgacaccaaagatggttcgtggcaccgcatcagcaaaggcgcgccggagcagatcatcgagctgtgccgtctacgggacgacgtgagccggcgggtgcacgccatcatcgacaagttcgccgaccgcgggctgcggtcgctggcggtggcgaggcagaaggtgccggaggggagcaaggacgcgccgggcacgccgtggcagttcctcgccgtgctcccgctcttcgacccgccacgccacgacagctccgagaccatccgtcgcgcgctcaacctcggcgtcaacgtcaagatgatcaccggcgaccagctcgccatcggcaaggagaccggccgccgcctcggcatgggcaccaacatgtacccctccagctctctgctcaaagacggcgacaccggcggcctccctgtcgacgagctcatcgagaaggccgacggcttcgccggcgtcttccccgagcacaagtacgagatcgtgcggaggctgcaggagaggaagcacatctgcgggatgacgggggacggcgtgaacgacgcgccggcgctgaagaaggcggacatcgggatcgcggtggcggacgcgacggacgcggcgaggggggcgtcggacatcgtgctgacggagcccgggcttagcgtgatcatcagcgcggtgctgacgagccgcgccatcttccagcggatgaagaactacaccatctacaccgtgtcgatcaccatccgcgtcgtgctcggcttcctcctcctggcgctcatctggaggttcgacttcgcgcccttcatggtgctcatcatcgccatcctcaacgacggcaccatcatgaccatctccaaggaccgcgtcaagccgtccccgttgcccgacgcatggcgcctccaggagatcttcgccaccggcatcgtcctcggcacctacctcgccctcgccaccgtcctcttcttctgggccgtccgcgacaccgacttcttcacggtgaccactcatcacccaacctcgcacgcctcgccgccgcgcgctctgacgccgtgtgtttgtgggcagaggacgttcggggtgcacccgatcggaggcagcacggaggagctgatggcggcggtgtacctccaggtgagcatcatcagccaggcgctcatcttcgtgacacgcgcgaggagctggttcttcgtcgagcgcccagggctcctgctcgtcggcgcgttcctcatcgcccagctgatggcaacgctgatcgcggtgtacgcgaactggccgttcgcgaagatgaagggcatcgggtggtcgtggggcatggtcatctggctcttcagcatcgtcaccttcttccccctcgacatcttcaagttcgccatccgctacttcctcagcggcaaagcctggaacaacgccttcgacaacaagacggcgttcgcgaacgagctggactacgggaagagcaagagggaggcgcagtgggcgatcgcgcagaggtcgctgcacgggctgcagcaggcggagacgtcgacggcgctgttcgacgacaacaaggactacctggagctgtcggagatcgcggagcaggcgaagcgccgcgccgagatcgccaggctacgggagctgcacacgctcaagggccacgtcgagtcggtggtcaagctcaagggcctcgacatcgacaccatccagaaccactacaccgtctagctagcaccatcgatctcacacgcatgaataccatacatgatcgatgatgctgctcgttagcttgataagtgagacaggatattctttttttttctttttttttggcagcttaatttaacggggtcaggagactgtcttaatttggtcagatgaataatgggggtacgtagcttttgttgttttaatggttttactttggagaggttgtaggtttgttggtacgtttgattggtcgaagaccagaataaaatgagggctaatttagtactttgtttgtgcatatgttgaagaatccatcagccttttcctaatgtttcaaactaagttttagcatgtactaattgttcttaggtaacactctttttaattccttgaggggatattc

SEQ ID NO: 25042 - DNA, 1971 bp, Oryza sativa
  ref <308>: DATABASE ACCESSION NUMBER: AK100484
  ref <309>: DATABASE ENTRY DATE: 2002-08-28
gttctccaccacgcgcctacccgcacgccgagctgtcgccgcgtgtgcccccgcctcgttccatcgccttcgcgtcgcgctgtgcccactaaaacaatccggccagttaacacttcacacccccgcgccctctcgtcccccttcctacgtgtccccctccctgatcaagaacggatcaccggctcggcgccccactctcttcttggatcggggagcgggagagggggaggaagaggcggcggatcagaagatttgggcggcggcggcggcggcggcggcggcggcggaggtggtgtgggtgggtgagtgagtgaggagtgatggagaaggagaggaagatggagggggagaggagggtggaggcgacgcggcggtgggtgatcgcggtggggttctgggtgcaggggttccggctgttcccatggctgggcgtcaacttcttcctcaaggacggcatgggcgtcgccgcctcctcgctgcagatcctccaggcgtccgccaacctccccatggtcgccaagccgcttctcggcctcctctccgacgccgtccccatccgcggccaccgccgcctcccctacgtcgccatcggcgctctcttgcaggcaatttcatggttagcaattgccctctggccagctatttctcttccagttcttaccatttttctcctcttgagcaactttggtgcatccatatgtgaggttgccaatgatgccattgtagcagaagctgggaagcaagcaaccttgtcctcagggtcaggtcagcttcaatcctttgcttggatgtttggttcatctgctggcgctttaggaaatcttgttggtggcattgcactcagttacttttctccaaaaatcatgtttctgttttttgcaatccttctcgtgctccagttctgcactactgtggctatacctgaaagctccctccaactcccaaaggcagatactaatctatcagctgtctccagcgtccgtaagcaaatcaaagagctgtcatatgcgctgtgtatgcctgaaatattttggtcagtcatttggttttcattgtcctatgctgccataccatttctacttgggaccatgttcttctatcagactgaagtgttaagacttgactcatcagttatcggtttgtccaaggtttttggacaagtaactctattagcttggagtgtggcatacaacaagtacttcaaaacaacacctgcacagaaggttttatcagttctgcagtttcttacagcactcgtaatgctgtcagatgtactatttgttcagggaatatacagaaacttcggaataccggattccatgtacacaattgttttctcagggttgttggagggtcttatgttgttcaaggtgctgcccttcagtgttcttgttgcaaaactttgcccttctgggtgtgagggatcacttatggcttttgtcatgtctgcacttgccctcgcaactatcatcagcggttatcttggggttgcacttgctgaattcatgggagtatctggaggtgatttctcagcgctgccgacttgtctgttgattgaggctgcatgcacaatgctaccactctttttctcctcattgataaaagagaggagagaaaaggagaagaaagaagaatagaattcacctataggattcgatgaggttgtactggtgctcgttatactttacagtcatctttgggatcatatggatttgccgatagttcggtttcataatcagaacatagctggtggacacaatttaaaagactaggttcctcgagaggttttcagtgtttgtcgagaatcatgttcagtgtagatggcatatttgtacctatatttgtgttaccattcttctatagatcaagtcttgtttcatgtaactagtattcttttgtgtatgctaatctgttttttgtagatgaaacaatataaatgttttgtgcatcttaaaagtgttattggctcct

SEQ ID NO: 25043 - DNA, 2651 bp, Oryza sativa
  ref <308>: DATABASE ACCESSION NUMBER: AK100485
  ref <309>: DATABASE ENTRY DATE: 2002-08-28
gacgtatcgctctccctcctctctctctctctctctctctctctctctctcttcgccgcgcggcggaggcgttcgtcgcgagctgtcggcttccctcctcgcgcccgcggcggctgtggccatggaggtccccatctccggcggcggcggaggggagaggttctgccacgcggcgcaggtggtgggggcggacggggagatggacggggaggcgatggcgcggttcgcggcgggggcggggctcctgggccgtggcctctcctacgccgtcgtctccatcgtcgggccccagggcagcgggaaaagcaccctgctcaaccaactcttcgggacaagcttcacggagatggatgccttgaaagggaggagccagactaccaagggaatttggattgccaaggctgtaggcattgagccgtttactgttgtaatggatttggagggcacggacggcagggaaagaggagaggatgatacagccttcgagaagcagagtgccctttttgctctggcagtatcagatattgttatgataaatttgtggtgtcatgatataggacgagaacatgcagctaataggcctctgttgaaaacaatatttgaggtattgatgcgtttattcagcccacgcaaaacaacgttgctacttgttattcgcgataaaaccaagactccactagagtatctaacccaagctctgaaggaggatatccagaagatatggaatgctgttcgcaaaccagaagtttacaaggaagctgcactaagtgaattcttcaatgtggaggttactgctctgtcaagttacgaagagaaagaaaatctatttaaggagcaggttgggcaactcaggcagagatttattcattcaatcgctccaggtggtctagcagctgatagaagaggtgtgattcctgcttcaggtttttgtcttagtgcactccagatctggaaagtaatacgggaaaacaaggatctcaaccttcccgctcacaagatcatggttgctactgttcggtgtgaagagattgcggatgaaaagctcagaagtttcatatctgataagggctggttggagctagaaacagctgcaaattctggtctagtaccaggctttggaaagaagcttaatgctattcttgatttttatctatctgagtatgacacagaagccatgtactttgatgaggatgtgagaaccgctaaacgccaacagttagaatctgaaatcctaaaacacacatatgatgctttcaagaaaatgttagaacacctgcatcatgtggttctgaacaaattcaaaagtgatctagaacaatcattaaggagcggtgagggatttgcagcatcagctcgttattgtgtgcagtcatcaatggcggaatttgatgctggattgagagatgctttggttaagcatgcagagtgggacacgacaaaagttaggagcaaactggagcagcatatagaagctcatgcaacatctgttcggggtacaaaactggctgaactaaaggctaattatgagaaaaaactcttggatacacttgctggacctgtacagtcaatcttggaaactggtgaaaaggactcttgggcatgtattagaagactttacaggcatgcgactgaaagtgctattttggcattctcagcttccctctccgagtttgaactagaccagacaactatccgtaagatggtcatggaattaagagaacatgcaagaagtatagtagaagagaaagctagagaagaagctgggaacgttctgatgcgtatgaaagaaaggttttccactgtgttgagccgtgataaggattccatgcctaggacatggaaaggaaatgaagatatacgtgcaatcactagagaagcacgcttagcggctttaagacttatgtcggtaatggcagctgtacgtttggacgataaaccagataaaatagatcgggctctaacgactgctcttttagatggaggaccgctttcacagaaaaggagtattgaattcacatctgatcctcttgcttcaagcacatgggaggaggtgtcagaaaagaatacgctgatcacaccagtgcagtgtaaatccatctggaggcaattcaatgcagagacagagtatgctgttgcacaagcaatttctatgcaggaagcacacagacgtagcaataattggctgccacctgcatggactgttttgcttctcgcaattttaggttacaacgaatttatattccttctaaggaaccctttatatctgctggggctcttcgtcgccttcgtagtatcctatgctgcatggttgcaatatgacatcacagcctattttcgccatggcacgctctcaggtcttctgactattacatctgggtttctccccacaataatggacatcataacagcagtcatcaacatgagtcacaaccagaagagctcctcgcacccgcctcgacatcgtcccccgcttcatcctcaaagcttcaggaaccaggcgcagcaacagtctcaggctcaggtgcagtatcaggctccaagttcactgtcatcatcctcttcggtgggctccaacagcgatgacgaatcctgaagcctcataaaacatccctgtagaagacacgttccagtctccaggaaggactttgtat

SEQ ID NO: 25044 - DNA, 2140 bp, Oryza sativa
  ref <308>: DATABASE ACCESSION NUMBER: AK100486
  ref <309>: DATABASE ENTRY DATE: 2002-08-28
tgatagctgtgctaaacccgatgaaaatcatgtgctttctgaagagacactgctggagaaagatcagctttgctccaatgatgaggcacagggtgatagcatggatgctctgcccaaggataacgttgatcagggtgagaatcttccacggacagatgatgattctgtagttcatccagagggggaggtggagagcgaaggtgttccaagaccagcaaggttatcacgagttgtccctcctggtcttgatgaattcaagacacgagcgattgcggaaagaggaaagggtgtccctagtggtcaacctggaaatgtgatccacagaagggagcctagtgggaagttgtacaattatgcctcggcagctaaaggggctaaggtcctggaattcaacaaggaggccaagggtgcttctaacatcctagacaaggataaagacaagtatctccgcaatccttgctcagcagaggggaagtttgtcattatagagctgtctgaagaaaccttggtagatacaatcgcaattgcaaattttgagcactattcttctaacttgaaagaatttgaaatgctgagcagtctgaattatcccacagatagctgggaaacactcgggagattcactgttgcaaatgccaagattgctcagaattttacttttcctgagccaaagtgggctagatatctgaaactcaacttgcttagccattatggttccgaattctactgcacgctcagtatgcttgaagtgtatggaatggatgcggtggaaaagatgctggagaacttgattccagttgagaataaaaggctggaacctgatgacaaaatgaaggaaccagtcgatcagcaaacacaattgaaggagcccactgagggaaaagaatcctcacatgaacccctggatgaagatgagtttgaactagaagatgataaactaaacggtgattcatcaaagaatggtgctcatgatcaagttaccgagacaaggccaattcaggctggcaggattcctggagatacagttcttaaggtactaatgcagaaggtgcaatctcttgatgtgagcttttctgtcttggagcggtatctagaagaactaaatagcagatatgggcaaatttttaaggattttgatgctgatattgataccaaagatgcactcttggagaaaatcaaattggagctgaagcatcttgagagaagcaaagatgactttgcgaaagaaattgaagggattctctcatggaaactagttgcttcctcacagttaaaccagctactcttggataatgtcataatcagatcagaacttgaaagatttcgggaaaagcaggctgacttggagaatagaagctttgctgtaatattcctgagttttgtttttggatgtttagcgattgctaagctgtctataggcatgatatttaatacctgtagattatataattttgaaaaattcgatagggtaaaatctggatggcttgtgttgctgttcagcagttgcattatagcctccattttgataatacagtgatgtacctatcaactccatataattgcggctgcgctttgtaattgcctgaggtgtctaattcaaaatctattacaatgcatctttgagatcttacacaagggagtgtagttattataactcgtcggcgatctcagtttggagggtagaaaaggaaaaggctgtggtacccaggtcatttttaagttgcagcaagctaccagtgctagattatttttgtcagctgcatggtcctctccagtggaatgtagaagcaaatctacctggaaagcatgtgcatgcacctggagccaggcaatttcttttataagttcagaaccatgacaggcctccatgtgcttccttgtatattccaagaagagatggagtaatatatatcttggcatgatcgctgtgcactcgatgttcttaatctgagtggccttcctgcctggtgcacatggcctcaacatcatgttgctttacaaggcagtactccgtttgcttccagcttgagaggccgcattgataactgctaacggtactgaatgaagtcaatgacctcaaacatgtactacaaatgtacagctcttttagttgaaacagtactttgcactggtttgctgt

SEQ ID NO: 25045 - DNA, 2461 bp, Oryza sativa
  ref <308>: DATABASE ACCESSION NUMBER: AK100487
  ref <309>: DATABASE ENTRY DATE: 2002-08-28
gattccggcgccctccacggtgagtgatttctcgccctcccgtccgccgctgcttccatgtttccaactccctttcgacatcgattcttcttatccgcctcccttgtggattcggatttagctaattaggtctctttcccccattattaccttttaaattgggattgtgagcagcacagaacggcatggcgacctctccagcttatcctccccctggatccggtgagggtttctccaaaccgcccgctacaggtaacgctgcctaaacttgcccttagtctcaacccctggatacaaagcatgcgcttctttacctttgaaagttcaagaaatacagtgaataagataaggcagatttatttgtttcgcttttggtacaaagatgtgatttttaaaagaaactaacagggtataacaggaatgcctattttctactgtgatttttcgctcagttgcatcacgtgaataggattacagtaaacgtgttctcaatcagtatttgatctttgcgtttagtcgtctctccggatctgaaagatttggccttcacctggtaatcatttcgatgcattcatttccctatccaggaggtttttgaaccttgatccacttcaatctccaagcaacagtctaaatttagcttcaaattttgggttacctgtatctttttttctttcatgaaatggaattatttccaagcttgtggtggcgtctgtattgggtttctttctccaagttatattaagtttggcttccaaagaagaacttatatttgctttactacaaaaaaatcatcgaaaaagggctcttctgttgtacaccgatttatttatttgatgcatgtatataaattgctctctaatgcattataaagcaaatagcaattgatgtttacaatgatcagatccttgttcaagtggccattggtcagacctcccagttgatctccttcaccgcatcttgcatagccttgagctcccagaagcccttgctgtagccgatgtctgcaagtcatggtgctgtgctgccatagctgcaggtgttcctcgttcttgcacaccatggctaatgtcctggtctgacaagcctccacatgaactggaatatgatgtcttgctcaacaattgcaaatggcagtgccctatgggatgtgaattccacgaccttgtcaatggccacaagacttatgaggttaatttgccacaagtggcttgggttggtgcatctcatggttggcttgctgctgctgataatctctctaatcttttgctttacaacccatttacctttaccacaatccctcttccgccgatcactgatctagggtgtgtggaggcagtctatgacagtgaaggaagcattgtgagatatcgccttggaaagcacaaggaaagtgatgcaaaattccttggtgtctggttctactagaagcttgtgctgtcatgtgctccttctctaggtggtgactatgtcgtgatgatcatccacagctctgctaatcgggtctcgtttgcaagtgcaatagaaggtcgctggcgattggcttcaactataacccaaggtagcggcgaccgatacgctgattgcgtctaccacaaaggcaggttctacaccctgactatgtatggcgttcttgagatgttggatcttgataatccatgtgaaccaagaaaggagatttttttcaccgaaaggaacacggaaaaccctttagttttcctcagattcctagtgtcaacaccatggggtgatcttttgcaaataaagttttctcgacgtgttcatcgtactaaaagacttgagctacggctatgcaagattgaggttgaaaataacagattggtaagattaagatctgcggttgcagcagcagcccttcgggagcatgcgatatttgttggacaaaatcattcggtgtgtttgcccatcagggattttccagagcttaggtccagctgtgtctacttcacaacaccttgcttgtgtaacgatgatcattttccttctaggcgggaaggttggaaaggtgtagggatttacgacttgcaaaatcagatatttgaggatgttttcccttcttgtgagcgtgggtattcgacctatctccctatttctgaagtttggatcacccccagccccggcctttgaaagagtaccacatagccttttagaagtttgctggaagcgtggaacggatcattgctgccgtgtgcttacattgacttgtacttaacttatcaatgttattgttatatatattgttttgccgccttttagaagttcgctggaagcctggaacagatcattgtcgtgtgcttacaatgacttgtactgaacttatcaatgttataagcatccgagtgttgtagcccatgttctgtaagccggtccactgttcaacaacgattgtagattgccaaccatgtaaaaaaatggcacttcagaggtgcccaactctttc

SEQ ID NO: 25046 - DNA, 2582 bp, Oryza sativa
  ref <308>: DATABASE ACCESSION NUMBER: AK100488
  ref <309>: DATABASE ENTRY DATE: 2002-08-28
atggggctcttccaattccatgccccccccggcccgccactcctctcaatccgcaccgccacgccatacctccttccacttccccagtgagagcacggtgtagttcgagagaacgtctcccctacccagccgcttctagacgacaacacaggtgttcctgccggatctaacagtacctagctgcaaggcgccagagcttgccgccgtaacctccatggctggatccaaggcggaccgcagcgaggagaaaggggctgcttcctccgcaccgccctagcttgagaagatgttcgaggtgccagtggagttgttggtggccggcagtcggacgacatcaccgaagacgcgagagtcggagctggtcagccatttcctgggtggcaccgagccggccctgtccgtgcagctcggcgacctcggccacctcgcctactcccatcccatgccaaccaagccctctaccgccgaacggcccaagatactggaatcatgctttcactcttaacaaagcttcattttgtagttgaaattgcacaagctgtgctgttctttgccatggattttgtgttatcttaccaagagcagaacaaaattggtaattgctattgatttgttgtattcttcctgagacagactcatttactctgcttttactctgtagttagacatgatttgtttcgtcttttgaggaagagcctaaaaaataagttcaaggcaagatttgggacttaccaataggaaggacaaaaaatagctcaaggcaaggtttgagataaggtaactcagattcatcttgtagtttccttttaataatttatcagaggaaactaaccaatgttacatatgttctacattcctcggcagcctgtagtgaagctgcttagtcctgttctatcactaccaacgcctaaatgcagcccctgtttcctcttttttttctttgatcggatgcttaataaacttacaggaggaagtagtgagttggcattgaattttgatacatgcaggaagttcttatgttggaaatatccctcctcccctaggttatagtgagttggcagattgggtggctaatttcggttgaagcgtagtgaatagcataaattttgtgctgaatggttttgtcacaaatagcgagtaattgacttgcagccttggacttccgaaatttggtagtgaggagtggatgatttacaaggagctttgctaattttcgagtagaaccgtacaaataagaagttaacagatggaaaacatatatttcagcttgtgctacgtacatacaatcttcaatcacaggacacaagtatgtaagctccgatttgttgatatgttagtaacggcacatacgacttaagtcttcagttcaaaactcatttgttttatcaatattttgagttttgttggttgctttgtgagctgtaaaattgtacaacgagttctacaggagatcaatatatttgtaatggctagatgaaattctcctgatacctgagaagttagataattttcccacaatatataagcgtgcaccttgtaaaatgcagttgacacactgcaacattctagaatttggagtgccaatagctcaatggcgattctctcttttgtagttatctgatgaatatgatcactaggatagtctattttcagctaattgggctacttagattttttcaatgtctgatatataaatcaccaaataagtaacatgttgtatgtctagacagaagaaaaagcagagctcacagattttcctcactttccattgaagtttgctgtcttgtagagttaagtatgctagactcacaaatttgagtcaacttgataaagactacagagtcaaaagtttggtgacatttttatggtgctttatttttccttattcatatctttttcttatcacaagaatattcagtggtatcatatccacttaattctagaataatgtcattgcgttgtattgaagttcatttcaaaaattagacatatccacatatttgagtctaacactgtatttttcttcagtttgtacaaccaatgtatgtccaaagagaaaatttgggttggatgcatagtcagtcaatagaggagaaacacagcagccggttaagttaccctgcaggaatattataattttctatttagtcaatgctcaaatcaatgtaaagcgaaatttgtactaattaacagcacacaaatattgtacatgagctctccgccgttggacagcacgctggtgatgctgctgctgccctccttcctctccgaagaaagctccagcaagctgatgtggatgctgtgttgctgccctcctctgcccccttttctttatgaagatagctgatagctgcaggactaaatagagtaaattttcagttcaattttggattcattttactgaccaaaggtagtaggaataatgaggaaaagctcagatctacaggagctcaactgcagaggcaatgatgacattctgattcgtatgtatatagtggaaatagtttgtactaatgatgatctgatctcctaataggtccaaaacctgtcaaatgctgtgtatataatgtataaaggatgcg

SEQ ID NO: 25047 - DNA, 2790 bp, Oryza sativa
  ref <308>: DATABASE ACCESSION NUMBER: AK100489
  ref <309>: DATABASE ENTRY DATE: 2002-08-28
gttcgactccgactcctcgtgagttcgttcgccttcgccgccgccgacgccgccgatccccacccatcccgcgagcggagcggaggagggggggcgccgccgttcgtcctgctgcttccgccgcatcctgcgtcttcataacggaaattcaagacaggtggcaagacaaaatccaattggacataatggacaatatattagtggtatgcaagtccacattagctgacgatgaatcagctagtgaggtatcttcagggagtgacagtgacagtgattgcattcttggagatgattgcccatcagatgatgatgaagaggctgcacagatacacaagcgttttaaagaactgaaggagaagttaaagacaggaaaagtagataagttggatgatgttgtttttgaagctggtgctgaacaagatggtaatgacaccccatcttttgatagcgatgatgaagagtcggtagaagaggttgcaagcgatgaagaggtttctgctagaaaactcatcaagtatccaaggttcaaggagaagcctggtgttccaacatttgaattaggaatgacgtttagctgcaagaagcagttcaagaaagctattacagcatatggtttagctgagaggaaggcgatcaactttgtcaaagatgatcctaagagggtgagggcaagatgtgactggcctagctgcccttgggtttgcctactgtcaaaaaactcaaggactgacggttggcagatagcaacactagaaaattctcatctatgcccctctagaagagataacaagctggtgacttcttctaggattgctgagaagtatggcaagtttatagttgcaaatccctcatggaaattagcacacatgaaggcaaccgtacaagaagagatgtttgctgatgttaacatctccaagctgaagagagccaaatccattacgatgaagaaagctataaatgcagctaagtggcagtatcaaaagttgtataattatcagctggagctacttagaagtaaccctggaagcactgttgtggtggatagagaggtagatatggatccacctgttttcaaaaggatctacatatgcttagatgcatgtaagaaaggcttcctagctgggtgcagaaaagtgataggacttgatggctgcttcttcaagggagcaaaaaatggagagctcctttgtgccataggaaaggatgccaacaatcagatgtatccaattgcatgggcagtggtgcacaaggcgaacaaggaagaatggcactggttctgtggattgttgtgcagtgacttgcaagttggtgatggatctggctgggtgttcatatcaaaccaacagaaggaaattattaatgctatggataaatgggctccacaagctgaacacaggatctgtgctaggcacatatatgctaacttgaagagacacttctatgacaatgaacaccagaagttttggaagtgtgccaaggctccgtgcataacgttgttcgacttggcaatggcagagctggtacaacttacaactcctgcagtacaaaccatcttgaataaccatccgcagcattggagccgagcgtggttcaggtcaggctctaactgtgacttagttgacaacagtatgtgtgagtccttcaataaatggattctagaggctaggttctttccaataataacaatgcttgaaacaattagaaggaaagtaatggttaggatccatgatcagagaactatatcaggtagatggaccacatcagtttgcccaaacattctgaaaaaaatgaatgtatatatcaccgagtcagctttttgtcatgcaacatgtaatggaggtgatagctttgaagtaaaacaccgtgacaataggttcacagtacacctagacaagaaggagtgttcttgtagatattggcagctgtcaggattaccatgccctcatgcaatatcatgcattttcttcaagactaagactaattcactggatgagtacattgctgagtgttattcagtgaaagagtttaagaaaatctatagtcaatgcctggaaccagtagagggcatgagcagctggccagaagatgacaaagagccacttaatgctcctgggtatatcaagatgccaggagagaccagaagagaatccaatgaaccattaaaagccaccaaactgtcaaggattggctcaatcatcagatgcagcaagtgcaagcaaattggccacaacaaatccacttgtaataagcatcatggaggaggctctagcacaccagattctctccaagttgtaaatccagctgataatttaatgctctcaaacacacaacaaagctctaaacaaagcaggaaaagaaagtcacgtacagctgctaacaccaattctgcaagtcagtcaaggaaaacagtgtcttcaaagcaaaaggcactagtggaattgcatgcccattctcagggttctacaagtgcaacaattaaggtcacttctgggcaagcttttgtcaatgtttcaactcaagaatcagcaaagttcaagccaaagaagcttacacctggtctactgctgcttatgcctccatgggaatctgacaaactgtgatgtaatgttagatcaagttatctgttattaaacttgtgtgtgatgtaacgccagacaattaggccatctattagacttatctgtgatgtaatgcaagactttatggcctgtcattgtagttgccagacttaatggcatattgatgcagtcaagaaaaccatctgggagttttggctccagctgttccagc

SEQ ID NO: 25048 - DNA, 2942 bp, Oryza sativa
  ref <308>: DATABASE ACCESSION NUMBER: AK100490
  ref <309>: DATABASE ENTRY DATE: 2002-08-28
ggatctaccgaggcaccgcccaaaaccttccccatcttcctcccgcgccgccgtcgccgccgcttcctccccaactccccacagaagacctcccggactcactcgcctgcatcccttcgaagcgctgcgcgcgcgcggccgtgtccgccggcgccgccggcaatgaacctctcggacgactggcgcttcctcttccccgtctcctccgtcttcgcgccgccgtccctcgccacgtcctccgccgccgccgcatcatacgggcccctcctcttctccccgctcccgccgcacgccacgctcctcgccctcccttcccccttccagccgccgcacccctcccggcgcggcctccgccacctcctccgccacttcgtccgctccacctccttcctccccttcgccgacctcgaccccctctcgggggcgctgctcaccgcgccgtccccgcccttcccggcgccctccaacctgctcgccgtcctccgcgccccctcctcctcgcggtccctcgtcgtcttcttcccttccggcgagaacgcggagcaggtctcctacgttaccctcgaccccgtcgccgaccccaccacgccgctctcccactccgtgcagagcgatgggttcatgcaccccaggcaccgcatccagcagcttgccaccacggcgtcctggtcctcgtggccgtcgcggtcacgcgacagctctatcgaggggtttcttcttgctgcgacgttgtactcggtgaattggttcaaggttgagtcgcggggttctggctcccccgcgctcgtgcccgcggccaagcaggcgttcgacgctgctgttgtgcacgcgtgctggagcaagcatttgcagtcggagtgtgtagtgctgctggaaaatgggcagctgtgctggttcgatctggatacacggcgtggaggcaagatgaaggttggttttggcagcaaggatgacctgggggactggctaagctgcgagtacggggcgcaaccgtggacagtgatcgttgcgagcacggcggccatccttttggttgatatgagatttggggatcatggtgaatacaaggttttagcaagagttgggatggaagggttgtttgaaactgatccttttgtcaagactcaatgttaccttgcattctgcaaggctccgtttgatgattttcttatatcggtggtgacagagcgtcacctgatggtctttgatatcagacggcctttgatacccgtgttggcttggcagcatgggcttgataacccaaatcatattgctatgtttcgattatctgaactgaggccttctaaggagcatgagtgggcatcaaattcaggctttgccattctggttggttcactatggagcactgaatttaatctattcttttgtggccctaaggagcaagacgctacagaaaatgctcccctatatgcttgggatcttccatcacggatttctttgataggtcggcactgcagctgcagcattggacttatggaagaggtgttcaagggggtcgttccaggacatggctctgcatctcaactaattaggaactacatcattggttaccacgtgcttccgaacacaatgttggagtcatcattcactggctttgctttgatccgtttaacatcatcggggaagttagagatgcaaaggttccgtgcctctggagatttacatgatgatgccatttgtgatgaatcacaacataagtctgtgggttctagctcatccatttctcttgacactcacggagaaaatttttctgaaagatatgagtttctgaagttgcattacctatctaaatttctgaagggcaatctgcgcagctcattggagaatcatgattctgatgtcaacaaacgttcccgccatattattattagtgaagatgtatcagtatttgcaaaggataactctgcgtcttgttctcagtcagtttcagatttcctatgcaatgctagtgcgcccatgaacattttcgaaattgcatgtcaaagcatattgagcagactatcttcagatatccttcttgttgccttctccaaatacaaggacatgcttgcaagcaccaataaaaagcgcatatatgaatatctggaagttcctgcatgtttcccaaatagtaataaacttcggccttacctgttggcaaaatcttcaagcattagttggaatctgacgagcaaagcaaaatctggaaattctcttgttggtccagtactccccatacctgttctgctcgcgatggaagatagcaacaagggtatagacagcccttctcgggaagattccagctcagtaagccatcggtgcagagaagttattgaagcctttgttcctgaaatatcaattgctaatacagataactgtaatggatggtctgcttcacaagaggtgaaagatgataaaccatattttgtttatgagcctcagactgataggcccactcttgatgaggctgctagaaagaaggataaacaaacacagaagctagatgacccttcatgtttgcatgctcctacagcaccacctatggatgaaaactttatgacatttgtttgtggaagagctggaattcctcattctggacctgagcaagctgcatccaatttgtttgatttcagcccagtgaggatgaaatttgagtctccagctatagacatacagcctgctgaggaaaaagtatataatgcttgaagaagcaatttttagcatggcaaaacgatttcaagccataccaagacttttgtaactcatatcaaatacaaaagccaccgcagtaggcctttgcttatgctgatacttgtaatattgcattagaaagacttgggtttcgggaaagtatttctttcctgatctggagtatgcccctatatttgcatattatcattttgggtatttggatcaggtaggatgaacccacttgacttttg

SEQ ID NO: 25049 - DNA, 2959 bp, Oryza sativa
  ref <308>: DATABASE ACCESSION NUMBER: AK100491
  ref <309>: DATABASE ENTRY DATE: 2002-08-28
gagccaagctactgtagctaatggtagggcgcgtgcgacagtggagtaaagtgaagcagcagcagagaagcagagaccatttccctcctccctcctctctcgccaaacacgacgacgtcgcctcggtttagtcgtcgtcggccggcagccggatgacgggcagtagttgtccggccgattcttcccagctgctgtaccctcgccgggagggtggtgggggacgtggtggacccgttcgtgaggagggtggcgctgcgggtggcgtacggagcgcgggaggtggccaacggctgcgagctccgcccctccgccgtcgccgaccagccccgcgtcgccgtcggcggccccgacatgcgcaccttctacaccctggtgatggtggatccggacgcgccgagcccgagcgatccaaacctcagggagtacctgcactggtgagtcatcgatcgagtcagcacaccagcagctgttgtagctgacgcgccctgtgacgactgatctgattcagattcagagtccagattcagctccctgcaccgcaccctcgtcgtctcgtgtcgtctcgtctatcgtgtcgtacgagatagagcgtatagctatagccagccaagtgcccgtgttggtgttgcacttgccgccacgagatcgatcgagccctttttgcctctttttttttttaaaaaaaaaagagagaatatttttgcatccgggtagcagccagtgaatacagttacgaaacatgaacgtttgatcgttgactgcatgctagctagctgcttttcaaaagaaaaagggcacacatttcttttaatttagatgaaaaacaatatatatggatcgatcacacattaatctctctctgcaaattctgctatagtgatgtgccgagcactgtttgattgggccttctagctagttttcctcgagataataacacactcatatgtataatatactgtatataatatatgatcatgatctctggaatgatcattacgtcgtctttgggagaaaaacacatgattttacacaaactgagatatagcaaagcaggaacgacattgagtagacgatcttaagatagtatatattcaatcgatcgtacgtaggcaaataaactaattaattaatcaactgactgagatactagctttattacagaaacaacaccaaatttatcagcattcaaacattattttatttattattaatttccatggaatgtctcaaacaatgtcagaaaatcaggtgatgttttaagtgcagtatagtagttttttatgtgtacaaaagttcaatatatatttttcagaatcatttcaataaatacatcatagctgggattatcggtaaaatattgtcacatataattcctagctaggaaaaatatataaaacaatttgcctgtatctacagtagttgcacatgctaaggaattgtatatatggattggtagatattatatttgtattgcacatccatgaagagataagaggtttaattttactcttccattatctaaaaggcaggtaaaacatttccattaattatctacaaaaagtctaaaaggtaaatatcatgttggatatatgtatcaaacgatagggttttctaaaacattctgtccaacaatttaaaatgtgcttagtttctttttttccccttgtttagaaaatagtttttatgaagttattttgagtggcattttccctcaaatgtggtgtgtatgaaatttactaaacaatttaacatttgagcttaaatgcatacacatcacatgaaattaatagcaaaacaagttgatttcttctcttcctagcttggttcaactaaagtaattaagagatgataaaatattatttggataaaagatggtgtaaattaaagtatctatatctgaaactagagaatagattttgattttccttgataaatttattagagaagaatttgcagtacacataaaaacaagccaagaaagtaaaagtaattaaggagggaattaatgtaatgtgcacaattgctagaggaacatttgaaaagtaatccatatttatttgatgtcttttgcatggttgcatttccgattaatgttcatatatatgtgaggccttcgaagtaatttaccaattaaaatgataatttgcatgcacattttgtattgtatatagtgatgacataaaatgattttgattggcattgctacaaaaatgattttggcattgctgtatatgatcatacggccggggatattgattgcaatcagttgcttttgtcaatagttaattagaattttcgagtgtgaagggagcttatagacgaactgaccgaaacaataaaattaagaatcctcccaacacaaaaccctcatgtgcactgtacgtagatgtgtccaaagatcatgtgcaaaatttgtacaatcaatgaaaataggaccggatgtttcacatatatagttaattaaattccaggccataattttttaacaaaacaaggttgattatactaaatataagaaatgattataagtctattgttacaataaaggacataaaatttgccaagacaaaccaatatactccatatatagctcaaaaagtcacaagctagagatgcgagcagaagagcgcaaccacaatccttttgagttatttgtgcaacaaaaactctatttcttaatatattgacgtgcaatccttttgcgcgttcgcgaaaaagaagagcgcaaccacaacattgttgacgtcaccaactccagcacatgcaaaagtatatatgaatgtgtatatgtcaccatcttcgatcctttgacaaatctgtaagtcaacgtcatcaaacaaattggagacccagattttaaaatccgcaccaccgattgaatcgtcggtaacttagcatacaaatcttcctagatcttcatcgatgatcccagaaatacagaagacattgtcaaagatat

SEQ ID NO: 25050 - DNA, 2658 bp, Oryza sativa
  ref <308>: DATABASE ACCESSION NUMBER: AK100492
  ref <309>: DATABASE ENTRY DATE: 2002-08-28
gaccttcccccttgtcggcgcggacgctccccccacaaaaccctagcgaaaccccgcggcggcggcggaagggagaggagatagatggcgtcggaggaggagacgagccggcttttccgcatccgccgcacggtgatgcagatgctgcgggacaggggctacctcgtgacggagttggacatcgacctcccgaggggcgacttcgtcgcacgcttcggggatcccgtcgaccgcgaccatctcgtcttcagccgccacaagaaggacaacggcgccgaccagatctacgtcttcttccccaaggacgcgaagcccggggtgaagacgatcaggagctacgtggagaggatgaagcaggagagcgtgttcaacggcatcctcgtcgtgcagcaggcgctcagcgcgttcgcccgcagcgccgtgcaggaggtctcccagaagttccacctcgaggtcttccaggaagcggaactgcttgtgaacattaaggatcatacccttgtgccagagcacgagctcctgacgcctgagcagaagaagacgctgctggagcggtataccgtgaaagagactcaggtctggaaatagacattttttattttctcataggtgtagtatttgaattgatttgagcataatgtcatcgatgtttcattcatgtgttgatatctgcacaacagtaaaaggttttgtgggcagcatttttggacaactattggtgaatcatgacaattttccaggaggcttgcatacatacgtattgtttgtgtcgccattaaacatgtcacatatttcctgatacttatcatagcctcataggaaatagactagtgactagtaattactagtagcctcataggaaagtatgaggctatgaggaaatagcctcatagccttgatacttttcgagacattgtggcttgtttacataaactccccttcattacctgtactgcattcgaagtttggtatctgctgcactctagttaacacatcgcagctcaggtaacctaactccttgctgtaaaccatctaataaactaataaatcaacagttctctctgacattcagtgctgcaaatgaataaaatttgttagaatgaatataattgatagtagtgggggcatacattttaagttttaaccacattccctgaatgctctttttatcgatcttttttttctaattgttaagagaagtaaattcaggtttatgtgctgttgaactttgtctggcagtggaaaccagggctgttcataatgttgttgttgttttaagtcatcttgttttagatactgagcctaactcagttggtcaagtgtgtgaatgtaagcccagaccacccaagttcttatttaaaaatgccacctagttcctcctaggttggtcgagttttttttaaaaaaagtaatcttgttttgtgaacttttaacttattgttgtttattatgtcctgtttacaatgcgaacttgcattgttcatgttagttttaagataactggttctataaaatgtgttaggtcatagtttaacagaacaaggtgtcaaggtttctatatcacttcagtagacaatcacgataaatgacaatctggttcttgttttagagtcaaagctgctagttgagcaatgtgataatgcagttttaatgttatatgaggtggtagcagcataacctaatacaataggatatcaaggttctgtttatttatatgcttcgaatgcgacactttcagatcttaacgctgacgagcttgtcttgttacaaagttaccatgataaatactctaatggcattgacttactcagttgcatgtgattctttactatggcatgtgtcatgttggataatgggaagaatataaggcacccgatgtgctggggatgttgatctgagaagctctttgttttcatgttctaacattctatttctttgttaatttgcaatctgtttagtttgatacataatttctgaagggaatagaagaaattcaatgagtaccagtcacctctgtttcctttttacgttttttacatcccccaattttgacacctcattctaaaatataagtgtcttcgcaattatcaagataacttcaaaccttattagataactaattgaatggactccacatgcagatgtttctgtaaactttactgcagtagcacattctgttctgatgacattgaatttgtattatgaatgcagctcccccggattcaaattacggacccaatagcaagatattacggcatgaagcgtgggcaagttgtaaagatcatccgtgctagtgagaccgctggaagatatgtgacgtaccgttatgtggtgtgatcttcactacatttcacgcttggcctatgcgacgaatattaccagtgaaaatcactctgttgctaattcatttcctgtagtagaaacactcgtcagcaagtaacagaagtgctggggtgccttgtttctctttgttgagcttgtttggcatagcggtgttagcactagacgtaggtttctgtatccgtgttccatttcaccctaccaaatcatttgtggctatcagaaatgtgtttgattgggtgggtctatttcatctttcgtgcctgcctgtatgatgtttgtttgattgaaaatggcataagaatgccttccgggacc

SEQ ID NO: 25051 - DNA, 2575 bp, Oryza sativa
  ref <308>: DATABASE ACCESSION NUMBER: AK100493
  ref <309>: DATABASE ENTRY DATE: 2002-08-28
ggctgatggattcaggaggaggaggaggcggtggcgattgatggaatctgatcgaatgccgcttcaggctgggtcaatcgagctggctgcaacgatcggaggtttcctatcccctcgtgaaggtgtcaaatcagtatccttgtgccggatggtttggggataattttcgtagtgagttcataatagcgtctcatttgggattcctctggttgattcagttccctttgcaagtttgcgggtttgttcacggatttggttggcttgagatcgatcttcattcattgggagatggatgatgatgactactcctgggtgcggcgcaccaagttctcgcactccattgttaaatccaactctggcagggagcagtttggtgcattccttgatccgtttgacagttccactgcatggaggcagaaaggattcagtggagagctcatgattcatggacataatttacagccgagggcaaaaggagcagtctcaaagtcacctaggccttcaatcccgttggcgaaatcaccagtttcacaggcagagcggaagctgaaagctaagttttcagatggtgaattgaaacaacgggggaaaattagtgatggctcgttgcgagaagcatcgaaagagaaggatcgcaaggttgggcataaaggagaaggccttagcctggatatttcttgtccaattctggatcggacagttcaggatgacagttcagacacgcttgacttctctttccactcagaagagcaaagtttaaggttgctgagagtatgctcgagtccagctcctttctattcgaaggatacaactacgtttggtgattccaaaatacatagtacgtctgttaagattgttggagagggatcgaagccgaggaggagagcggaatccccaatgccgacccgtgtcatctctgaagtttttaaggaggccaaagctgccactaagaggttctctagcccacagcggcaaaggaaatctagttctccacattcaccacgttcacccgatgatagtccccggtttggctttccttcaatgagaacaccgggtaacttgaaagctaggagggcctcgtcctggccaaggaactatgacaatggagtggccaaggctgttgcattggatatacttgagagatggacaattgaccgctcacagttactcattggtcaaagatttgcatcaggggcatatagtcgtttgttccatggaatttacaaggagcagccagttgctgtcaaatttatcaggcagcctgatgaagaagaagatgcagaattggctgctaaacttgagaagcaattcactgctgaagtaaccattctggctcggctccatcatcgcaatgtcattaagagccaaaggacatatacgaggaatatgtctattgttatgcgattgtgattactaagtatatgagaggtatatgctatcaattttaaatcaattatctacctactgctttagctttcagctgaagcaatgttatcatatttatcaaatggctcaaatacatgacatactctggtggagacgctcaattttatatgtaaccttagaattattcagaataaaagaacccaaagcattttcattgtgttgtctagattgctcctgcagtttattaaccatgttgattctttaggtctcatgtaatatgctacaagaaagacatttttttaatccttttttttttgtttagctgattggggcatgtaatgctccaccggtcttttgtgtcatcactgagttcctgtgcggggggtctttgagagcttttttgcgcaagctccagcgccaaaagcttcctttggagaagatcatttgcattgctttggatattgcacatggtttggagtacattcactcgcaaagagtaatccatcgtgatgtgaaacctgagaacatcttgtttgatggagaatgttgtgcaaaggttgttgattttggagtggcttgtgaagaagtatactgcaactcattggaagatgacccaggtacttacagatggatggcaccagagatgtttaagcgcaaaccatatggtcggaaggttgacgtctacagttttggcctcgtattgtgggaattgtttagtggctcgatcccttatgaagagatgactccattgcaggcagcttttgcagttgttaataagaacttaagaccagttgttccttcaagctgtccggcgcaacttcgacttttgatcgagcaatgttggtcttgtcaaccagagaagagacctgagttttcccaagtagttcagatcctcaaaaatctcaaggaggccctggatagagatggaacgcttgacaagatcccaagcaccaactgccaggaacctcctgatcagaacaagaagagactgtccaattggatccaaagactctcgtacagtcaggccgatttctccggacctccaccgccaaagttattgtaattatatgcattcctctcttccataaatatcgtagcatctgctagatgtctctgtaaatcataaggttcttcttggtgtataaactccgcacatttttttagtggacagttcattcttgtttggctt

SEQ ID NO: 25052 - DNA, 1258 bp, Oryza sativa
  ref <308>: DATABASE ACCESSION NUMBER: AK100494
  ref <309>: DATABASE ENTRY DATE: 2002-08-28
ggaagaaatcgaagccgcgcttcccctctccgcctccgcctccgatctgctgcggcggcgcgatccggcagccggcgacctccctccgcctccttcccgaccctttcgtagctttctcaatcccctccccccctcctcgcggcgcgcgcacggccggctgagaaggtttccgagggggccgacctccttctagccatgtacaacaattatggaaattctcctggaatgcagatgcctcctatagggcagatgcctcctgccgcagggcagatgccctcggcaaatcctcagcctggccaatttggcaatccattttatggtgcgagctcaggtctaattaaaactgggttaggagcatatggagagaagctccttggttccagttcggaattcatgcaaagcaatattaacagatacttctccaacccgcagtactatttccatgtgaatgatcagtatgtcaggaacaagctgaaagttatactgtttccgttccttcacagggggcattggactaggataagtgagcctgttggtggccgactgtcgtacaaacctccaatctatgacatcaatgcaccggatctttacatccctttcatggcattcggtagcttcattattcttgcgggctttacattaggtttcatgggaaagtttactccagaagctataaatctgcagttcagcagaggactcattggatgggccttgcagattgtgatcctgaaagggctgctctactcgatgggcggtggagaggtgccgctgctcgacctggtagcttatggcggatatctatttgccgggctttcccttgctgtcatctcgaggcttctgtgggcttactcgtacttcgttatgatgccatggatgagcctttgtatgggggtgttcttggtgaggacgatgaagagggtgctcttcacggagatgaggagcagcgagaggcactcgacgcggcagcactatttcctgctcttcctggcaatttcgcaattccccctgttcttctggcttggcaacataggtgcatgaaaacatttttctggttgcggtttgtcggtataatagttaaaccgtggtgtttaggttcattgtaaaatagtttttcaatagatttcaacagcttgtgtcgtttgtccattagagtatgtttatcgacagggtttggtagatatgtgccgatgtaagtttatgagttcataactggatttatgttcgatctccgtaaaatatatatacaaaaattttgttt

SEQ ID NO: 25053 - DNA, 2618 bp, Oryza sativa
  ref <308>: DATABASE ACCESSION NUMBER: AK100495
  ref <309>: DATABASE ENTRY DATE: 2002-08-28
ggaagccgaggcaaacgcccgctcgctcccgttcgtttcgtttcgtttccatcagacgcgcggccgcagccgagcgcgagcgcggaggccgcgatccggctcgcctccccaccacctcccgttccgctccctcccccccaacccccgcatgctgcctcctccccgtcgcctcctcgccgccgccgccgtgtagctccgtccccgaccatgtctgcctattccgacaaaggggagggggatttggagattgggttggcgtcgccggaggcggagggagggggtcctggagggccggcgctggacctgtcgccacccagggcggtgaggcggccggggctagtgatgtcccactccgggaagcggctggaccagtcgccggcggcgtcgccgtcgccgtcgcggccggtgctggtgatgtcccactcgagcaaccggctggaccagtcgccggcgcggccggtgctggtgatgtcccgctccagcaaccggctggaccagtccccggcgtcgtcgccggcgtcctccaggggccccgtgctggtgatgtccggctccggtaaccgcctggacagctcgggcccgtccccgtcgccgtcgccgaccgccgcggcggctgctgcgccggtgctggtgctctcgaactccggcaagcggatggaccaggcggggcggaagaagtacgtcaagcaggtgaccggccggcacaacgacacggagctccacctcgccgcgcagcgcggggaccttgaagctgtgcgccagatcatcgctgaaatcaacgcgcagatgaccggcaccggggaggagttcgacagcgaggtcgcggagatccgcgccgccgtcgtgaacgagcccaacgaggtggaggagaccgcgctgctcatcgccgctgagaaggggtttctcgacatcgtcgtcgagctgctcaagcactccgacaaggagagcctcacgaggaagaacaagtccggattcgatgttctacacgttgccgcaaaagaaggccaccgagatattgtgaaggtactcctggatcatgatccatcccttgggaaaacgtttggccaatcaaatgtgacacctctgataactgctgcgattagaggccacattgaggtagtgaaccttctactagagagagtttctgggttggttgagctatcaaaggggaatggaaagaacgccttgcattttgctggccgtcaggggcatgttgaaattgttaaggctttgctggacgcagatcctcagcttgctcggaggactgataagaaaggccagactgctttgcacatggctgtgaaaggaactagtgctgcggttgttagggcactagtgaatgctgatccagctattgtcatgctgcctgacagaaatggcaacttagctttgcatgttgctaccaggaaaaaaagatcagagattgtaaatgagcttctccttcttccagacatgaatgtgaatgcacttactagggatcgcaagactgcgtttgacatagcggagggtcttccactttcggaggaatctgcagagataaaggattgtttgtctcgtgctggtgcagtcagagcaaatgatctaaaccagcctcgagacgagctcagaaaaacagtgaccgagatcaagaaggatgtgcacacacaacttgagcaagcaagaaaaaccaacaaaaatgtttctggcatagcaaaggagctgaggaaactccacagggaaggcatcaacaacgcaaccaattctgtcactgttgtggctgtgctctttgctacggttgcatttgctgcaatcttcactgtgccaggtggtaacgataacaacggcgtggcaatagctgtgcatgccgtatccttcaagatcttcttcatcttcaatgccattgccttgttcacatcattagcagtagtggtggttcagattacacttgttaggggagagactaaagcagagaggcgggtagtagagattatcaataagttgatgtggctggcttctgtgtgcactacagtggcgttcatatcatccgcttatattgtagttgggaagcacttccagtgggcggcgcttctggtgaccctaatcggcggagtgatcatggctggtgtgcttggtacaatgacctactatgtggtgagatccaagcgcacacgttcgatcaggaagaaggtgaaatctacaaggaggagtggctcaaactcatggcagcaaaactcagagttttcagactccgagatagaccggatatacgccatatgaagctcattctggttagttgatctctcagctttttggcagccataacacccgaatgtaaaaatgaaataggatgttataaacagaatgacccttgagattattattaggggttaactgtatacgttccaataagctggtgtaatctgccatttcctgttcttgaatcagcaggagctagccgacagtgctgttgtatactagtactacagatagactggttatcagaatatgcagcctccgctgtgctccatgtgcattgccttcagcttcatatcttcttttttgatactacaacaatgatgatagcagaatgatatgtatgctcctctgttctatcgttggctatcctaatcatgttctgt

SEQ ID NO: 25054 - DNA, 1064 bp, Oryza sativa
  ref <308>: DATABASE ACCESSION NUMBER: AK100496
  ref <309>: DATABASE ENTRY DATE: 2002-08-28
gcccccaccaccaccgccagccaccagccactgccgcggcgggaatccggttcccgcggcgacatcccccacgtctccgccgctgcaccggcaaaggcagctgcaccgcgacccacccgcgcgctcccaatcggccccaagattaagattaaaccaggagagaccacccgatcgagtgttctctcactttcgccatggagcaccgactgtggtcaagcggggctagcgacaagaacaaggcaatggttgagcagctccagaggtacgggattatcaagtcgagcaaggtcgcgcaggtgatggagaccatcgacagggggctgtttgtgcctcctggtgcttctccctatttcgacagcccgatgcccatcggttacaacgccaccatttctgcgcctcacatgcacgcctcttgcttggagctcctggagaagcaccttcagcctggcatgcgtgctctggatgttggatcaggcacagggtacctaacagcttgcttcgcgattatggttggaccagaagggcgagcagttggtgttgaacatatcccagagttggttacttcgtctattgaaaacatcaagaaaagtgcagcggctccacagttaactgatggatccctcagtatacatattaccgatggcagagaaggttggccagagctcgcaccctatgatgccatccatgtcggagctgctgcaccgcagattccacaggcgttgattgagcagctaaagcccggtggcagaatggtgatcccagttgggactatgttccaggagctgaaagtggtggacaagaaccaggatggcaaggtcagcataagagatgagacggctgtgcgctatgtgcccctcacaagcaaggatgcgcagctgcaggctaactgaatgcactaccataatattctgctgaatgtaaaaccttcaatgcgtgatcccagttacatcaagatgttattattgtacataaattggtcctaccgtatgtgtgaatcgcttggtgcttgtcaacaatgttggatgttggttcgtcatgaagcatggaagtatgtgcttgtgtcg

SEQ ID NO: 25055 - DNA, 2682 bp, Oryza sativa
  ref <308>: DATABASE ACCESSION NUMBER: AK100497
  ref <309>: DATABASE ENTRY DATE: 2002-08-28
ggtggttggccgctgttgatcggtgcaatctcccgacgtctcgaggaggaagaagaagaacacgtcgggttctctgttctttgggggactcctacagatgtaattggttctgtaagttggggacctaatcagggttaagaaatgtctgaccaggagagaggtgatattcctatgctactaagaaatgttgagctacgaacgtttcctcctagaagtacatcaatgtgcataccagttagggatgatgaatacgaagaagacacatttgtaccccatactggtcctctgtttgttcagccaccaacacaaactgcagcagcgggcattccatttacaaatacaccagatatgcctcctcgacctccacaaggaaaacaagtcaacaagccacatgcgataatgccagaagaaattggaggaaacaggtggtcttatagtgggaatgttccaaagaatgaacatttgatgatgtctggacctttgggacaatgtgacgatcctgattgtgtcaactgccctcctgcttgtaaaaacaaaaggcattttcacagaggatcaagtacattggacagtaagttccataattttctttgtgagcatggtggtggatggaagaaggaaattgagcgtttcctttcacgcattccagttatgaacccacatgcaaaagttgttcagcaatggaatcagttctttgtgatatcatgcctggttgccatattcattgacccactatttttcttcctattatcagttcaaaaggataacaagtgcattgtgttgaactggcattttgctacagcacttgcagttgtgagaagcgtgactgatgctatttattttctacacatgcttcttcagttcagactggcttatgtagctccagaatcgcgagtagtgggagctggagatttagtagacgagccaaagaaaattgctgtccgttatcttcgtggatattttttactcgacttcttcgttgtgcttccactccctcaggtgatgatattgctggtcatccctaaatatgttgggttatcaactgcaaactatgctaagaatttactgcgtatcactgttcttcttcagtatgttccccgcatcatcagatttgtaccattgcttggtggtcagtctgactcatctgccaatggattcatattcgagtcagcgtgggctaactttgtgattaaccttctaatgtttgttttggcgggacatgttgttggttcatgttggtacctatttggattgcagagggtcaaccaatgcctacggaatgcttgttctgcatcaaaaattccatcttgtgatggttttatagattgtggacgtggcattaatattgggaagcagaatcaactaagcagacagcagtggtttaatgattcagcctcaacagcttgtttcgacactggagacaacggtttccactatgggatttatgaacaggctgttttgctaactacagaggacaatgctgttaaacgttatatatattcattattttggggtttccagcaaataagtacgctagctggtaatcttgtcccaagttattttgcatgggaagtcctgtttactatggctattattggtttggggctgttgcttttcgcattacttattgggaacatgcaaaattttctccaagctcttggaagacggagactagaaatgcaacttaggaggcgtgatgttgaacagtggatgagccatagacgcctgccagaagatttaagaaggagggttagacgcgcagaaaggttcacctgggcagctacccaaggggtgaatgaagaggagcttttaagtaatttaccagaagatattcaaagggacatacgccgtcatttctttagatttcttaacaaggtccgattattcacattgatggattggcctatcttggacgctatatgtgacaaactaagacaaaacttgtatattagcggaagtgacatcctttatcaaggtggtccagttgaaaaaatggtcttcatagtgaggggaaagctagaaagcatcagtgcagatggaagcaaagctccgttacatgaaggtgatgtatgtggagaggagctcctgacatggtacttggaacactcttcagctaacagagatggtgggagaatgagattccatggtatgcgtttggttgctattcgtactgtaagatgtttaacaaatgttgaagcttttgtactaagggcaagcgatctcgaagaagtaacttcacaattttcacgattcttgcgcaatccacgagtgcagggtgcaatcaggtatgagtcaccctactggagaaccattgctgcaacgcgtattcaagtcgcatggaggtatcggaataggcgattgaagcgagctgggatgtcgaagttgaacgatcaatcttataattctgcattggaacgtggcgcgcgtgaatgtgatgctcgtcagcatgggcgggtatgatttggatcgacaaggtgctaacgtttggtcacatttttatgcgctagagccctgacatccttgtggctatcttacttggcagaatgtattctatgtgagctacataatttttttttgccccacaattagatctggtagctagagtaccaaactggaggaactacatctcatgtatataatgacggctagtttttcactaataactgtttcattcttggcctg

SEQ ID NO: 25056 - DNA, 1623 bp, Oryza sativa
  ref <308>: DATABASE ACCESSION NUMBER: AK100498
  ref <309>: DATABASE ENTRY DATE: 2002-08-28
aagaggaggaagaatcgatcttttggtggagtttgcaatggtgaagggagggagggaggcgctgctgggcgggtacgagatggggaggacgctcggggagggcaacttcggcaaggtgaagtacgcgcgccacctcgccaccggcggccacttcgccgtcaaggtcctcgaccgcggccgcgtcgtctccctccgcgccggcgaccagattcgccgcgagatcgccacgctcaagctgctcaggcacccccacgtcgtccgcctccacgaggttgctgctagcaaaactaagatttacatggtgcttgagtttgtcaatggaggtgaactgtttgagagaattgcagtaaagggaaaactatcagagaaagaaggaaggaggctttttcagcagttaattgatggtgttagctattgccatgataggggagtctaccacagagacctcaagcctgagaacgttcttgtggaccaaaaaggcaacatcaagatctctgattttggtcttagtgctttacctcaacacctcgggaatgatggattgctgcatactacctgtggtagccccaactatattgctcctgaggttctgcagaataaaggatatgatggatccttgtcagatatctggtcttgcggagtaatcctttatgtaatgcttataggatatcttccgttcgatgaccgaaatattgttgttctgtatcagaagattttcaagggtgacactcagatcccaaagtggctttcacacagtgcacaaaatcttcttcggaggattcttgaacccaatccgatgaagaggatcgacatggcagggatcaaatcacacgaatggtttcagaaggactatattcctgttcttccatatgatgatgacgatgaagatgtacagtttggggcacgtcttcctgccaaagagcaaatcaatgatgagcctggagataagaattctcatcagatcaacgctttccagttgattggaatggcatcatcccttgatctttcagggtttttcgaggatgaggaagtgtcccaaaggaggattagattcacatcaacgcatccacccaaggatgccttcgacaagattgaaagctcagcgacggagttgggattccaagttcagagggggcacagcaagctcaaattaatgcgcaattgcaagggatcaaagaaccctgagtcatttatggtgtccgccgaggtttttgagcttggcccttctgtaaatgttgtagaacttaggaagtccaacggagaccctgcactgtatagacagctctgtgagaggatctccagtgacatgggggcgcgcaacacggagcagatcttcgcaacggcatcgcttgaggatgatcttcagaacagcaatgcagggacgccgctgttcgctttgtaacgaatgctgtgttctgcaaaactgcaatgttgtaggatgatcttaggcaagaggatgtgtaggaacatatttggtcaggcatttggagaagagataagacttgagagggtaggatcatagtagtatatgatacagtgtacagaaccgagtggttcaaaaactagccaccgttgtaaagagaaagaaaggaaagatgaaataaaagaaagaaataaattgcc

SEQ ID NO: 25057 - DNA, 2108 bp, Oryza sativa
  ref <308>: DATABASE ACCESSION NUMBER: AK100499
  ref <309>: DATABASE ENTRY DATE: 2002-08-28
gacatctctccaaagcctccggctccactccaactcctctcgcctccgcggctccgcccatttcgcgggtcgccggagcagcagcagccgccgcgccagatctcgaaccttctagaagcttccgcccgcttccacccatctcccccgagggcgcctggatcccgaaccttctaggcgtcggcggccggggaaggcgcgaggggaggcggaccacgggatctgcttcgaagcccctcgcctcctctggaaccttccgggcgcggcgcggcgggatggcgagtgcaaaagtgtcgcaccccgttaaatcggcctccgaggagtccaaagtactcgtggtggagaatgggaagatggttgatgttcaggacaaggaaatcaccatggaaggcctctgttccataagttcttatgaccagtgggcacggatccctgtttctggaccgcttccgaaacctcgctacaagcatgcagctgctgtggttcaggaaaagatgtatgtttttggtggaaatcacaatggccgttaccttggtgacatgcaggttctggatttcaaatgtttatcatggtcgaagctagaagctaaaatacaatcagaagaaccttcagacttgactggaacagcttcgcttcctccttgtgctggtcatgcactggttccatggggaaacaagatcctctgtcttgcaggacacacaagggaacctacagaaagtctcagtgttaaggagtttgatccacaaacttgcacctggtcaaccttgcgcacttatggcagatcaccgagctcatgcggtggccaatcagtgactcttgttggaggcacattagtagtgtttggaggtgaaggtgatgggagatcccttctgaatgacctgcacgttcttgatctcgagaccatgacttgggatgaatttgagaccacaggcacacccccttctccaaggtcagagcatgctgctgcgtgctatgctgatcgttatctcttgatatttggcgggggttctcattctacatgtttcagtgatctacatctccttgacatgcagacgatggaatggtcaagaccagaacatcagggtattactcccgaaccaagagcagggcatgcaggtgttacggttggtgagaactggtttattactggaggtggtaataacaagaaaggtgtcccagaaacacttgtacttaacatgtcaacatttgtatggtcagtcgttactggtcttgaaggccgtgcacccccaacaagtgagggctcaagtttagtgctgcacaaagttaatggtgaagattttctggtgtcatttggaggatacagtggacgttacagtaatgagatttatgctctcaagtcaagtcgaaagtccggtgtgccatctgggcaactaaatgaacctgaaacaaatggattggcctctgtggcagaaaattctagcagaggggtcatatttgaaattgaagaacttcaagatgaaaagactattaagagggcagatacaagcaaaactttgttgcaagcagttaagggtgagaagagtcatatagaagaaaaacttaaccaggaagagctgcagagttccagactgaagcaggaattagctaacgtggagacaaaaaatgtggaacttacaaaggaacttgacttagtccgcaatcaactttctgctgaagaagcaagggcgtcgcaacttgagaacgaaatttcggatcttcaacaaaggctgcagaagatggagaccctggaaaaggagtccgaatcgcttcggcttgaaaaggatgcagagtccgacgattcatcttcaggcagcaaccagcggcctgctgataagggcttctggaggtggaatggataaaaattcatcgatacaggtagtagcatactagcattggatgtatggaggatatttcctgcagagttgcacattctttcaatttttgcccatttcttttttcccctggagagcccagtattcacaagtagatcaaatatcgaaaaatgtttactcacagagaaacaggatgatagcaaatcgcggttccatcaagagaactgatcaaccatgagaagaatttaataaagtttacaggtggttctatttttttcc

SEQ ID NO: 25058 - DNA, 2211 bp, Oryza sativa
  ref <308>: DATABASE ACCESSION NUMBER: AK100500
  ref <309>: DATABASE ENTRY DATE: 2002-08-28
gtaagcacacccccctctcgtctcgtcgtctccgttgccggcacgcacgccgccgccgcctcgctcccctctcttctggcgcggttgcggtgccgccgccccgtcctacgaccctgctgcggggacgcggcttcaaggaggacctgacaaaatggcaatggggatgagagcccgggaatctgtgaacatgtcggaggacctaactcaggccattgcgccttatgctactgccctgcacgatgcgtcgctccagtcccactgttcgtcatgcttccaccgcataccggctcaatccccccacgacatgtcttgcacgatgtgcggttctgttcgatattgctgctcggactgcttgatctcggactgtgaagtgcattcatcttctggtgaatgttgcttctttgtgaaacatctcagggaagcctccccatccactcttaccgaagaaacgagcgatatccgtgctgctctccgccttctctattcgtttgagacgcgtggtcttgtttcatctgattcggtcagcagctccaataggatcggcgggctttctgcaagtggtattagggaggttctggaggagggtggggagattgccgagggggtgctggaggggagtttgttgatgttgtctgccagaaaatcgaggatgaagaactatgttggtctctccaatggcttgacgatagagaaggtggcattgtgggcagtgatgacaaatagtgttgagaatgaagggtgtacttcaaacaaaccagaatcatgtgtagttcctgttagcaaaggagctgcgccagatgcggtaatggagtttaactgatggttttatttagtattcactaaacttttgcttgcatcatttggaggtatctattacacactgtagagtgagttattggactctgtattggttgcagtggcatgcttggcagaatgaagaagctggttttgctcatgctcaatgtaaatatggtccacgagttgttgttcgctgcacaaagccaatcaacaagggagatgaagttttcataacatacattgatcttcttcagacaaggtgtgatgctaggaacttgaaatcgccacataatgctgttacagacccagcaattgaggatttggacaataacttacaacaggcaatatctgaatactcattccttgatgactctaaagcttgctgtgatgtaattgaaagcatgctttcagaaaacttgatgaatgatttgcagcaagaggaactttcaccaaggaaatacatactacaccccctacaccatatcagtgtcagcagtttcatgatacttgcctctgcataccggtgcagtgccttcaaatcaagcactgataatttgcatggagaaaattgtgatttcattttcagaatgaccaaagctgcagcagcttattcaatagttcttgcaggggctacacatcacttgtttttatctgaatgttcctttgtgacccttctgtcgcattttttgctaagcactggacagtccatattagattttgctgaatgtattaagggagaaacaaggaaaaacatgcctgaagctatcttcagctttgcttcatgttcaacaaattcggcaaaacatgattctgtgcggtacaatcaattcagatcaacttgtgagaagtttggcaagcccttgttatctttatcgttgcagtgctggccatttttagcccaaggcttaccctgcctggaaaagataaagaaccccatagatttcagttggcttggtccagcaatatttcaggctttccagctttctgaggaagattctttcaacctttctggtaaacatgcgccagcaactctcatcgagcaacagaaagagtgcattctgagcttagctgtttgctgcatcacctacagcaaataccttgcaagtatatgctatggtccagaacattatttggcaaatcgtgctaaagatctgcttgaatgtatcaatcatgtacaatgatctctctgtgatatatctctggagctgatgtttgatgtgctctattgtctttatcaaggtgagcagcttacttttaagattgttgtaggactgaactgatagtttcttttacaagcagaacttatcagcaatttttgtcaagggggagttacatggatgctattaacgttttctgttttattgtgattaacaaagctactatagattaacagtgacaaaatcagtttgtggg

SEQ ID NO: 25059 - DNA, 3064 bp, Oryza sativa
  ref <308>: DATABASE ACCESSION NUMBER: AK100501
  ref <309>: DATABASE ENTRY DATE: 2002-08-28
gatcatcccaagcggcacagcagcctcgagctgaactgaagcaggggaggggaggagaggagaggagagagcaacgcgttcaccgttgagagaagagaaggaagtaagacgagcgcaatgcgtcgcgtcacggtgctcgttctgctcctcgcctgcgcggcggcgcgcgccgccgccgccgtcgtcaccgacgggctgttgccgaacggcaacttcgaggagggcccacccaagtcggacctggtgaacggcacggtggtgcgcggcgcgaacgccatcccgcggtgggagacgtccgggttcgtggagtacatcgagtccgggcacaagcagggggacatgctgctggtggtgccgcagggcgcgcacgccgtgcgcctcggcaacgaggcgtccatccggcagcggctcgccgtgaccaggggcgcctactacgccgtcacgtttagcgcggcgcgcacctgcgcccaggcggagcagctcaacgtgtcggtgagccccgagtggggggtgctccccatgcagaccatctacggcagcaacgggtgggactcgtacgcgtgggcgttcaaggcgaagatggacgaggtggcgctcgtcatccacaacccgggcgtggaggaggagcccggcgtgcggcccgctcatcgacggcgtcgccatcagggcgctgtacccgccgacgctggccaaggggaacatgctcaagaacggcgggttcgaggagggcccctacttcctccccaacgcgtcgtggggggtgttgaatttcagctaagcagaaatcaacacaagtccaagtcaagtcaagcgttctcactaaatcaaaccccctcactgccaccttcgtttgcgcgccatggagcttgccctggttggcgacccttcgaatggcgtggcgaagccgtcgtgcgactccgtcggctcgctgcccgccgtcagctccaaggccgtcatccacccgccggtgaccagcgcggcgggcgccacgctcggcaggcacctcgcgaggcgcctcgtgcagatcggcgccaccgacgtgttcgccgtccccggggacttcaacctcaccctgctcgactacctcatcgccgagcccgggctcaagctcatcggctgctgcaacgagctcaacgccgggtacgcggccgacggctacgcccgcgcccgcggcgtcggcgcgtgcgccgtcacgttcaccgtcggtggcctcagcgtgctcaacgccatcgccggcgcctacagcgagaacctccccgtgatctgcatcgtcggcgggcccaactccaacgactacggcaccaaccgcatcctgcaccacaccatcggcctcccggacttctcacaggagctccgctgcttccagaccatcacctgctaccaggccgtcattaacaacctcgacgacgcgcacgagcagatcgacaccgccatagcgacggcactaagggagagcaagccagtgtacatcagcgtgggctgcaacctggcgggcctctctcacccgacgtttagccgcgagccagtgccgttgttcatctcgccaagattgagcaacaaggcgaacttggagcacgccgtcgaagccgcggcggacttcctgaagcaaggcggtgaagccggtgatggtcggggggccaaagatccgggtggccaaggcgaagaaggcgttcgccggcatcgcggagtcgagcgggtacccgttcgcggtgatgccgtccgccaagggcctcgtgccggagcaccacccgcggttcatcggcacgtactggggcgccgtgagcaccaccttctgcgccgagatcgtcgagtccgccgacgcctacctcttcgccggcccgatcttcaacgactacagctccgtcggctactccctgctgctgaagcgggagaaggccgtcatcgtgcagcccgaccgcgtggtggtcggcaacggcccggcgttcggctgtatcctcatgactgagttcctcgacgcgctcgccaaacgcctcgaccgcaacacgacggcgtacgacaactaccgccgcatcttcatccccgaccgcgagccgcccaacggccagcccgacgagccactcagggtcaacatcctcttcaagcacatcaaggagttgctgtccggcgacaccgccgtcatcgccgagaccggtgactcgtggttcaactgccagaagctcaggctccccgagggctgcgggtacgagttccagatgcagtacggctcgatcgggtggtccgtcggcgccacgctcggctacgcccaggcggccaaggacaagcgcgtcatctcctgcatcggtgacggtagcttccagatgacggcgcaggacgtgtcgacgatgttgcggtgcgggcagaagagcatcatcttcctcatcaataatggtgggtacaccatcgaggtggagatccacgacgggccgtacaacgtcatcaagaactgggactacaccggcctcatcgacgccatccacaactctgacggcaactgctggacaaagaaggtccggactgaggaggagctgatagaggcgatcgcgacggcaacgggcgccaagaaagattgcctctgcttcatcgagatcatcgtgcacaaggatgacacgagcaaagagcttctcgagtggggatccagggtatcggctgccaacagcaggccgccgaatccccagtgattttgctagctggtcttctcatgacgcacactcgaatgcgctagtctgccaatgtccgagatatgctgcccattatcgtctgtgaattaattgtctaatgcgtctgcatccagttaaattttctcagccgagaggttgaagtatttatgtagatggggttgcccgtcttatgattatgtttgtaattcaatatgcttggcattaatgttttgtaaacctgtaatgtattgcgatgaaataacatggacgatttgaaggagaagaaaatcacatatctagacaatttacttgaccattatagtactatcagattagttgatcattatagcactatcagactgtctcgttgtttgctaatcaatgtcgaaataagaattttgaagttt

SEQ ID NO: 25060 - DNA, 2385 bp, Oryza sativa
  ref <308>: DATABASE ACCESSION NUMBER: AK100502
  ref <309>: DATABASE ENTRY DATE: 2002-08-28
ggcttgttacaacttaccaagagattgaaatattttttttgtttacgtgtatacaaaagtaaaatgacagataatctaattgatgatgaaattgtcgaggttcgatcacatcgaccaacaagttcaacaatatcgacgacatcacgtcgtccaatctacattgaaactgaagtaagaaccgatacggtaacaacacgtcggatggcatcagcagctgcaaatagaagtgtacaagatgtactcgaaaataccaagtcacctcttcaggatcgtcattcaacaagttatagttatgctcaaagtggtagttatgcaccaggttcacgtactggtagttacgatcttcccgtcacatctcgacgttcagtacaaacaaatcaaccagcgggacttgtttcgacgataaaatctgttttgtctcaaccatctcaaatcatttccaatgttcaaaatcaattaaccaacgggtatgaagttatcaaagatcgtgttggtcaatttattggtcaacaaacaggtgagaattcaccgacacgtggtgttacaagtggtggtacacgatactcgcgtacatcatctcaatcatcggcatcaggtagtcgagctaaaggttataatcttcgttcacgtcctgttcattcaacaccacgtgataacgattccgatcaaggtacatcacgtaaaacaacgaagaatcaaaagagttatcaacaacaaggtgaaatcgacgaagaagaagaagactatagcggcaatgctgtcaattattattttcaaaaatatgttcgtttagtcaaaagactctttcgaacaccgcgtgacatatacgattatcttgctgataaattaagtttctcacctttatggtttcttcttccacttctttttgttcttggtctctacttaatacctccatttgcgtgtcgaccattcgagcgttttcttcatcccaaagtcaacactgtttgtaaagacgtgaccaacgtagccaaagatttccgagataatacctatgatttcactcgtcgacatacatatgatcgtggtgttcgtaatttgaaacaggtttatggcacatatagcgatttgaagaattcggtattaagttcattgaatgatgtttataactcattgagaaattcgttacgaggcggtgtcggtggtgtgaaaaatcgagtagctgatgttgtcgaaacaactgctgaaaatgccaaagaatattatgatgctggtattcaaaaagtgaataatcttatcgatgaacttaaacaagaacgtgaaaaacttcttggaacacgacatacattgaatccagctcaagaaaaagaattaactgaattactccgaaaatatatcgatgaatatgctgctgatgaaactggtcaagctgattttgcacttgaagccaatggaggaaaagttattgatacacgttgtcaagaatatacggatgaacctcgacaaaatgttgtcaaatttctcggcattccaattgttcacatgtccaaacaaccagatatcatcatcaaacatggacgtatgcctggtcaatgttttccattcaaaggtgatcatggaagtattgtcattcgattagctgttcctgtcgtaccaactgaatttgtggtcgaacatttagcgaaaagtatttcaatcgttggtcatatcaatagcgcaccgaataattttacagtttacgcattaaaagataaacatgataaagaaggtactgttcttggacgatattattatgatgctgaaaatggacctgcacttcaacgatttaaacctcaaattgccaatgtacctgttgtagaatatatcgaaattcaagtaacatccaattggggcaatccaaattacacttgtttatatcgatttcgtgttcatggtgacatgcaaactgtcgctcctacagccgcttaaaaacaaatcttccatcaactagtttatcgagataaatttcaaagaaaagagacactgaaaatccaatttccttcctttttttttctttcgcatcaatccaatttgttcatattgaattaaattgaatcttgatgtttatgtattattaatctttttgtttgttttgtaaaacataatttcttgctattccttagtttgtttcttgtatgattatgtatttagaagaaaagcctaaacacgtatgaaaaaaattaatctagaaattctctttttttttctgtttatttcttttctttttgtctctatatgtctgtgtgggtatttgctaaatctcgcgttgttttttcctgttcatatgtgtgtaattgtcggtgtgtttctcttacattttctttttgacgtcgtcgaacatatctttgaaaaataaaaatagacattttgcaaataacagcaattatc

SEQ ID NO: 25061 - DNA, 2226 bp, Oryza sativa
  ref <308>: DATABASE ACCESSION NUMBER: AK100503
  ref <309>: DATABASE ENTRY DATE: 2002-08-28
ggcatcgctactccaactcatcatcagcagcagcaaaagccagccagcgacctctccattctctccaaatctctctcgctttccatctccattttcctcgcaatcattccgttcagttatatctgctcgttgctcgttgattcgctcgctttctgtccctgcgatctgtcgccgccgtcgttttgccggcgagaacggcggctagggaggcggcggcgcatctgtgctcctaaatgacagaggaagtggtcaaagaggttatcatagtctcaactcccgaatcatctaaatcgacaagcggcgatttcccggtgaattctcttgaaaatgtggatgtcggcagtgtgccatctgacctgaagaggaaggagaagtcagtgccacattacctgagagcatccactggttcttgccatgacagctgcaaatttggggcacatcattcccctgaacccaagaagtactggcctgttcgtcgcaggcgacatcaggaccgtgccaatgccgggtgcggaaagcaaggccaggatgaaatccagacacaaaaaggcagatccagaaacaaggacctggagctgaagatttgtcttgtgaaagatggtaatgttcatgacaagcctgaattcatcgaggtgaagaagccgcctattgaaatggcatctgacaactctgaaacctcaccatgcgtgcaagatcagttgtcatcagctgaagaatccaaacgtgttgaggatggagctgatctgccatgtggtgatgataaattcttgatccctgatggcaatgctgcatgttttgtggatggagaatcatcagagggagctgtaagcattgagctggagatgccgttggccatccaggacagtgacgcgtctgacgatcatatcgcagatgccatttcgcctcctgaatgtgtgtacaaagctggtgaacagttacttgtggatgacatgtgtgatgatggatcaggaaatgagtgtgcaggttcagagaagaagagcactcagattgtgatggcctccgagaagcgtgaaaaatctgggcatggaactaaatcgaagagtttgtataatgtttcagtaaaaccgaaggtgaaagagacatcgactgcaacgcgaagcaatgcgtcaagccagaaaattgtaagaacattggatcggaaagcttcaggtacaacaattgaaagctccaatggatcaaaggtagtgagagccaccaagttcaatagggacaagaaattcagatctaccgtcgcatcgaatgtaccaaaagtgaaggagatcaaagttacatcaccagctactgtgatggatcaatcttccaaacctactaggcaatcaaagctgaagtccttggttgcaaatgatgctccatctccatcagttaattcagagaaacaaactgacagaaagatgacagtgatgaatgttgccaagaatgctcgtgtttggcaaaagaaggaagaagagaaaataagtccagtgaaactgtctcgttctataaacttgtcatccaagtcccttttgagcataaagatgagagcagtcaagaaagaaaaacctgcttccctagtgaagagcaacaagaaggtgtatggagcagaaaatgctgttgctgacgttaaggagaaaaacctgaagtcagcttcaccaaaagtgagaaaagtagaagttagcaagaaagaaagccgttctcagaaagaaaattctgccactccaagaactgaaaacacaaggcagccaaagtcctcaaccatcccagcgcagtcgcctcgcaagctaactttccgacgaggaaaggtactgaacctacagagcaattcagagtcgagcagcacgccgagacggctccggttcaggcctgcaaagactgtagaagacagcaacaggagcaaagaatccaccagagggagaaggaagagtgacagtgcagcctcttccgggtcaaaagattcaggctcttcgaaacctgaagttgtcatcctgaggcatcaggatgtcagggacaagaagaagaacgagcagggattgttgaacaatgtgatcgaggagacagcgagcaagcttgtgagacgaggaagagcaaggtgaaggccctcgtcggcgccttcgagacagtgatctcgcttcaagaaagtaaggtggctccagttacagctgcagctctgagctgaatgatgtgtgttttcgttttggagcttgtgaacttcctgtaaattttggagcc

SEQ ID NO: 25062 - DNA, 3315 bp, Oryza sativa
  ref <308>: DATABASE ACCESSION NUMBER: AK100504
  ref <309>: DATABASE ENTRY DATE: 2002-08-28
gatggggagggatggttggattggattggattggatcgtgcgtgggaatgggatcgcagcgatctgcgcgcgcgggggtgtgtggcacgggagcgtatttagttggttgttttgtttggtggttattttagatgcttggttgaaatctggctgaaaggcaccacgaattccctttacttctggtgtttatcgaggatgcacagcggtttcgacgagatgatcttatatgaggctgatcgtactggagatgtgttcatagcatccgctctgcttaggattaaccagtttagaatacacggtcttatggattctgtgatttctgcggagttagtgcctcacagcaacgccattgcttatatcagatatcttagtggagaactgtgccagcaatcgggtttacctgtgggtgactagtcacacccattttggttcacttggatacttggattacccttaaataattaattagttacagagaatatgggttctcctctttttaacaaagaatttacgttttgtttgctggtcctagcttaatactatgttatccaattcagacaggccgaaagtaaaatttcagctcattgcatgacatggcttattacttcttattttcttacctttgtcaaatgtggttatccttaactgctgggtgtgccatgtgcagttgctgttaaatcttcagattagtaaaaatcctaaacggtaattgtattagggcctaggtgatggagcttgataaccttgtttgagcagctagtatttcttttaatcttgtagtacacagatatagtgctatacttttacaattacagttttacttactgcatattggagcttcactctttctttttatctacacagaaatatttgtaagagcgcactgacaaaaattaaacagtggattttcatttatattcgtaggggcacgcgaaaaaaaaaataatgtggaggttcaatcccttcggggggaaagtacaaaatggattggaaggtcgcaccattgatgttggcaacattaagattacagtacgcaatgctattgcacaaggaggtttctcttgtgtatatctggcatccgacgcaatgcatccatcaaagcagtacgcaatgaagcacatcatctgcaacgactcagaattgcttgatcttgtaatggaggagatccaggtgatgaacctcctcaaagggcatcctaatgtggttacactagttgcccatgatgtttttgatatgggccgcacaaaggaggcactacttgttatggagttctgtgagaagtccttggttagcgcaatggagagcagaggtactggttattatgaggagaagaaggcacttttgattctcagagatgtatgcaatgcagtttttgctatgcatggtcagtcaccaccaattgcacatagggatctgaaagctgaaaatgttcttcttggattagacggtgcatggaaattgtgcgattttggaagcacatcaacaaaccataaatgctttgataggccagaagagatggggattgaggaagatatcatccggaagcatacaaccccagcatatagggcccctgagatgtgggatctttacagaagagaagttattagtgagaaagtcgatatctgggccttggggtgccttctatatagaatatgctacttcaagtctgcatttgatggagagtccaagttgcagatacttaatggcaattatcgtattccagagcaacccaagtatagtgccgctgtcacaaagttgatcaaagatatgctggaagcctctccaaatgacagacctgatgtcacgcaggcaagagctttgattgattggccattcatctccatgatactaggtctggtttcgtgtaaatgaactactacctctcgagttacagaaaaatctacccgatggagcttcgtcaggcatttccatgagtttgcaagatgaaggtgcttataaaagaacacatgtgatgcctagaaggaacccgcctcctcctccaatagaacaatccaatagttcgttatctcatggaagctcaaaggcaggagatgcacctctaggtgcattttgggcaacacagcatgcacagggttctcaagttgcagataataggaactctttgtttgatgaggaaccaataaaaccatcaccttcatcaaagcataaccaaagcagaggggatatcagcatcagtgcccctggagatagacatggtcgttctggccaggctgtccggggtacaccaagtaactctgtatcaaacaatgggcttgcaagtggtgctaacacaaatctgttcatggagtcacaaagttctttgaaaactaaagaatcacaaccaaaatcagagaaggatcccttcaacagctttgtcgctgattttgaagcaaacaatctccattctgggaccaatgttgctagtaaggaatctgagcttgaagcagaagtgtccaatctgaaggagcagttgaagaaaacatcatcagagaaggccgagatgacagccaagtttgaaaagttgtctgcaatatgccgctcccagcgccaggagattcaagagctcaagcgcactcttgccgagactacacctccatcaagcaaagtcagctcaagattaccagactccgggccacagcgtaaggagaagattgaaggaacggtgtgggagcttgagcaaggaatgctcgcaaactcattacctagctctgaagccaaaacatggcaggcattccctgaccccaaatctcaacctgctcaggtcagaccaaaggttgatcattctaccaatggagcgcaaaacctggcaaggaacgcaaactcaagacaatcaccagatggttggggtttcgggccagatagtttcaggacatcaccagggagtactgccgctcagatcaacaggcccactgctcaggggagttcctcccagagattcagctcaggagcagcgaagaaagtggagcaaccatcagggtgggccggattctaacttctcgtggccattcggcaattgtccattctcattccgaactactagctgccctatgctgcaattgcgagttgaagattgatgagtgtggctatggttcttgccctggcgtagggtgccatgattggttattttcaacattgttcatagttggtcaagccgacctagacattggtgttctgcggccgttttgccaataccttgtcaataaacacatcttcaaatctaattacaacgtctgtatgtactttacgtgtgaagcatgaacacgtgatggcaatgagccctggcacaacgcacaacagccatgccatttacatgct

SEQ ID NO: 25063 - DNA, 2588 bp, Oryza sativa
  ref <308>: DATABASE ACCESSION NUMBER: AK100505
  ref <309>: DATABASE ENTRY DATE: 2002-08-28
gaggcgcgtaaaaaaaaaaggaaaaaactcccagccgccatgcccctctcatctctctcgctctctcctgcgcggcgcctggatttggcttggccgtggccgccgctgggtgtcctcccagtgccgtggccgccgccgggtgtcctccctacgttgctgccattctccgctcgaaggggatcgatgttgtggatgggtggtgtcctcgcagcgccctcactgccggtgctctccttgctacgccgccgctgacgtagactcgaaggggaggctgtgggtgttggatgcggcagccgcgatttctttgctgttgactcctcacatgtcaaccacgactaggatcctgagggccggatttgcacgggctgaatcgatgcttcaagggttcttgattgattttgccagcgaatgttggggctgctggttcaatcaggcagctctggtcaactttattggtgactatcctttcctagactttcttctatttcttggtcgaggtctttgtcttttgtgggtatctgtcttgcgtggcattttcttggttacgttgcttctgccgcgttgtcaactcactgggtgctgtttcgtataaggcttccaatggtatacgtgcttatttcagaccttatgtatggggacactaataaacagttcaaggcaagagtatctaggcaatgggactaccatgatctgaatgatgaaacaaaaatcttccacactgatcttgtcttgctggatgaaaagggcaatagcatccatgttcaaatctatccacctgccatgattaagcttaggactcttctacaggaagggaaggtttactactttgactccttctctgtcagatatgcaaactgaacatataggccagttacgaaccctttgatgatctcattcactaaatggacaaccttagaagaatgcattgatgcttctgatgatttccctgccataactttttcattgacaccttttcaagacgtcccgtctcttgtggacaaaaatgctttctatgttgatattatgggtgtcataactgaaattggtgcaacagacactctacgcccaaaatcaagaaacacagaaactttgaaaagaacaatgcagatttgggatgcaagcaattctacactgcctatcacactatggggaaatactgcagctgcattcaatgcagaagaattatacaatgctggtcaaaagaaacctcaggttattgtttttgttggaacagttgtcaagaactacaaagggataggactaactttaaatggaagttcaccatgcaaatggtagattaaccttgatatgcctgaagtgcttgagttaaaagaaagctttagcgcaaactttcaacctatcaagtgggttgaactgctaccacagggtttaaccaggatattccagaagaaaaaaccatagcacaaatccttgctctcaacccacacaaacatgcgcgagcacgttttatagtcagagtgactattaaaggcatatcaagcaacagctcctggtggtattattcatgtgacatatgctacaagacctcaaaaccatatggttccacctataaatgcaccagctgctccaatgtaggcataccagtgccaagatacaaggttgtgttgatcgctgctgatgatactgctcaagctacatttatcctctttgggagaatagcacaacgcctcgtacgcaaaccggttgagactctcattgaccaaaatccacctgacagtgaatatattccagatgagattgtagctcttttcaaccaaacctttatctggaacatcagcttcacacaagatactattatgaaaaatcaagaaaccttacagactcaagcagctctctccaactagcaccagcaacaagtgaaggcagtacaggatcaaagatagaagcacaaacgacagaaagtatgttaccaatggatagtccatcgacaccaacaaggtatactatcagttctgcttcagatcagacaccaactagcaagctaatgcaccagcaccaagcaagaaaagctatgtcctatcagtctctcccaagccagctcaagataaacagatctcattctcacatgatcctaaggcaacaactgagacaaaaattaagggagaacctccgcagattgcatcgtctgttgagctatcttctgctactcaggacaaggcaaaggcactagcaatagcagcagaagatactccatcagcatccccatcaccgcctaccaaaaacattcccccaaaaaggcctgcagcctcagcctcagcctcagctgctaagaaactatttaaagatgacagtcagcagaaacataagaaaagcggatgaagaaggaaacaacatgcagcacattactgtcccttttggttatatgtccaggatgtcaccagtatgcacacccacccttagaagcaacgccatttgtttagaacctctgcattatggccactaatgtaaatagctgctgtcatatatatggcgtttgcttcgtagaatccttttgctttacatgaaactgcaatccagactatgaccaagcacttatggttggaatcctataactcttaattattatc

SEQ ID NO: 25064 - DNA, 2123 bp, Oryza sativa
  ref <308>: DATABASE ACCESSION NUMBER: AK100506
  ref <309>: DATABASE ENTRY DATE: 2002-08-28
ggcacttccccctcctgctcctcctcctcgccgatcccccaatccctaaccctagcctccacctcctcctcctcctcatcctccgggatgcgcgatgcgggggaggggtcggactcgccgccgtcggagatgtcggaggatgggtcaggagggagcggggacggggacggggacggggacgggggagggggaggcggggacaggtggatgccggatctgaggggagggaacggcggcggcggcggaggaggcggagggggagggaggtgggcgccgccggaccaggtgctggagaacgtgctggagagcgtgctggagttcctgacggcggcgcgggaccggaacgcggcgtcgctggtgtgccggtcgtggtaccgcgccgaggcgcagacgcggcgggagctgttcatcggcaactgctacgcggtgtcgccgcgccgcgccgtggagcggttcggaggggtgcgcgccgtggtgctcaaggggaagccgcggttcgcggacttcagcctcgtgccctacggctggggcgcctacgtctccccctgggtcgccgcgctcggccccgcctacccgcacctcgagcgcatctgcctcaagcgcatgaccgtctccaacgacgacctcgcgctcatcgccaagtcattcccgctgttcaaggagctgtcgctggtgtgctgcgatgggttcagcacgctaggcctcgccgccatcgccgagcggtgccggcatctccgtgtgctggatctgattgaagactatattgacgaggaggaggatgagctagtggattggatctccaagttcccggagtccaacacgtcgctggagtcacttgtgtttgattgtgttagtgtcccattcaactttgaggccctggaggcgcttgttgcacgctcaccagctatgcgccggttgcgaatgaatcaccatgtgacagtagagcaattgcgccgtctaatggcaagggctccccagctcacacaccttggtactggtgcattccgttctgagccaggccctggtggtgctctgtctgttactgagcttgctacatcttttgcggcatctaggtctctgatttgtttgtcaggtttccgggatgtcaatccagaatacctcccagcaatccacccagtctgcgctaatctcacttcccttaattttagctttgcaaacctaactgctgaggagctcacaccgattattcgcaactgcgtccgtcttcgcactttctgggttctagatacagtgggtgatgaaggccttcgggctgtggctgagacatgctcagatcttcgtgagctgcgagtttttcctttcgatgccactgaggattctgagggatcggtttcagatgttggtcttcaggcaatctcggaagggtgccggaagcttgaatcaattctctacttttgccagcgcatgacaaatgcagcagtaattgctatgtccaagaactgttctgacctggtaacattccgtctttgtattatggggcgacaccgccctgatcggatcactggggagcccatggatgatggttttggggcaattgtgatgaactgcaagaagctcactagactttcagtctctggtctgctcactgataaggcgtttgcatacattggaaaatatgggaaactaataaagacactgtctgttgccttcgctggaaatagtgacatgtctctccaatctgtgtttgaaggatgcactaggttgcaaaagcttgaggtcagagatagtccttttagtgataagggattgctctctggcctgagctatttttacaacatgaggttcttatggatgaattcatgcaggctaaccatgaggggttgtagagatgtagctcagcaaatgcctgacttggtggttgaagtgatgaaggatcatcttgatgatgaaggggagatggagactgttgataaactgtacttgtatcgatcactggcaggagcaaggaatgatgcaccttcatttgtcaacatcttgtagtactgctgcaggaagaagtttgttgtactcacaaaacaagtttgttctattaaaccttatcattgctattgtattcctgaaccctgatcagtctatcagaatcagacacagaagcttcccgc

SEQ ID NO: 25065 - DNA, 2135 bp, Oryza sativa
  ref <308>: DATABASE ACCESSION NUMBER: AK100507
  ref <309>: DATABASE ENTRY DATE: 2002-08-28
gatcgcattgtttcaaaaccccccaaaacccaagggctaatcgggcaacctccttccccacgccgccgccgccgcgatgccccctcccttcccgacggcgaccgccgccgcctccaccacctcccacctcgccctcctcctcctcctctcatcctcctccgtcttcttcctctacaagtccctccgcctccgccgcaacaacccaccatcccctcctccgggccagggccccgccccaaccccgaccctcctctacgcctccgccaccggcacctccaaggccctcgccgccggcctctcccgccgcctcgcggaggccggcgtcaccgcccaccccgccgacgccgcggccttcgacccggacgacctcccctccctcccgctgctgctgctcgtgctccccgccgcgaggagcttctcgcggtggctgcgcgcgctcggcgccgccgaggtggtcgccgtcggggagggtgacgtggatggtggggatctcgaggtcgtgttcgaggagtggtgtgggagggtggtgagggtggtgaaaggggaggagatcggagaggggcacaacggagagagcgatggctttgatgagttggaagaggaggaatccgatgatgacgacgacgaagaggaggtcgatggcggggaggtcgacatggaggacattgccgggaaggcaccggcggcaaggaggcggaatgggaaggtggagggggctttgtccaacggaggggagaatggtgtgagggacatggtcactccaatcatcaggacgagtttagagaagcaaggttacaaaattatcggttctcatagtggggtgaagatttgtagatggacaaagtcacaactccgaggccgcggagggtgttacaagcactcattttatggcatagaaagtcacagatgtatggaggcaactccaagtctggcctgtgcaaataagtgtgtgttttgttggaggcatcacacaaatcctgttgggaagagttggaaatggaagatggatgatcctctcgacattgttaatgctgcaattgatcaacacacaaagatggttaagcagatgaaaggggtaccaggagtaaagccagagaggctggcagagggtctatctcctagacattgtgcattatctctggtcggggaaccgattatgtatccagagataaatgttctgatcgatgagctacaccgcagacacatatctacatttcttgtcactaatgcacagtttcctgataagattaagacactgaaaccaatcactcagctgtatgtcagtgtggatgcagctacaaaggaaagcttgaaagctgtcgacagaccattatttcagacttctgggagcgttttctggattcactgaagtcactgcatgacaaagatcaacgaactgtctaccggctgacattggttaaaggctggaatgcagaagagatagatggttatgcaaagttactaagccttggccaacccgatttcattgaaatcaagggtgtgacatattgtggctcgtcagcaacttccaagttaacgatggaaaatgtcccctggcactctgatgtaaaagatttctcagaggctttggcattaaaaagcggtggcgtgtatgaagtagcttgtgagcatgctcattcatgctgtgttctacttgcaaaggtggataagttcaagatcaacggcaaatggcatacctggatagattatgatcgattccatgaactggtgacatccggaaagccttttaggagccaagattacatggctctcacaccttcctgggctgtctatggtgcagaggaaggtggctttgatccagatcaatctcgttacaagaaagaaagacgtcatggtgcagcagcgctcaaagactaacctatctccaatcattaccaattttgttaccaagccctcggattgcttccttgaaggactaacctattttctagatttcaatagtcaaaattttgcggtggccttttccatttcatggatctgcctgtgtgtatcaatccgttcctggattaattgtgtacgccataggcctatactaaatattttacaacatggagctctgttttatttctctgaccagatggtttaaaaatgttgtgatgtttttcgtgatcttc

SEQ ID NO: 25066 - DNA, 3645 bp, Oryza sativa
  ref <308>: DATABASE ACCESSION NUMBER: AK100508
  ref <309>: DATABASE ENTRY DATE: 2002-08-28
ggtcatcaacctccctccaccttcattccacctcaccacgcctcctcccattcccgtttcctcggccgcaaatccagtcccggcgcccgcatttcccgttcccaaactcacctgctcctcccctccctgtttgcaatccagcctctaatcgggatcggcggcggcggcgtcgctgtcgagggcgacgtagggaggagtcgcggtttcggctccgcggtttggagagtttgattcggtctctcccctttttctcatcctttaatccggaaatttgcttgctctgtttcttggtccaccctcgccgccgctggacaggtggacgctgcggcggtgcggctccggcgccggttcgcctcccgtagagaatcgcgcggcggcaggatccagcaaggccgccgccgccgccgctgggaatcttctcttccgcgtccgggatttccggctcagcttcaagaaaatacttgctgagctttccctagaaagtaaaacaaataaaggaatatgagatcagtagttcggtcgcttcgccagctccggcgattcggccagctccatgcagagagacactcatcaacgaatagattgatcaagcagcagaatgctctagtgctgtgcagttcagcttccagttcaatgagcacattatgttgtaatagagaaattggcagatatgtgagcccaagtgtggaaatactgaggtccagcttttccactgtggcagctgattcaatcaaaggtgttgcaagaggtggtccgatggtggaatatgaaaggagaatagcatcaggggagcttgtggatggtgataactttcagattgatactattcaacatttacaaaggctctatgaggagctggttgagaatgaagaagcttgccaactggacagataccagtcatctgagaaatctggaaggcgtagatggctatggtcccgcctcattacccagccttctacctattctccggtgcaggggctgtatatgtatggaggtgttggtactgggaagacaatgcttatggacttgttctatgagcaattgtaagtacctcaacctagaatctgtaggctttgttggtgcatccttgagaagttgagaacttgagataaaacagttatgtttcatagtgcagataatagataaaacttgtccatagattgcttgcttattagtaattcatcagtgtgcaagtatgtgtaatgctcttcgatgaaatgaaaactctggtgcaaaatagctcatacaggatttgcatggcaattatgcagtcctcaatgacctatttccatatttaatcatatagagaactgcataaagaaacaagtaaacaagtatgcctttctactttttacttgttcactataatccatatatgatctgcattcatggagaagcatacaatggatacatactgaaaattgacatggtgaacaatttcaaaatacagatggtatgttactttacagaatttaagaagcttcatcagtggttcatgtactgttacataatgctaaaatagtaaaaaaatctctatctatggaattttcttgagttattcatttggacattgtctagtatgaagggtctaggctattggcactgtctagtataattattaatggacattcatgtgacttccccaatatggagtcgataaattttcaaataaaaatttcacttgcttatatccctaaaatttgagttctggttttaatgaattcaaaataattcatgtcgaccaaaccaataataactagctcaaagccttgtcagtatcttaacacatgagttatgctaatgaattggcttgaaatcactcttcttaggcactaagataatgagagaattatgagctacacctggttgaactgaaactcttggattattaattgaaaaccagtgaagattaaaatttattacataacacataggaatttcttgattatattccagcattcttttgaagaaatgcactaaatcccttggtcaagagctttgtccattatgggatttccagcataaaaaaacactaaatggagtaaacataaacatgtctcttaaatattttggctctttctttgcagttgtttagaaataagtaggaaacatcaagtagtatcttggccagtccaatctctgcagccctatttgctagattggagcctacagtgatcatgatgatttaatattaaattaaaataaccatatttctccctcttgaaggaaagtacctggaaaaaaccatcatgcgtcttcctttcgtctttttatgaaatatcagtgtttgcatcaaaacaatttcactgtgtggtaaaagaaacacaaaattactttttcatactaaattggtttttttttttttttttttggggggggggggcaggccagctaattggagaaagaagcgcattcactttcacgatttcatgctaaacgtacatagtcgtcttcagatgcataaaggtgtttcagatccccttgaggtggtggcagctgagatttccgatgaggccatcatattatgtcttgatgagtttatggtaactgatgttgctgatgctatgatattgaaccggctattcagacatttgttcagcaaaggcgttattcttgtttcaacgtctaatcgtgctccggatcagctttacgagggtggtttgcagcgagaccttttcttacctttcattgacacgttgaaagaaaggtgcattgcacatcccattggctctgcagtagactatcgtcaattgggttctgctgaacagggtttctattttatcggaaaacaatactcacttcttaaacagaagttgcaaacattaattggagatgaggaacctagacctcagacagttgaagttgttatgggacggcaattgcaggttccactgggagcaaatgggattgcatatttcccatttgaagatctttgtgataggcctttaggtgcagctgattattttgggctgttcaaaaagtttcacaccttggcacttgatggcattcctaagtttgggtctcagaaccgaacagcagcttatcggtttgtcacattggttgatgttatgtacgagaacaaagcaaggttattatgtacagcagacgctgcaccaatagaactatttgagaatatagtgacagttgctgaagcacgaaaaatttctcctagatcttcacggtcgcagaaaactgatgatcctgacttgtgtgtggacaatgagctaggatttgccaaggatcgaacaattagtaggttgacagagatcaacagtagagagtacttggaggactttgaagcgaaattgcgacagcccttacaaggtgtagataatgatattgatgttgtactagtgtaagtagcagcaaattgtctggtatgaattaagtctaccctcctggctttacaaaatgaagaaagaaaatgttggttttccaacattggtgcatgtaaatttgcaataagccccgtaagaaattttgcaaacaggcgggtcatccataaagtgtaacacctgtagagaagaaaaatgttgttcgttcttctgaaacctgtgttgtgtctttttgcctcctctcactttctattcccatgtatatgccaaaacaccaatatcataaaaatagaatatgttagattcagtg

SEQ ID NO: 25067 - DNA, 3133 bp, Oryza sativa
  ref <308>: DATABASE ACCESSION NUMBER: AK100509
  ref <309>: DATABASE ENTRY DATE: 2002-08-28
gactcagcccgcgcccgcgctcccctaaccctaatccccctccaccctctccgctcctgacccctgcggccccgctgcgcagatcgccatcgcctctcggcagccgcactatccccaaaatcacgtcgttgtgcgctcaccgtcgttcccctcccttcccacgcgctccctcccttccaccgctccgcaccccacgcccgtcgccagcgccgctgccgccatcaggtcgccatcactccctcttgcagacatggatcttcacgccagcgccgccactcccccgtgccctcatcgctgtgccgctccgtcaccctctgccccttctgctcacggctcaccacgccgcctctgtcatctacgggcgcttgccctataggccggcacggtgctagctagctaggtgcgtggaggagggtggggatgacgaaagggtgggaggtgctaaggcgaggcattccgggcagtcgtggacctagcgccatcatctcccctctcaggtgcagtcccatgacccttgtacttacattacaaactcaatcgttcaccccttctttttactgcctcccagttcttcgtcagaggcaatgaagaaagtttgtatccgctctgtctcaatcaaccgtacaaattattttccgctctgcctcaatcaatagttcaaattattggtatcatggttgaatgatattttacaatgacgggacccaaattatcaccagattttacagtggcaggacccaagcatattgcaaacgtaggagtcacacagccatttatttatcagtttaagaactcaccaactgatccattgttgacgaagcaatattttatttcagtgataaagttttcccattgttgacgaagtcacacagacatgtatgttttctcgtagtaatctgcttgtgtatgtacggatctaaatagtgtagatgacacatttaataagcaattcagtgttctgtatatttattttggcaacgacggtggcatcaatctggcttaggtgagactggtggtagtgagaatttgtgtccttatgttatgctctggagattaccccctacattgctctgagtacaactgttttattcagggctgcaacaatgacaaattctgcagtgtgtaaaggtgtgaaagatgagcttcaaggtatgtcctttttctttttgctacgccttttactattgtcaatgcatctgttcatggtattagccatcaacttccactgccctgctatcacttcatggtttgtgacatcacattgttgcctatagctcacaatgccctggtacttgcaaaaaaaaaaccagtatatctgttctttatgtactatatatttttcgttgctaaaactaaattgagagttgaatccactgtcatttatttgttacaagtacttttattttgtgattctcagcattacacttttactgtgatactccctctgttccaatttccaaaatgtaatgtgttttagttttatcctaattcaaattaagcttctttaaaagttcaaatgtactttaaatcttcagaataatatgactaatatgtaccatttagtttaggaaccaccatgaattcctaggcatatggtaaatttctctatatttctgatggtatacagaaaccagagtcgtattacttgtaagtgatatgacgaatatcgagcgggttttgatggcagcagcgaactttacatatatcgaccgtttcaactgccagtagggtggttcatttttccatcaacctaaagaaagaaaagtgtttctagatttgccgctgtctccccacaaccgtcaatgcccgccactacggccctatcgccgtcgctacccatcaccttgccagacaaccgaataagaggaatttggcctcaacaatgtcactgccccgatcaatcttccatctacaccaaaagctggaaggaggcatatatatttcaatacataataaatttattttcctgacacattacttcctatgtagaatttgtgttaagttcataatctgccttataattttcaggataatgcgttgctctgataagttttaataaataaaataggctctagcttctgtgcacatatttatacttttaaatcaactgtaagtttcttccttgaacagctgcatcttatccttcaatgtcttcacggaatactttttttcatcctatccatttttttaccgtctatttaatcaaatggcacggttttttttcgaaagggtttcaccaatccatattattatccatttactgtcagttgtcactaatcatggttgctgtatggaaacaaaaatggtttctttttcatgttaacagaagctatgaaccatcctaatattaaattatcaatggctattatgcatcggttcaatagtgactcggtcagttatgtgatctacatcagtgagataattgaaatcaaattattatgtgcatctgtgacaaaatacttgctatttaattctcctccctcccactaacatacatctgtgatataattgaaatcaaattattatgtgtatgtgtgacaaaaaaaaaagttattatctgcatgtgtttctcaaatttagatagcaggcctaatcttttgtcgagctaggagaagccctgagtgccctggttagggataacctggagcttttttttaaaatgaacctggagctaaagagtttttctggttctgttgtagctgccagaatggaaaatgcctgaacattgttctgaagatgagtacatcttttgcaagtcttgatctgtgcacctcttcagctggttgccagcatgaaaaatttatgattctgacatatgtctctgaatatgtttgtaacaatgaattctaaaaacatatatctctgaatacgtttgtaaatttagttggattttatgaagttttcagtgagctttggaatgtttatgagatagctccatttctgaacttgtctatctgaactttggtcgtgacctcatcttttcttttttttttgcagtagcaacaaattaatggaataaatctatactttttgaacatattcttttaaaacatatattggcttcgtatattgtattctgaattgattatatataattaatttttattaagatttattgtgctcacccaatatc

SEQ ID NO: 25068 - DNA, 1720 bp, Oryza sativa
  ref <308>: DATABASE ACCESSION NUMBER: AK100510
  ref <309>: DATABASE ENTRY DATE: 2002-08-28
gattgccctctgagtctctgaaatcctgaagcttcttcttcttcttccttcctcctcttgctctcttgctcttcctatgctagcactctccatgctcttcttgcccttgtagcattggctccttggtttccatccatggatccacgctaaatgcattgcgaggctgcaaattggtagcattcccttccccgttgcatctgctgcaactatgtaagcaggagtgtctgatttgacacgcctgaatacagcttctcagatcttcagttttgttgtttgtctgagaaaaggagagagagagaggcctcttttgggtccaagaagagaaaaatggaggagagcttcgtgcccctccgtggcatcaagaacgacctccatgggaggctccagtgctacaagcaggattggaccggaggattccgcgccggtatcaggatccttgcgccgaccacctacatattcttcgcttcggccataccggtgatatcgttcggagagcaattggagaggaacactgatggtgttctgacagcagttcagacattggcatccactgcactttgtggcataatccactcctttcttggagggcagcctctgctgatcctcggtgtggccgagccgacggtgctcatgtacacattcatgttcaactttgccaaggacaggcctgatcttggaaggaggctgttcctcgcatggaccggttgggtttgtgtctggacagcaattttgctgttcttgctggcgatactaggcgcgtgctcgatcatcaaccggttcacccgcatcgcgggtgagctgtttgggctcctgattgcaatgctcttcatgcagcaggctatcaaggggcttgttgacgagttccgcatccctgagagggagaacagaaaggcattagagtttgtttcatcatggaggttcgccaacggaatgtttgctatcgtcttgtcgtttggccttttgctcactgcactgcggagcaggaaggctcgatcatggcgctatggaacaggttggctccgtggcttcatcgccgactatggtgtcccactgatggtgctagtatggacaggagtttcctacattccatatggtagtgttccaaaaggaattccacggcgccttttcagccccaacccatggtcccctggtgcatatgataattggacagtcatcagggacatgccaaatgtgccactcctctacattattggtgccttcataccagcaacgatgatagccgtcctttactacttcgatcacagtgttgcttctcagcttgctcagcagaaggagttcaatttgaggaagcccccatctttccattatgatttgcttctcctgggtttcctgacattattgtgtggccttattggtatccctccggcgaatggtgtcattccacagtctccaatgcatacgaagagtttggctactctcaaacatcaactactccgtaaccgactagtagccacagcccgacaaagcatgagccagaatgcgagcttgagccagctgtatggcagcatgcaggaagcttaccagcagatgcagacaccactgatttaccagcaaccgtcagtcaagggattgaatgagctcaaggactcaacagtccaaatggcttcaagcatgggcaacatcgatgcgccagttgatgagacagtctttgacatcgagaaagaaatcgatgacctgctgcctatcgaggtcaaggagc

SEQ ID NO: 25069 - DNA, 1896 bp, Oryza sativa
  ref <308>: DATABASE ACCESSION NUMBER: AK100511
  ref <309>: DATABASE ENTRY DATE: 2002-08-28
gactgatcatactagcacagagcgccgccgccgaggagagtccaatcgagaagaagggaggagaggcaagcggagaggaagaagaagaagaagagaggatgggcttcgagaagacgatcctgaaagccggcaccggtcccaagcccgtcaagggccagaaggtcaccgtccactgcaccggcttcgggaaagataatgatctcgctaagaagttttggagcacaaaggatgggcctcacctttttaagtacttcatgacaagaaacaagatacccaatatagcaccgtgcactttgtttctgtgctcctcagatagctattcgattcttggaaatccttaggctacccaccatagtaacataaaatcctacataatttcatggctaggattctttatctaatcaatttggtggttcttttccttggctttaatctgcacagagctctctcatggaggaaccaaagttacatgaatgatatcgctgatcgatgtgccccttcaccccatcctttaagtatgtgccagtcacgagcagcagcttttggctatccatgtgaagaatacaaggtcacaacagaagatggctacattcttagtttaaagaggattccccatggtcctcatgactctaacacctcgactgagatgaggccaccggtactgcttttccatggacttatggtggatggtgctacttgggtaatgagtactccaaaacaatcacttggatttattttggcagacaatggatttgatgtttggattgccaatagtcgtggaacaaattccagccggaaccatacctcactctccacaaaagatccggcttactgggaatggtcgtgggacgaacttgcttcctacgatcttcctgcagtgctgcagtttgcctatgatcacacaggcgagaaaatccactatatcggtcactccctgggaaccttgatgattcttgcagccttctctgagcacaagttactagatgtagtgcgatcagctgttttgctctgcccaatagcttatctgagcaggacgaaatccaaactccttaagcttgctgctcacatcttccttgcagaaacagttcactggctaggcttttacgagttcaatcctgttgggccagttgcacatgaagttctaagccaaatatgcggcgatcctgaaattaattgctatgatctattttcggctgtagcaggaccagattgctgcctcaatacttcaaccttttgtgcctttctagagcatgctccacagtctacctccgtcagaaacctcgttcacttgtcgcagctggtaagaaatggaggtgtcagcaggttcgactacggcaacgccaaggataacatgaagcattacaaccagccacgcccaccgccgtacaacctctcctccattccgaatcatgtccccatcttcctcacccatggtggcgaggactacctcggcgatgtccccgacacaaggcacctcctgaggacgctggtcaagaagcacaacagcgacagcatcgaggtgatctacgtgccagactacgcgcatgccgactttatcatggcctacaatgctccagaactcatatacggaccgatggtcgacttctttaagcgtcactgaaaccagatccaccagatttcaccattggctgtatgcattgccaaagtagcagctgtatgacaagtttcagcattgaagatttcagtctcactgagcttgcatccatcagtacatctttgtcatgtcaaagtatatatgtcagttccaccatgctagataacacgaaaataaaggatttgataaattgttactcgatctcgttgtaatcacaatgttcttgattcactggtctcttgcaaaaaatgaatatggccaacctaatttgtttttgtacc

SEQ ID NO: 25070 - DNA, 2301 bp, Oryza sativa
  ref <308>: DATABASE ACCESSION NUMBER: AK100512
  ref <309>: DATABASE ENTRY DATE: 2002-08-28
gagtttgaagacatggaaagctttcgtgtgttcatgtgttcatggttgatggcggtcaagcggcgatgaattgatatcactgggttctagaagcttaagcagccgcccatggcgacacggccgtcgccgcggtcgcgagacagcgcgcggcgaaaagcacaagcgggaggcctccgtcgagcccgcgaagctccgacaccacccgccgctcctccttcaccgccgcctcgtcgtccgacaagccggtgccgtccttcctccgccccaccgtgagctcgtccctgcacagctcgtcttcgtcatcgccgtcgtcgtcgtcgttgttgtcgtcgtctccctcctccaagggcaccggcaccacgccgaggaggtccgcggacaaggccccgtctgcgtctgcagcttcgtcgcggccgatcacgcccaaggacaaggcccccgctgtagcgacgtcgcggccgatcacgcccaaagacaaggccaaggcggcggcggcgtcgacgtcgcgatggtccgcggtgtcgccgaggcagctgatgcagaaggcgtccaatgcctttacaagaggcagcagcagcaagtcgcgcgctgccaagaaagacaaggaggcggccaccccggcggcgacctcggccgccgccaaggacgcggccactccggcgtcgacctcggccgtccgcaagaaggccgccacaccggcgacctcggcggctggaaaggcggtggccggtgcttcgcccgggccgacgagagcccagcccacggaggagcaccaccagcaacccactgaagcgccgccggccgaaccgtcacctgccgccgccgcggtgcaagaagaggcggtgacttcgagagcccagctcacggaggagcaccaccagcaaccacctgaagcgcccgccgagccgtcacctgccgccgtcgccgtgcaagaagaagcagcggctgcggagaccgaagcagagcaagaaaaacaaccggatgagacgccgcaagaagtcgtcgcggcagtggaggagaaagttcaagacgagcaggttagcacggaagcagcggaggaagccatcgccgtcgaggaggatgccgccgccgtgaagaccgatgcgccggagccggaagagacgcagacgcaaaccggtgccattgcagagtcggaaacagagtttcagaggagttcagaggatgagccggcatccgacgccattgtcgaagaagcggcgatcgaatctgcaacgcagaatgagccagatgaaccagaatccaccacggttgaagagatggccgtcgaggaggagatcaagaccgatgagagccaacaagaagagacgccaaaaccagaagagagaatggagaactctgaaacaagcgtgatctctgaagatccaaaagaaatggatgcaatctctgaagaccaaaaggtggaagaacccgtggttgctgaagaacaagaggaactctccgaggttgtaaaaatggctgtcgagccgagcatctcgtcagagccagcaacgccgctggaggaagaagatcgcgacgacgtggagacggagcaagcgaactcgtcggagcccgcaacgacggtggaggaagaagaagatcgcgacgacgtggagacggagcaagcgagctcgtcagaccccgcaacgccgttgaacgaagaagctatcaacgaggagggcacgtcgacggagacggggaagacgaagaaggtggcgttcaaggggagcaaggtgaagacggcgatggagaggcggccggagggggagcagccgaggaagaaggacgtggcgcggagcaacgacgtgatcgaggagaccaagaggacgctgatgatgaagaggaagagcaaggtgaaggcgctggttggggcgttcgagacggtcatggacacccccagcccgggaaaatcgagctgattttgatttggatttttttttcttctttttttttggagggaaagcttcagcggtgatgcacgtattgagtggtttgaattgaactgcgaggtgtgctttgtggtgtgatgtttcggtttcttgttctctttgttgcattgatcgttgattgattcttctgataactgaaacaaatggaaatgttattgtcgatttgtttgtttgttgatcattcgatctagtgttgtttactaggcttagttgtatgtaactaaaaagggaaatagctgtgtgttcttgagagctgagactggtgtggttgtcaacttgtgctacattgctgagttttgagatttatgcttgtaaacaattattgatgacatgcaatccattttgtacgtttttt

SEQ ID NO: 25071 - DNA, 3639 bp, Oryza sativa
  ref <308>: DATABASE ACCESSION NUMBER: AK100513
  ref <309>: DATABASE ENTRY DATE: 2002-08-28
gaatccctttcgtgagagaaaaaaaacaaaagaaccctaactcgcggccctttgtctggccgctctcgccgtcgtctctagtcgacggccgcggtggccgttggcggagcgaacagccaactcgccgagtctctctccgcggcaggcgaccccggagctcctctccccaggcggacgaatccgaggcccccctccggctccgagcacacagccagagtaccgcgacatacattgggtgtccctgtaccagatccacttatcgaataaacaaataggttcactccaaacagccaggggcattacagacattgcacacatcaattggcgcaaagcagggctgcgaaacagacacaacttttacagacttacataccaaaagcaagaagcggcttttggagaagctttagcccaaacaaacaggcccttaagcatggaaaagcagcccgaggtgcatggtccggagaaggctccggagaagcaacttgatgagaaaacgttagaacggaaactgaggaaaaatcagaagtgttatgcttgcaggctaaagagaaagaagagaaaagacttaaagcaaaacaaaaggaggcagctatgcttcaggcacagccagctttagatgtactcaagaaggttgagaagaaacataggggaaaagctgtggaggatgaaaatcctgaagattttattgatcaagacactcctaatgggcagaagaaactgcttgcacctcaaatggccaatcagtattgcccaagcacggttgagaaatcatggtatgcctggtgggaatcatcaggatattttagggcagattctgcaagcacaaagccaccatttgttatagttatgccacctccaaatgtgactggagctcttcacataggccatgctcttacagtggctatagaggatgcgatgatacgatggcggaggatgtcaggttataatgctctatgggtccctggagtggaccatgctggcattgctacacaggttgtagtagaaaaaaagcttatgcgtgaaaggaatctgacaaggcatgacatagggcctgacaattttgtttgtgaagttctcaaatggaaagagcggtatggtggtactatattgaatcaattgcaccgccttggggcctcacttgattggtctcgtgaggcttttacaatggatgagcaaaggtcaaatgctgtaactgaagcttttgtaaggttacacaaggaaggcctgatatatagagataaccgccttgtgaattgggactgcacacttctgacttcaatttctgagatagaggttgatcatattgatcttaaagaagaaacaatgttaaagatccctggttatgctactcctgtacaatttggtgtgttgatatcttttgcctatcctcttgaagaagggctaggtgagattgttgttgcaacaactcgaattgaaacaatgcttggtgatacagcaatagctgttcatcctgaggataaaaggtatatgcatctgcatggacggtatgcagtccaccccttcaatggccgaaaactcaaaataatctgtgatgctgagatagttgatcccagtttcggtactggggctgtcaagattgcacctgcacatgacccaaatgactttgaggttggaagacggaataaccttcagttcattaatatcttgacagatgatgggaaaataaacagcaatgggggtgcacaatttgaaggaatgccaagattcactgctcgaatttgcattattgaagcactgaaggcaaagggcttgtacaagggtgcaaagaataccgaaacgagtttgggcatttgttcaagaactaacgacatagtggagcctatgataaaatccccgcagtggtttgttaattgtaacaccatggccaaggtagcccttgatgctgtaaggtctaagaggattgagatcattcccccgcagtacgaacaagactggtatagatggcttgaaaatatacgtgattggtgtgtttcaaggcaacattggtggggacaccgtgtacctgcatggtatgtgacactagaagatgaccaggagaaaactctaggttctgacaatgaccgctggatagtcgccaaaagtgaaagtgctgcaagcgttgaggcacagaaaagttatccaggaaagaaattcatcctaaatcaggatcctgatgtgctagacacatgttctagaaactggacttgatattctcttctgttgggtagcacggatggtgatgatgggaacacaacttggtggtgatgtgccgtttcagaaggtttatttgcatcctattgtatgcgacacacatggccgaaaaatgtgcaagtcacttggtaatgtcattgatcctcttgaggtgataaatggcatgacactcgagggtcttgtaaaacgtctggaagaaggtaatctggatccagatgaattaaaccttgaacggaagctgacagattatcctgatggaattgctgaatgtggtactgatgccctccgctttgcactgatttcttacacttctcagtctgacaggataaatcttgatatcaagagagtggttggataccgacaatggtgcaataaattgtggaatgccatccgttttgccatgggcaagcttggtgttcactacagtccacctgcaactgtcgacgtgtctatcatgccaccaatctgcaagtggatactctcagcactaaacaaggctaccggcaaaactgttacctctttagaagcatacaaattctctgatgcaacatctgctatatactcttggtggcaataccagctatgtgatgtatttatagaagctataaaaccttacttcttcaacgaacctcaagagtttgaatctgcaagagtcgcctccagagatactctatgggtttgcctggagactggtttgcgcttgctccacccattcatgccttacataacagaagagctatggcagcatcttccacaacccaaatattcttgtaggcaagattcaattatgatttcggaatatccatctctcgttgaggaatggactaatgacaatcttgaaaatgaaatggacattgtcttagacaccgtgaacaaaataaggtctttgaagacacgaacagaaagaaaagaaagacgtcctgcttttgcactctgccgaagccaagatgtcactgccactattcaatgccatcaatctctaattgtgtgtctttcttccgtatcatttcttaagatcctgacagagaatgacgaaactccagctgattgtgcaatcgctgttgttaacaaagatttgtcggtgtaccttaagcttcaaggagccataaatgcagaggctgagcgtgaaaagctaaggaagaagagagatggaatccaaaagctacaccatgctgtgacacacatgatggatgcttctggttatcgcgagaaggcacctcaaagtgtccaggaaggggatatgagaaagcacactgctttgttgcgggaactggagggcataagtgaagctgagaagaaactagatgccaaaaccgataatatttgactctctgatgatcattgtagtaaatagcggtgttaatgataattttggagtaaattaagcactactttataatttataatttcaaaaggtaaatttatcac

SEQ ID NO: 25072 - DNA, 1845 bp, Oryza sativa
  ref <308>: DATABASE ACCESSION NUMBER: AK100514
  ref <309>: DATABASE ENTRY DATE: 2002-08-28
ggaggcgttcctgttccgttcttttcctctttctctcgtctcgcgttgtagccgccaaatcgcagcgacagcaagaagaagcaacccgggaccacgcactccgccatcgtcgcaccatcctcctcgtcggccgttgacgtctccgattccaactcgggatcgtccgcaatggcgaagaagcagcggagggaggcggccgcgaggcggcggcgggagcagcagcagcaggggcgggagcagcggcaccaccaccaccaccggcggcggccgctcctgctgcagccgcgggacgagcggtgcgtgtcctgcaccacgttcaacatcctcgccccgatctacaagcgcatggactccgagaattgcagggagagccagtacagggcctactggttcagcaggaacgagaagatcatcgaccgccttctcgctgattgctcctccatcatttgcctgcaggaggtgtggctgggaaacgatgagctggtcgacatgtatgagaagcggctgggggacgcgaattacagtctgttcaagctcgcgcgcaccaacaatcgtggagacggtcttctgactgctgtaaacaagaactacttccatgtcttgaactaccgggagcttctcttcaatgattttggagatagagttgcacagctgttgcatgtcgaatcagccatgcctttctggcagaaccgaagcagcagttgcatccagcagcagagcctcattgtgaacacccatttgctgttccctcatgaccacagcctttcaatagttcggctgaagcaggtctataagatccttcagtacatagaagcttatcaggaagaacataaacttggtccaatgccaatcatcctatgtggtgactggaatggaagtaaacgtgggcaagtttacaagttcctccgatcacagggctttgtttcgtcatatgacactgctcatcagtacagtgatagcgaagaagatgcccacaagtgggtgagtcatcggaaccatagaggaaacatctgtggtgttgatttcatttggcttctaaatccaaataagtcgaggaagcccctgaaaactagctggaatgaagctgtctttggtatcatcaagtatcttctcctccaagtagcgtccctttcagaggagaatgcatttgcactcctcaaggctgacagtcctgatgatcagatcacatattcaagcttctgccaggcactttgtcagttagggatggtccatcctgatcgcctaaactctgaagaaattaaagatctgtggagtgaagctgaccatgacggggatgatattgttgactacaaagaatttcagcggtgcatctggagccctacatgctgcagccaagaggaggaggatgataccgaaatcgacatctccgatggaagccttgtcacgtttgaggcgaacgatgaagcctttggctttactgtgaaggaagctgttctcttccccccagaagtagagaagggcatgtggcctgagaactatagcctttcagatcatgctccccttactgtggtattctcccctgtaagaatgccttgttctccacgcacccctcgaaccccctagccatcaattgtcaatacttgcgtgcatacaggaaaaaagaagccttgtacagcattagggtatactttcagaaatagtgagatatacagcagatccagagtttaggtacaaaatggagtaacatagggcgactgaatagttttctttccttttttttgtttattcgttcgccttgagttgctgtctgttgtatgtatctaaacatggttccatgttcataaatgtaaattttgcactgtttttgtatgtatatgattaatt

SEQ ID NO: 25073 - DNA, 2699 bp, Oryza sativa
  ref <308>: DATABASE ACCESSION NUMBER: AK100515
  ref <309>: DATABASE ENTRY DATE: 2002-08-28
ggtgcaaacacacgctcatcgatcagctcgccggtgaggagaggagagaagaaagcgaaggagctagagagcatggagggcgcggcggcggcggcggcggtcattaggcaccggacggtggaggcgaacggcatctcgatccacgtcgcggaggccggcggcgagggcggcgatggcgcggcggtgctgttcctgcacggattcccggagctctggtactcgtggcggcaccagatggagcacctcgccggccggggattccgctgcctcgcccccgacctccgcgggtacggcgacaccgacgcgccgcccgagatcgagtcctactccgccttccacgtcgtcggcgacctcgtcgcgctcctcgacgccctcggcctcgccaaggtgttcgtggtggggcacgactggggcgcgataatcgcgtggtacatgtgcctgttccggccggatcgcgtgacggcgctcgtcaacaccagcgtcgccttcatgcgccacgtcttcatccgctccggcgccgacgccatcaagaccaccgatcacttccacaaggcctacggccccacctactacatctgccgcttccaggttcaatacacagaacctcatcctctgccatttcctctacgtacttatcgtttcctccgtttcatattatatacttataagctattcgactgtttatttttttaattaaagttcgttagatttaatcaaatttatagaaaaaacggtaatatttataacaccaaattaattttattaaatttaatatagtttgataatatgtttgttttgtattaaaaatattgctatatttttttatattttaattaaattttaagaagtttgactaagaaaaaaattaaacgacttataataagtaacgaatgatatgcatatatatttcttctactttgaagctactacaacatgcagcatgggagaaaattaggtagaactcgtgagcagatagacgcaaacgaaccttttttatatatgctactagtagtagaataatactatcgtaaatattgttcaaagtcccaaacggatcagaaccagcggtccagccggagtagcgaaattttctcctgcacggactcgatagcctgaccggtacagtgcgtggtcgcagtacaagaaaaaaaaaatgcatactgctactactgttggtgtctccgatggaacagtagatgaaatactacgtgttggcttattccgttattcgtctacgactggtagtagcacgatcggtcactgcatggagcagcatccgtcgtcgtaggtgtcgtcgccgacgaagcgcgccggcatgcctccttgaacgtactggtggtacgggttctggcaggggtagttgccgccgtacaggtagctccccggcggcggcggcggaggcggcgcgggcaatgggtagtagggcggcgacggcgccaggtgcatcatcccgacaaaggggacgtcgtcgggcggcggcggcggcgtgccgtcgctgacgatggtgactgacttgccggtcttccgcctgagtcgctctctgagcttcgtcgcgtcgacctttcggccggcgatcaccacccgccgcccatacatgtccacccaaaccctctttacccctgcacccccacgcacgcacgcacgcacgcagcccaaaatgtcaaatcgatcgccatgacaaaaatgcactggcactgcacacatcatctagcttcttaccgaacattttctcgacggccttgcggatgtcgatcgcgcagccctcgcagtggttgttcaggatgatctccgccattgacgcaacagaaagctctatctgcttctgatcgattgatcaactgagcactacgtgcgtgccattttatagaggtgcagggagggagcaaatcaagccgaaatagggaattgagagattaagccctaattacttgccctgaggttacttggccattccgtttctcatcgaaagatatcgattctctaggtaatcttttactactacattcttgtacgtgatcacctctggtcggttcagccactgccatacatgagaccacttacctttcatcctctctgggccggcggcccatttatgaggcccaattgcacaggataatctggcccaataccggccgctaattgttgctgtttgcaggagcctggcgttgcggaggaggagttcgcgccggcgcacgcgaggcacatcataaggcggacactgtgcaaccgcttcaccgtccacaaggccggcaagccggagagcgaggagtcgccgccgccgccgccgctgccgctgccggcctggctaacggaggaggacatcgactacttcgccgccgcgttcgagaggacgggcttcaccggcggcatcaactactaccgcaacatggacaggaactgggagatggcggcgccatgggcggacgccaaggtgcaggtgccgaccaagttcatcgtcggggacggcgacctgacgtaccactacgccggcatccaggactacctgcacaagggcgggctcaaggccgaggtgccgctgctcgaggacgtcgtcgtcatccccggcgccggccacttcatccagcaggagagggctgaggaggtcagcgaccttatctacaacttcatcaccaagttcataccccaacccaactgaagcgctcaactcaactcaactgtcagatgcaattcatcgccgt

SEQ ID NO: 25074 - DNA, 2600 bp, Oryza sativa
  ref <308>: DATABASE ACCESSION NUMBER: AK100516
  ref <309>: DATABASE ENTRY DATE: 2002-08-28
gtggttgagcacacacctcacctcacctcctcccccgatccccctcgcctccttcccctttcccccctcacctctctgctcttctccgccgcaccaatccgccccctcgcgattcgaccagatcggcgcgagggcatatcatggcatcgaagcggatcctcaaggaactaaaggacctgcagaaagatcctccaacatcatgcagtgcaggtcctgctggtgaggatatgttccattggcaggccgtgtcgccgagcaggtagaacagcacggcgagccacgccgccatcacggcgtagccaagaacccgccgctcctcgccgaacacgcagtggaacaggtacaggtagtcgacgtagccacgcgggaatcgccggcgatcaaggccatcctcctcgccgacgtgctcgcacctctccacgtagctctcaacccggaacacgccgccgccgcctccgcctccgcctcccctcgcgccgtcgccgtcgccaagagccgccacttccgcttccgcctctgcctcgtccaagtccaagccaactacctaaacctaaaccctattcttcttctttcgcctccgccgcgatgtcgtcggagcctccacccgatgccgccgccgccgccgcctcctccgcgggggatctcgcggccgatctctcctccgccaccatcagcaagaagcagctcaagaaggatgcgaggaaggcggagaaggccgagaaggcgtcgcagcgccagcagcagcagcagccgcaggccgacgccgacgaccccttcgcggccaactacggcgacgtccccgtcgaggagatccagtccaagaccatctccggccgcgtgtggaccgagatcggcggcctcgacgaggccgccgccggccgctccgtcctcatccgcggcgccgcgcaggcgatccggcccgtcagcaagaagatggccttcgttgtgctgcgcgagagcatgagcaccgtccagtgcgtgctcgtcgccagcgccgacgcaggggtcagcacccagatggtgcgcttcgccacctccctcagcaaggaatcaatcgtcgacgtcgagggcgtcgtctccctccccaaggagcccctcaaggccaccacgcagcaggtggagattcaggtgaggaagatctattgcatcaatagggcgatccccacccttccaatcaaccttgaggatgcctcacggagtgaggctgaaattgaaaaggctgaacaagctggagagaagctagttcgtgtgggccaagatactcgcttgaactatagagctattgatctccggacacctgcaaatcaagcaatattcagaattcaatgtcaagttgagaacaaattcagggaatattttctgtcgaaaaattttgttgggattcacagcccaaagctaattgctggatccagcgaaggtggtgcagctgtattcaagctacagtacaatggacagccagcatgtttagcacagtctcctcagttgtataagcagatggctatttgtggtgggtttgaacgtgtatttgaggttggacctgtttttagagctgagaattcaaacactcacaggcatctgtgtgagtttgttggccttgatgctgagatggagattaaggaacattattttgaggtttgcgacataatagatggtttgtttgtagcaatatttaaacacttgaatgaaaattgcaagaaagaactagagacaataaacaggcaatatccatttgaacctctgaagtatttagagaaaactttgaagctcacgtatgaagaaggaattcaaatgctgaaggaagctggaacagaaatcgaacccatgggtgacctcaacactgaagctgagaaaaaactaggccggcttgttaaggagaagtatggaacagaatttttcatcctctatcggtatcctttggctgtgcgtcccttccacaccatgccttgttatgacaaccaagcttacagtaactcttttgatgtctttattcgaggagaggaaataatatctggagcacaaagaatacatttaccagagctattgacgaaacgtgcaacagagtgtggaattgatgcgagtactatttcatcatatatcgaatcgttcagctatggtgcacctcctcatggtggttttggtgtcggcctggagagggtggtaatgctgttctgcgccctaaacaacatcaggaagacatcacttttccctcgcgatccacaaaggctggtgccataatttgctttttttcccaagagcaaggtttggactcagtacggactgggcagttttcctcggctggtttttttacctggacattattttcgtatttattaatgtgctgtactgcaaaagctgctcctttccacaacatttggaatagttgccgatacatttggaatagggctcaacgttggcgttgtgatttcgttgatgattccgctattcgtaacaatggcgaatccagagcagaaatgaccctatgtcagaaacatatcacatactcgtatgcctatatttccaaaagataagggattatggaaggatgacatattcaagtcccaaaatacaaggtgtggtttgactcgtggtcttcaacatcc

SEQ ID NO: 25075 - DNA, 2983 bp, Oryza sativa
  ref <308>: DATABASE ACCESSION NUMBER: AK100517
  ref <309>: DATABASE ENTRY DATE: 2002-08-28
gtatgtgcatgaaagggatgtgcttgagccagggagcaaagttgagggacatctggtacagcatcctggttttattcctggaggagggcaagcagatatggagttggtggagatgtgtggaacattgcttgatgctctttccctctagttttccaggctttgagatgccagtggttgacaagaccatgcatggcggtcgaaactccatgtcgatggggtaaggatcccagtacccttggagcccagatgcaggtgtcaagaacttcaccaagctgacaaagatgaatatagcatcagcatgatgatttgtgaaaaattttcaatggccagttgtccttagttgatatgtatgtaaataccttggaacactccaacccttggcaaaggtggacgtatgagcaaaaggagcatgagcaatatctaatagattgtccagcagaagtccatgctccaccggtagctccatcaccatctgttgatgatgaagataaattccattactttacagtccagtaaaaaaaacttgaaaaacacaggacactttcaccatggaagattgctgcagtatgacatgatttcgttttacctctgcatgaattgtaaatcctgaagggggctgcagagaagggatagtcgactccggtgtgccatcaccaggccagatccaaaccatgccttcttgctcaaagcatggcaatgaccggatgcgcacattgagcaacttcgtggctggcattttctcacattttccatcagttgaatactcccaccctgaagggtatgaaaaggaaatcagaaatattacttgcactaccactttattgggaacattatgatcatgggaagactttaaaaaaagagtaattctttgttacaaatcctcaaatattccagtattttggttctgaatcatttttcatgtaccttcaagattgcaatttatgtcagttccgagcctttagaagaaccattttattgtgtgttttacataaatattataaattatcagtgtcatcacacaatgtatgtacattgtggagtgcaacaagcttgtgtttctaaaaaggaagaaagctttttttttcatatagccatagtgctagctgatgctttgaaaatcagattgtaaaaacagcagaagcgtgccaaaatgaaatttcatataaagtttcttttttcttaccatggaaagggcattggattctaccctcactaactgagccaagatgaagagggcaggctctgtgagcacatgtgttctgaacacatccaggtctcccatcctttcctcggaaaattacccactgctcctcaaaacaatctattggtacctgagaacacacagaccacatcaaaacatatcattaactggtactccggacattgtaaatgcctgaatcattcattgcgttaccattgtatcatctttcaggtcaccggagaagacaactgggtaccagaagtttttcagattgggattgtatggctgcactggaccagacgtccagactcggacgcagagttttcttgttcacaaaacgggacgctgatgacgttcttgaagcaagagaaacatagttgtctatagatgcactagagcctccgtcttgcaacagtctgtcattcaccaggttatccgcttgtgctaacttatcaagtgcagatgatgctctagtttctgataaatgaacctggatcagacaaataaaacatcagaatccagatgagattgaagggttatcatttgactcctgcaagtgcaatacctgattgtgagctttggccaattcttcctgcaactctgcaagctctttcctcaaggttccatttgacttgaactctattgctaaagatttgagaacctctaccacctgcattaatgttaacaattcgtggaagaatctgtgtcagtcgtccacaacttcaacctcgagcactattcagcattcagtcaaaaactgaaattcatgaccagtaaaatccaggaaccatgatggtgaggaggtcctgccgcgccctccaatcgcagtactggatgccgaatcggaccacctcaagggcctggttaacatccaagaagttgccttttgcaatgggagccattggcccggggttatcgacatggaacaaggcccccctcatgttgttcttggcatgttgagcttcatcatcaccgagcactgcatacaccttgattcttccatatcgacgaccaatgccctgcatggtttcacataggagaaatagagatgaactgcaaagaaaaagaacaacaactgaaactccaagcaagaaaggaatgagaagtttctcccatggccaaagaaccataaactgattcaaagatagccgaagaatccaaaaaagaaacaaaaagagatcaccattgtgaagcaacagctgaaggaggaggaaggcttgacgagcaggtgcggcagcaaagacacagtggtttccatggagcagtagcagtagcaaactagcaatgcccgtacgattataaaaagcgagggctttagtcacgggccaaacctgggttgggctgataatgggccatgtgccacctagtgcgtctgcgtgggccacgcaatgctccacgtagcttggggcctaatctgtacagccgctgccgctacagtgtatcgcacgtgggcaaaaagcagtgtctatatatggcatcatccggcttgtgagtacgtgctagtattccaaatcggggaaccgtgctgcagcatatctgggcccaggtacagacacgtggcgcgtgctcctcaccacacgctgatccttatcctctcctgtcgtctctgctctgccctgctccgagatgagcgcatctggtgagcttttggagtgtatcttttggccaccacaatttcgccatgagagttgctgccaacgccatggattcgcattgttgtactcgtgtatctatcatctgctataaaagttttaaatttgaagtttttacaatggttgattc

SEQ ID NO: 25076 - DNA, 2881 bp, Oryza sativa
  ref <308>: DATABASE ACCESSION NUMBER: AK100518
  ref <309>: DATABASE ENTRY DATE: 2002-08-28
gacgcgatcgctccccgtcgccgccgccgccgccgccgccgccgcgctcgctcgctcgcttcttctctctccctccccgcgccggcggggcgcggttctccgagcccagctgtgcgtgtatcgtttgatgcccataggaagcccccgctgacgggtagagatgaatttcctctaccggacttcgcagcctgttgcacccgagcttccgcggattccagagcaagatcagcaaagggatagcctacaaaagccagttacaactctggagggccttattgccgatgatccatatcacccctcccctgaagatgaagatactgataatggagatgtagatatcggtggggactctgcagatgcagattcaaaaaattcagttcctactggaaagcataccgatgttttggatgacgaaggatggatcacaattccgaacaaggagcttcctgataactggaatgacctttcagacatgttgcagttacagcctttggaccgccccttcctttttcctggtgagcaggttcatatattggcgtgcatgtccgcttcgaagcaagaaacacaggtcatatctccctttagaattgctgccgtgatgtctaagaatggaaattctttgcaatactccacaaataaatctagtcatgccacagaaaatggtgatagtaatgtaaagaatggagagaatggttcccaggttgttgaggatgacatgcaaagtgttgaactcaacagcgaaatgtctcctatgacacaagatgacatgcaaaatgttgagctcgacaacgaaatgtctccttcaaaacaagatgacatgcaaaatgttgaactcaacaacgaaatctctccttcaaaacaagatattttggagaccgaatctctccttcgattggaagatcacaagcaacaaattgaaagtatgcttcaaagattcaaaatgtccaatttttttgtccgaattgcagagtcagatgaacctctctggtccaataaaaaactagctgtatcaaaggtgccaaaagagcaatcatattcagacaaccaggaaaacaataagggttcaaggagtaatgcttataataccatttctgataaaggagtttttgatggtagcacatctggaggaatcgctcgtggtacagcaaggtgctatgctctgcaaaatggagacatcgtggttgttttgcaagtgaatgttggtgttaacaaaatggaagctccagtgctagaagttcttcaatttgagaagtcttcatcaagcaattatataaccaagaatctggtcaatggactttctagtggtgatgaggatccatgtcaggagctgctaagctggctgctccctttggatcgcacacttcctccgcgatccttatcacctcctactctcaatcctagtgcatcacacaagcaatcttattctgcttctggttctcaaattttttcattaagtcacttcagaagctattccatgccttcagcctcctccactcaaccacccaacattaggccaccaccaatttctgaaagtcaagaatttgtgcctgaaaagcctgcgaaaacacctgatattataaatgatggacaactttcctttagaggagttccattggagcctgaacggtattccgtacgttgtggtctagaaggtgtatatctaccagggaaaagatggcggagaaaagttgagatcattcaaccaattgaggttcactcttttgccgcaaaatgtacttcggaaaatcttctgtgtgttctaatcaagaatatttctccacagcatgtgaaagatatagttgtattggtagatgcaattacaattgtctttgaggaggcatccaaaggaggtgctcctttgtcactcccaattgccagtattgaggttgggcacgggcatagcttaccaaatcttgcactcaggagaggcgaggagcactcttttattctcaagccagcaactatgtcgtttagggaccggaggaccaacaatgatgcacctctgactttgtcactccctaagatgaatggaactgccacaaatgtttctttgggtaaggttggcgagaccattggctctcttatggatcagtatgctgtacttgtatcatatcgctgcaattacacagaatcaaaacttttcttcaagcaggccaccagctggcgaccctgtgttgctagtgaccttatgatctctgtatcatcagaactgtctttgcgaaatcctatttcgagtgctcgagttcctcaactcccagtgcaggtcttaacccttgaggctactaatatgacatcagaaaaccttaccgtaacggttcttgctccagaagcgtctggttcttcttcagttgtatccttgaactcagctccaacaacaccaaatagttcgtatgacaatcttaatgagtctgtgagaagatctggcttgggtaaacatcgagctggttttcgaagaatgaattcagtccttgctggctcaccaaaagaaagtgacaatggaggaaatagaattagcacttctggaggctgtactcatctgtggttgcagagtgcggttcctttagggtgtattcctgcacgttcaagcaccaccgtcaagcttgagctacttccattaacggatgggatcattacactggatacacttcaaataacgataagggagaaaggtatactttttcttgcaagcatagtaaaaacacagagaaagaaaaacaaattagtggcattggaggaacacttttttttttaacaatctgtcacaatgtgaatatcctagattccttaggatgttgacatataattatttcctgttggaattgattgtaaaaaaagaaagaagtatgtagactatagtggaatttattccatgtttcctgct

SEQ ID NO: 25077 - DNA, 1674 bp, Oryza sativa
  ref <308>: DATABASE ACCESSION NUMBER: AK100519
  ref <309>: DATABASE ENTRY DATE: 2002-08-28
gaagtgaccaaccagtgaccacaccgcaactgagatctctcttccaaaggacgatgaaagtgagagctcctgagtcctgagctaatggagtccaagcccagccgcaacgtcgtgctatacgccgccatgggcgcgggtcacctgctccccatggtcgagctcgccaagctcttcctcacccgcggcctcgacgtcaccatcgccgtcccggccacccccggatcgggcaccacgggatcccccaccatcgccggcatcgccgcctccaacccctccatcaccttccaccacctcccgccgccgccgtcctgcgccgaccccgatccgaaccccctcttgctcatgctcgacgtgctccgccggtcggtgcactccctcgcgtcgctcctccgatcgatcccctccgtcgcggcgcttgtcctcgacatattctgcgccgaggcagtcgacgccgcggcggcgctccacgtccccgcctacatatacttcacctcggccgcgggcgcctttgccgcctccctaggcctgatgcaccactactccacgactaccaccaacctcagagacatgggcaaggcgctcctccgtttccccggcgtcccgccgataccggcatcggacatgccgtccctcgtgcaggacagagagggtcggttttacaaggcgcgggtcaagctgtacgcgcgcgccatggaggcgagcggcgtgctgctcaacacgtacgagtggcttgaagcgagggccatgggtgcgctccgggagggagcttgctccccggaccgccccaccccgccggtgtactgcgtcggtccgctggtggcgtcaggcgaggaggagggaggaggggtgcggcacgcgtgcctcgcgtggctggacgcgcagccggcgcggagcgtggtgttcctctgcttcggcagcatgggctccttctcggcggcgcagctgaaggagatagcgcgcgggctcgagagctccggccaccggttcctgtgggtggtgcggagcccgcgtcaggatccggccaatctgctcgagcatctgccggagccagacctggcggcgctgctccccgaggggttcttggagaggacggcggacaaaggaatggtggtcaagtcatgggcgccgcaggccaaggtgctacgccacgcggcgacggccgcgttcgtcacgcactgcgggtggaactcgacgctggaggggatcacggcgggggtgccgctgctgtgctggccgctgtacgcggagcagaggatgaacaaggtgttcatcgtggaggagatgaaggtgggcgtggtgatcgatggctacgacgaggagatggtgagcgcggaggaggtggaggcgaaggtgaggctggtgatggagtcggaggaaggggggaagctactggagaggctggccgtggcgagggcgaaggccgtggaggcgctcgcggaagaagggccctcgcgtgtggcgtttgacgagtttatcgatcgtttggtgacgtccgagtgatcaatcactcatcgttcggcatttgggcgcttagcttaccttgtttcctagaggacctgagaagatgatgcggttcgtgttagcggacgaccgtgttggacttgcactctgtgtgctcctgcgccttctgccccgttcattcacaaataaaaaaagttagtatctgtgttcgcc

SEQ ID NO: 25078 - DNA, 1972 bp, Oryza sativa
  ref <308>: DATABASE ACCESSION NUMBER: AK100520
  ref <309>: DATABASE ENTRY DATE: 2002-08-28
gcctttcgcctaaaggaaaatctcgcgtctcgtctcccctccttgcgccatctcgcggctgacagggtaggggcgccgatctccatctggcgagcagagcagagcaggcgaggggaggggatcctggtgcataattcttgaatccattttaagtgcagcaattctgagtaccaaaaaatccattcaaaatggtggttcttgctgcttccatcatttcaaagtccgggaaagcacttgtttcaagacagtttgttgacatgtctcgcataaggattgaaggattacttgcagctttccccaaactggttggaactgggaagcagcacacttatgttgagactgaaaatgttcgctatgtttatcagccaatagaaggcctgtacttgctacttatcactaacaagcagagcaatattcttgaagatctggacaccttgaggctgctctctaagcttgtgcctgaatattctccctctcttgatgaggagggtgtttgtaaaacagcatttgagcttatatttgccttcgatgaggccatctgtcttggaaataaggaaaacgtaacagtccaacaagtcaaacaatattgtgagatggagagccatgaagagaaggcgcacaagctgatgatgcaaagcaaaatcaatgaaacaagggatgtgatgaagaagaaagccagtgagcttgataagatgaagatggaaagaggaaaacttgacaaaggaggatactcggcaatatcaggtcccagggtagttgaaaaagcatttggtgacatgagcattactggtagtggatttggaagtggttctggattaggtggactgagcatggatatggactcatttgctagcaagcctaaaggccgtccatctgcagctgctactgctcctggtaaaggtcttggaatgaaattagggaaaacacagaagacgaatcagttcctggaatctttgaaagctgaaggagaagtcattctggaggatgtacaacccagttcagttcagtcaagggtgtcgcctcttccaccaagtgatcctgtcacagtgacaattgaagaaaaactcaatgttacagttaaaagagatggaggtgttaataattttgatgtgcaaggaacccttgctcttcaggtccttaatgatactgatgggtttatccagttgcagattgaaaaccaggatgtacctggacttagcttcaaaacacaccccaatatcaacaaagatttgtttaacagtcaacaagttgtgggggcaaaagatccaaacaggccattcccaagtggtcaaaatgaaactcctctggttaagtggagaattcatgggatggatgagtcatcgttacctctatcagtcaactgctggccatcggtatctggaaatgaaacttatgtcaacattgaatatgaggctgctgagatgtttgacctgcacaatgttgtcatatctataccattgcctgcacttcgggaggctccgagtgttagacagattgatggagagtggaggtatgattcgagaaactccgtgttggaatggtccattcttcttatcgatcagtcaaaccgcagtggctccatggaatttgttgtccccccagctgatccatcaacatttttccccatatcaattggattttccgcatctagtacattcagcgatttgaaggttactggaattcgtcctctaaaggatggtaacccaccaaagtattcgcagagggctcgtttggtaacagccaattatcaagtggtttaacgcccaaataagggagattacctcacttcagcacacatgtttgcgggcatttcctttcggcaatgagctgtttagaagtcatggagaagaaggattgttttgcatttataaagaatgtaattttgtctgtttcatatgtagtaacatgtttcaccaaattgctgttaatttgtactgccacctgatgagaaataaaagcatgtcttttcctt

SEQ ID NO: 25079 - DNA, 2748 bp, Oryza sativa
  ref <308>: DATABASE ACCESSION NUMBER: AK100521
  ref <309>: DATABASE ENTRY DATE: 2002-08-28
gacttccttcccttggcgtaaaagaaacagaaatctctcgtctcgtcgtctccgctccttgcgccaagacgagtcgcgggtgaacaggggaggggacgccggacgccgatctccatctggcgagcagagcaacggaggggaggtgcgccgatctccatctggcgagcagagcaggggaggggaggggaggggatcgggcgaaatttgtgaaatctttcagttgatgaaatcttaaaatcatgggagaaaatactggcgataatccaaacatgtcaattcttcaaagaattgccacaagtgatgttccactggtgaaagagtatggtctgcctggaattattggtgccattctacttgctgtagttattcctatcatgctttcttccatattcaacaaaaagggaaagaaaagagcagtacaagctgatgtgggtggtgaggcaggacttgccatgcgaaacagtagattttccatgttagttgaagttccatgggagggtgccaccacaatggcagctttatttgagatggctagcaaaaaataccctcgacacaggtgtcttggcacaaggaagctaatcaatagagaatttgtggagtcacctgatggcaggaagttcgagaaattgcatttaggtgaatatgaatgggatacctacgcagaagcatttagtcgtgcatgtaatttttcttctggtctcatcaagttgggtcaccaacgagatagtcgtgctgcaatatttgctgatacgagaactgagtggatcattgctgctcagggatgctttcgacaaaatctaacagttgtaactatctatgcatctcttggcgaggatgcactggtgcattcactgaatgagacacaggtttcaactctgatatgtgattcaaagcaacttaagaagctacctgcaatcagttccaagttgcagagtgttaagcatgttatctatattgaggatgaacctgttgaggctgaggtactcaatcaaatgaagcactggacaacattttcttttggtgaagttgaagaattgggtaaaacatcacatacagatgcaagattaccttcaagcactgatactgcagttattatgtatacaagtggaagtacgggtcttcccaagggtgtaatgattacacatggaaatatggtggccacaactgcagctgtcatgacaatcataccaaaacttggcacaggggatgtttatctggcataccttccgctggctcatgtctttgaactagcagcagagactgtcatgttagcttctggtgctgccattggatatggctcagctctgactatgacagatacatcaaataaaataaagaaggggacaaaaggagatgtttctgcactgaagcctactcttatgatttcagtccctgcaattttagaccgcatcagagatgccgtgtttaaaaaggttggtgagaagggtggtctgaccaaaaagctgtttgacattgcctataaacgaaatcttggagctattgaaggaagttggtttggatcctgggcaccagagaggatgatatgggataacctcatttttaaaccaatacgttccatgcttggtgggcgcattagatttgttctttgtggtggtgcacctctatcgagtgacacacaaagatttatgaatatatgtcttggtgtaccagtaggtcaaggctatggattgacagagacttgtgctggagcagccttttctgaatgggatgacacaagtgtgggccgtgttggtccaccccttccttgttgctatgtcaagctcgtttcatgggaagaaggtggctataaaatttctgattctccaatgccccgaggagaggttgtagttggtggatacagcataacaaaaggttatttcaacaatgaagcaaaaacaaatgaggtctacaaggtagatgagaggggaatgcgctggttttacactggagatattggccagttccatcctgatgggtgcctcgagatcattgatagaaaaaaggatatagtaaaacttcagcatggagaatatgtgtctcttggcaaggttgaatcagctctaactactagcaattatgtggacagcataatggtttatgctgatccatttcataattattgtgtggcgttggtagtgccggcgcaccaggccttagagcagtgggctcaaaattctgggattaactacaaaaactttgatgagctgtgccacaatgatcaagccattaaggaggtccagcaatctctatcaaaggctgcaaaagcagcgaggcttgagaagtttgaaataccagcaaagattgtgttgctgcctgaaccatggactccagagtctgggctggtgacagctgcacttaaactgaagagggagcagataaagaccaaattcaaagatgatctgggcaagctctatcactgaatcagctatgatgtctgctggggcaccattatggatgaaataatctatgttcttttgctatttgtcatccgcaaggctctcttgacgggatgacctgctcactaaattcagcgtgtagtcaataccccgaatgctagacccgggaaacgactgggacgtggagcagtgtaattatgggatttctccgtgccttgttaggataataaatttctcaagaccggattaacctgcttctgttcttctggttaataatatatagttgcatgttccttttcttagcttgggatggttgtttcgtactatgatgattaacaaaagctgtttccac

SEQ ID NO: 25080 - DNA, 1621 bp, Oryza sativa
  ref <308>: DATABASE ACCESSION NUMBER: AK100522
  ref <309>: DATABASE ENTRY DATE: 2002-08-28
ggaacgcccagcgagcggaggagaggagaggagatcagggggaggaagggtggccggcgcagcagatcggggcgggcggatttaggggaggagcgcgctagccgggagcggcggcgatggatgaggagtacgacgtgatcgtgctggggacggggctcaaggagtgcatcatcagcggcctcctctccgtcgatggcctcaaggtccttcacatggacaggaacgattactatggaggagaatctacatcccttaatctcactaagctctggaagagattcaaaggcaacgagaccgctcctgaacatctgggtgtcagcaaggagtacaatgttgacatggttcccaagttcatgatggccaacggtgcactggtccgtgtactcatccacacgagtgtgacaaagtatctgaatttcaaggctgtcgacggcagcttcgtgtacaacaatggcaagatccacaaagttcctgcaactgatgtcgaggccttgaaatctaatctaatgggcctttttgaaaagcgccgtgctaggaaattcttcatatacgtgcaggattacgaagaggatgatccaaagtcacacgaaggcctggatctgcacaaggtcacgacgagagaagtcatctccaagtatggcctcgaggatgacacagtggactttattgggcatgcattggcacttcatcgagatgataactatctcgatgaacctgcaattgacactgtgaaaaggatgaagctttacgcagaatcactcgctcgttttcaaggaggatcaccttatatctaccctctgtatgggctagcagagctccctcaggcctttgctcgtttgagtgctgtttatggtggcacatacatgctaaacaaagcagaatgcaaggttgagtttgatgaaaatgggaaagcatacggtgtcacttccgagggggagactgcgaaatgcaagaaggttgtctgtgacccttcatacttgcctgacaaggtgaagaaggttggaagggtggcgcgtgcaatatgcataatgaagcatccgattcctgacaccaaggattctcattccgtgcagatcatcctcccaaagaaacagctgaagcgcaaatcagacatgtacgtgttctgttgctcatatgctcacaacgttgcaccaaaaggcaagttcatcgcctttgtttctacggaagcagaggctgacaagcctgagatcgagctgaaacctgggatcgatctgctcggacctgtagaggaaacattttttgacatctatgaccgatacgaacctactaataccgctgacgaggacaactgcttcgtgacaaatagttacgatgcaactactcattttgagacaacggtgaaggatgtgcttgcattgtacagcaagatcactgggaaggaacttgatctttctgtggatctgaatgctgctagtgctgctgaatctgaagcggcctgagcgatagctacttcttccaattccttttattctttcatagatggatctgttcaattaaactacttcttgctattccagttccatttgaccttactgaaacaaagtacagtatcacggatttatatataattaaataatcttcatatattcttgcctgcatg

SEQ ID NO: 25081 - DNA, 2929 bp, Oryza sativa
  ref <308>: DATABASE ACCESSION NUMBER: AK100523
  ref <309>: DATABASE ENTRY DATE: 2002-08-28
gggccaaggaggagccacggacaaggaggagctagctagtgaaataggtgtgttccgtgcatggcggccaccgcggcttccacgatgtccgcagcggcggcagtgactcgccggatcaacgctgccctccgcgtggacgccaccagcggtgacgtcgcggccggcgccgacgggcagaacgggcgccggtcgcccgtggccaagcgggtgaacgacggcggtggcggcaaggatgacgtgtgggtggccgtcgacgaaaaggacgtgtgcggggcccgcggcggcgatggcgccgcccggccgccgctgttccggacgtacaaggtcaagggcagcatccttcatccttacaggttcctgatccttcttcgactgatcgccatcgtcgccttcttcgcgtggcgcgtacgtcacaagaaccgcgacggcgtgtggctgtggacaatgtccatggtcggcgacgtctggttcggcttctcgtgggtgctcaaccagctcccgaagctgagccccatcaagcgcgtcccggacctcgccgccctcgccgaccggcactccggcgacctacccggcgtcgacgtcttcgtcaccaccgtcgaccccgtcgacgagccgatactctacaccgtgaacaccatcctctccatcctcgccgccgactacccggtggacaggtacgcctgctacctgtccgacgacggcgggacgctggtccactacgaggccatggtggaggtcgccaagttcgccgagctgtgggtgcccttctgccggaagcactgcgtcgagccgaggtcgccggagaactacttcgcgatgaagacgcaggcgtacaaaggcggcgtccccggcgagctgatgagcgatcaccggcgtgtgcggcgagagtacgaggagttcaaggtcaggatcgactccctctcgagcaccattcgccagcgatcagatgtgtacaacgccaaacatgccggcgaaaatgcgacatggatggctgatggcacacattggcccggcacatggtttgagccggctgacaaccaccagagagggaaacatgctggaattgttcaggttttactgaaccatccaagctgtaaaccgaggcttggattggcggcgagtgctgagaatccggttgatttcagcggtgtcgacgtgcggctccccatgctggtgtacatctcgcgcgagaagaggcccggatacaaccaccagaagaaggccggcgccatgaacgtgatgctccgcgtgtccgcgctgctgtcgaacgcgccgttcgtcatcaacttcgacggcgaccactacgtcaacaactcgcaggcgttcagggcgccgatgtgcttcatgctcgacggccgcggccgcggcggcgagaacacggcgttcgtccagttcccgcagcggttcgacgacgttgacccgacggaccggtacgcgaaccataaccgcgtcttcttcgacggcaccatgctctccctcaacggcctccaggggccctcctacctcggcaccggcaccatgttccgccgcgtcgcgctctacggcgtggagccgccgcgctggggagcggcggcgagccagatcaaggctatggacatcgccaacaagttcggcagctcgacgtcgttcgtcggcacgatgctggacggcgccaaccaagaacggtcgatcacgccgctggcggtgctcgacgagtcggtcgctggcgatctcgccgccctgacggcgtgcgcatacgaggatgggacgtcgtgggggagagacgtcgggtgggtgtacaacatcgcgacggaggacgtggtgaccgggttccgcatgcaccggcaggggtggcgctccgtgtacgcctcagtggagcccgccgcgttccgcggcacggcgccgatcaacctcaccgagcgcctctaccagatcctccggtggtcgggcggctcgctggagatgttcttctcccacagcaacgcgctcctcgccggccgccgcctccacccgctgcagcgcgtcgcctacctcaacatgtcgacctacccgatcgtgaccgtgttcatcttcttctacaacctcttcccggtgatgtggctcatctccgagcagtactacatccagcggccgttcggcgagtacctcctctacctcgtcgccgtcatcgccatgatccacgtgatcggcatgttcgaggtgaagtgggctggcatcacgctgctcgactggtgccgcaacgagcagttctacatgatcggctccacgggggtgtacccgacggcggtgctgtacatggcgctcaagctcgtcaccgggaagggcatctacttccggctcacgtcgaagcagacgacggccagctccggcgacaagttcgccgacctgtacaccgtgcggtgggtgccgctgctgataccgaccatcgtcatcattgtcgtgaacgtcgccgccgtcggggtggcggtcggcaaggcggcggcgtgggggccgctcaccgagccggggtagctcgccgtgctcgggatggtgttcaacgtgtggatcctggtgctcctctacccgttcgcgctcggggtcatgggtcaatgggggaagcggccggccgtgctgttcgtggcgatggcgatggccgtcgccgccgtggcggccatgtacgtcgccttcggtgcaccgtaccaagctgagttgtcaggtggtgctgcttctctcggaaaagcggcggcgtcgctgaccgggccatccgggtagggacagttcgatcgcgtttgatttgatttgaatatttgattattttcttggtgcaataattggttgttacttctgttatgtcgttacgtcataggagcggctgactatattgctagtctgctctatacgagtgagacttggattgttcttctttaaaaatgacaagatttgaatttctccagcgtgatttgtcgacttt

SEQ ID NO: 25082 - DNA, 2045 bp, Oryza sativa
  ref <308>: DATABASE ACCESSION NUMBER: AK100524
  ref <309>: DATABASE ENTRY DATE: 2002-08-28
gtttcttgagctagcacagcattaattaaaccaccaacccaaatattgttcgatcgatctgcatctgctagctgctgctgctgctgctttttcttcttcttctactggatcgagagagagagagagagaaagaaagaaagaagattatatatattaacaatggccatcggagcgttcgtcgaaggaggcggcagtgggtacagcgggcgcgtgactccgttcgtggtgctgtcgtgcatcgtcgccggcagcggtggcatcctcttcggctacgacctcggcatctcaggtggggtaacgtcgatggagccgttcctgaagaagttcttcccggacgtgtaccatcagatgaagggggacaagaagaaggtgagcaactactgccgctttgacagcgagctcctcaccgtcttcacctcctccctctacatcgccggcctcgtcgccactctcgtcgcctcctccgtcaccaggcgcttcggccgccgtgcctccatactcatcggcggctccgtcttcgtcgccggctccgtcttcggcggcgccgctgtcaacatctacatgctcatcctcaacagggtcctgctcggcattggactcggcttcaccaaccagtcgatcccgctgtatctgtcggagatggcgcctccgcagcaccgtggcgccatcaacaacgggttcgagctgtgcatcagcatcggcatcctcatcgctaacctcatcaactacggcgtggacaagatcgagggcgggtgggggtggaggatctccctgtccatggccgccgtccccgcggcgttcctcaccgtgggcgcgctgttcctgccggagacgcccagcttcgtgatccagcgcagcggcgacgtggactcggctcgggcgttgctgcagcggctgcgcggcacggcggcggtgcacaaggagctggaggacctggtgatggcgagcgaggtgtccaagacgatcaggcacccgctgcggaacatgctccggcgtcggtacaggccgcagctggtgatcgcggtgctggtgcccctgttcaaccaggtgaccgggatcaacgtgataaacttctacgcgccggtgatgttccggacgatcgggctgcgggagagcgcgtcgctgatgtcggcggtggtgacgcgggtgtgcgcgacggcggcgaacgtggtggcgatggcggtggtggacaggctggggaggaggaggctgctgctggtgggaggggtgcagatgctggtgtcgcaggtgatggtgggggcgatcctggcgggcaagttcagggagcacgggaggagatggagaaggagtacgcgtacctggtgctgagcgtcatgtgcgtcttcgtcgcgggcttcgcctggtcgtgggggcccctcacctacctggtccccgccgagatctgccctctggaggtgcggtcggcggggcagagcatcgtcatcgccgtcatcttcctcctcaccttcctcatcggccagaccttcctcgccatgctctgccacctcaagttcgccaccttcttcctcttcgccgcctgcctctgcgtcatgacgctcttcgtcttcttcttcctccctgagaccaagcagctgcccatggagcagatggatcagctctggaggacgcattggttctggaagaggatcgtcggcgactccccccaacaacaagtagtcgagctacaccaccaccaccaaagatcatcatcagaataaacaaactaaatcactaaacacgccttccacctaagtatatacgcatcataccctatataatataatatgcatgtattaattaactgatgatcgactgtatgcataatgcatgtacactactactacatatatacaacagcaacagtcagccagccgcccacaataagatcagcccagctcaattgcaccttaattagttaattaagaggctgatcacaaaataattactccatatgtgcaaccatttgtggcctcacgccttgttaactctctgtaacagtattactatgcatatatataatttgcataatggaagatgtttcctct

SEQ ID NO: 25083 - DNA, 2788 bp, Oryza sativa
  ref <308>: DATABASE ACCESSION NUMBER: AK100525
  ref <309>: DATABASE ENTRY DATE: 2002-08-28
gtcgcgcgaaatcccccccaccacccccttcgcgccgccgccctcgtcgtcgtccgaccacccgatcccgacgagaacccgtccacgtccatctccgccgctgacagcaccagctcttcgccgacgccgccgctgagacaccgtcccggcgcgggcgaggcgacccatgggatcctccggcggatagctcggcctccctcggggctttgccgggctaagccagcgcccgcggcgtcgtgtcgtcgtcgtcgtcgtcgtcgtcgtcgtcctcttgtgatcttgttttcccggcgtcgtgacgaggccggagaggaagagatcgaccggagccagcgcctctgctcgccgcggttgtttcgctaagcttcgtctggttcttgattccctcccccacattctcggccggaagagggcggcggcagcggcgggtggccgccgggctgccattgtccgggaggcgctcctcccccgtcgccatgggtgcgcggtgggggcctcgccgcgccaccgtcgggccccacctccgcgacgcgctgcgtcacctgctcttcgtcttcctcgtgctgctccaggcgcaggcggggcgcggcggcgccacgctcaacggcgaaggaatggcgttgctcgagctgagggagagggtggaggctgacccccatggcgccttgcgggattgggatccggcagacgccacgccctgcagatggtccggcgtgcattgctttgacggtaaagttgagattttgaacttaacaggccgagaattggtgggaactctcgcacctgagattggacgtcttcaacttttgaaatctctcattcttcgaaacaacaatttccgtgggaaaattcccaaagagttcggagggttaactgcccttgaagtactggatttgagcagcaacaacttggatggaacgattccagaagaattaatggcaatgccactgctcaagcagctgtcacttcatgacaatcagttccaagatgatatctcttctttgcacattcaagatatatctgatgagcaggcaggatgcttgagcagaaaattaggttgctgggcggggtttaaggattggacttctttcagtgatctccgagagaaatactccaccaacctagcaagtaaccgcacatttaaaagtctaggcgagccacacattatgcaaaatttgcagtcctttgcaagtgccgtgggccgcaggctgctcggtgaagttggcaatctgcctgccctttcagggaattatgctaaatcttctggccctgtaaattcagaagagatccaaaggactattgatgttctctctttagggagtggttcattctctgcattcccaaattcagaggccgaagttctggaatcagctgtaaatactgatgctgctgcaatgcagtctggagcagcaaatcaatcaaccgatgaagtgtctggttcaaagcacagcaagtgggcatattttatgataattccagctgcaatattgctgattagcctgattgtggctccaatcttggtctggcggaagcgagggcgtgcggcaataggaccttggaaaacgggtctaagtggcccacttcagaaagcatttgtaacaggtgttccaaagctaaacagacctgaactcgaagccgcttgtgaggatttcagtaacataatcaacactttccctagctgcaccgtgttcaaagggacattatctagcggagttgagatcagtgttgtttccactgccattttgtcgctcaaagagtggcctaagagttcagagacatgcttcagaaaacagatagacacactatcaagagtaaaccacaagaatttcatcaacctcctaggttattgcctggaaaatcaacccttcatgagaatgatggtgttcgagtatgctccaaatggcactctctctgagcatctccacctcaaagaatttgagcatctggactgggctgcaaggatgaggatcatcatgggtgtggcatactgtctccaatacatgcaccatgatctcaatccacctgttgcgataaccgacatgcgctccgacacaattttcatgacagatgattatgctgccaagattgctgatgttggtatctggaaagaagtcgccataaaagcaaagactgcaaaggaggatagcagcagccgttctgaatgtcctcctgatatcgcgagcaacgtctactgctttggcacgcttctgatagagatcatatccggaaagctccctgaagcagacgaccaaaaatccatgtgcaactgggccgctgagtatctgaagggcaagagctacagcaagctcgtcgacgcgtcgctgaaggaacacaacgccaacgagctggaggccgtctgcgaggtgattcaggagtgcattgatcccgactcagatcagaggccgacgatgagagacgccacccgcaagctgagacaagctctcaacatctcgccggaggcagcgacgccgcggctctcgcctctctggtgggctgagctcgagatactctctgcagaggcaacctagtagattgatcagtgatgtatactgttgctggtgaaccaatactcgcggcagcatccctcttcacaaggctaaaggaaaaagcctgtttatgtgcagaattcatgttcttgatcctatgaaaaaaaatgtcgtgtgacagatgtgcaactattgggtctaatgtgcattgatctttacacaagaatggaatgtgatttgtatgaatatttataagtttgatcagtgtaaaaatcaagcaagttcgctgctgttattccatt

SEQ ID NO: 25084 - DNA, 2128 bp, Oryza sativa
  ref <308>: DATABASE ACCESSION NUMBER: AK100526
  ref <309>: DATABASE ENTRY DATE: 2002-08-28
gaggctggtagtagcgcagcggtagcctccttcgttatccccaaaccccgcgccgacgggcgtcctcctcaccgacatttcctcccacccccgcgcgcgccccgccgcctttctcgaacctccgccgcattcttgtcaccttgttgattcttcattcttgatttgttctccttttttttttggtgattttgttgtttcttggcctgctactgttggcggcggcgagcggtggtcaccggccgtgcgttcccttctttctcctcagccctcggctcccccgccggccggacacgccgccggagctgagttgttgaggttttgcagggaagggatacactccgatccccaatgccccgcgtttggtccgcccctgcatcctcctccacagattgctaggcttcaccggagatgatggcggcgccgcagctaccgtgctgcactcgcctcgctccgccgtgtcccgggaaggcggcggcggaggcaagaaccctggcacgttcacggttcaggtgctgtgcgggggccgcgaggcctcgctcgttccagaagaaagactccttcctggacctccaccctgaggtgaccctcctccgcggcggcgacgaggcggccgtcgtcgccacgaggaaggggtctccgaacgggagcccgctggaggggctgggcgcgccgccggatcactgcgattacgacggggccaagatcaaggtcgtcggggtcggcggaggaggctccaatgccgtcaacaggatgattgagagctccatgaacggcgtcgagttctggattgtgaataccgatgtgcaggcgataaggatgtcgccggtccttccgcagaacaggttgcagattgggcaggagctgactcggggtctaggcgcaggtggaaaccctgacattgggatgaatgcggcgaaagaaagtgtcgagtccattcaggaagctctttacggtgctgatatggtttttgtcacggctgggatgggtggaggcactggaactggaggtgcccctgtaatcgctggaattgccaagtccatgggtatactgacagttggcatcgtgacgacaccattctcatttgaagggaggagacgggcagttcaggctcaagaaggaatagcagccttgagaaatagtgtggacaccctcattgtcatcccaaatgacaagctgttgtctgctgtttctccaaatactccagtaaccgaagcattcaacttggctgatgatattcttcgacaaggaattcgtggtatctctgatattatcacggttcctgggttggttaatgttgattttgctgatgttcgagccatcatgcaaaatgcaggctcatccttgatgggtattggaacggctacagggaagtcaagagcaagagatgctgctcttaatgccattcagtcaccactgctagacattggaattgaaagagctacaggcattgtgtggaatatcactgggggagctgatatgactttgtttgaggtgaattctgctgctgagatcatctatgaccttgttgatccaaatgctaatctgatatttggtgctgtcatagacccatcactcaatggccaagtgagcataaccttgattgccactggcttcaaacgtcaagatgaaccagaaggtcgcaccacaaagggtggccaacaaacgcaaggagacaatggtcgacgcccatcctctgcagaaggcagcatgattgagattcctgagttccttcggaggagaggaccttctcgcttcccgcgagtctgactgcccaggctcccttcccttgcccagtatctatgcttatcagcattctcctagatcagtcgcctcatgtaggataccaggcatgtacagtactgtagttgtttggttgttcagttttgtttactcccttatgttctatattttgagatcttactgttaataatttgtagcaatgagcttgctaatgctatagaaatcgttttatcccagtaggtcaaaatgatcatatgcccctactcaagttgtgttcatctcacgaggcttttactcggttgagagcctggaggttcctctgttttatcgacattgtgtgtgcattgcctgacaagcatggcaaatcgtatcccttaattttggtttc

SEQ ID NO: 25085 - DNA, 2296 bp, Oryza sativa
  ref <308>: DATABASE ACCESSION NUMBER: AK100527
  ref <309>: DATABASE ENTRY DATE: 2002-08-28
gccgcatctctctctcctcgcctagggtttcacgccctccgatcccgcggcggcggcgaagcttccactcgcctcggcggcggcgccggccagggacatgggaatggaggttgttggaactgaggctgcaccagcagaggttaaagtaactgatggagaagtgaaccttttccaagagaatgaaagtaaagcaactgccaaggaacgtgaggaggcggttctttttggttcagataacagcacagctacagcaaatggagccgcaaatggcgctgatttggcacccccaaaggatgcagaggaggactggcctgaagctaggaaaacacatagcttcttctttgtcaagatccgcttacttgaggaccctaagctgaaaatgaagattgatcaggcagaaaaggacttccagaagaagattcaagctcgttctcaaatttttgaggctataaaagccaagaagaatgagcgcttcggtattatctcagagctgaagccattggctgctgagaacaagcaatacaacgaagccgtaagtgagaagttgaaggcgatagaacctcttagaaaccgtttaggaaagttccgcgatgaaaacaatgctatccgggcacagggtgcaggcatatgttcttcaattgaagagcttgagaaatcgatcaagagattgaacgaccgcatatctcatgagagcatacccttggatgaggagaagcggttgatcaaacagattagagagcttgaaaagaccagaccgaaagtcatctccacttctgctaaccgagctcaaatccaagatacagtggtcgaaagagacgccatacaggatcaggttaaaatcatcggggagggcattgatggagtaaagaaggagcgacaagcagtcaggtctaaaattaaggtcctggaggatgagctaaaggctattgacatggagatgggttcgcttcaagaagatttaactgctgccaatgccagaaaggacaaggcacatgaatcattggtccaattgagacatgcacgagatgcctataacgcatcattccatcaaaaccgccaacttctgagcaaagctagggatcttgcttctaggagtgagcttgcacaagtgcaagagctctacaagacacaggttgacaaattcgtggcagaatggtgcaacagcaaggccttcagagaggactacgagaaaaggatcctctcctccctcaacagtcgacagcttagccgagatggccggatgaggaatcctgatgagaaacccatatttattgaaacagaggcagcagcaccacctgtagaacaagagcctatccaatcaaaaatgcctgcaaaacaagccaaggaagcgcctgctccccaagcagaggtttctcccaaagatgagtcccgcgtgaaagcaatagctaagccatctaaggctaaatcctctctggatgctgatgatgactatgaggccgagtctcccaaggagaagccaaagcctaaagaggttgatgtagctaagttgaaagagatcaagagacaggaggagatggagaagaatagacttgccctggaaaggaagaagaagctggccgagaagcaagcagcgaaggcagcagcccgtgcacaaaaggaggcagagaagaaactcaagagagaggagatgagggccaggaggagggctggggcagctgacaccgaggcgtccactgaatcggacaacaggtctgatggagcaggcggaggcacaagcagaggacgactccgctcctgcttctgctccggtgatgagagaacagagggagagtgtccggtacagcagaaacgtcgtgaccaagagcaaggccccgctgccgaaggcgatcctgaggaggaagaaagcccagtcgtactggtcctgggctggccctgctgctgcagtggccgccgcgctcgtcgccctgcttgccgtgctaggctactaccagtactacctcccagcgagcgctagcaactgatggaaggaaagcaggcagcccccccttgagaattgcttacttgaacaattttgcaggtgagaaacagagtgcgtggtctgctgagacgtggactgaaagactggagatttgttcgttttcgttctgttagtttgatgatcggtggataagagtaaggaaaaaaaaaggatagaagttaattttggttgggacttagaatctcctatatactgcgagtgatctcatgtactcttaaactgaagcataggttgccgttctgaaataaacaatgccgcatgctttaggtttacttatctgttcctatgagccagatg

SEQ ID NO: 25086 - DNA, 2387 bp, Oryza sativa
  ref <308>: DATABASE ACCESSION NUMBER: AK100528
  ref <309>: DATABASE ENTRY DATE: 2002-08-28
tcgaggaggaggaggaggaggagaggggaaggggaggaggccgccatcccattcgttgctagttcggcgggtccatttcgacggcggcggcggcgcgcgcgcgcgcagcggggagaggagagccgaggcgaggagatcttcgcggggtgaagcttcaaagccctcccctccgccgccgcgtcaggtgaggtgagccgattcggagcgcttttccctattattttttttctctgtgtgtgtgtgtgttttgagattcttttcggggatgtttcgtcgaccgtagtgggggtatgggttttctactgttaaattctgagagcatctgactctggttggagggtgcgatttccctatcgatttggcactttgaggttactgtcgcctgtatggtggatttggagtagtcaaacagtctgttggatgtggtattttcgcgaattttaggtcataacactaagatcgagtggttgctctgtacgattttgctagttttttttttaatatagaatgcttcggtcgctgataatgcattttcttactttcgaagtatataaatcgatcatagtagtatcggattatgtggtattgttcgatttgttgtcaccttttgcccttttggattcaaccatgcactcagtgattaattttggaaaagttcgatgattattcaagtggaccgctttttaggtaggtaaagtgcacacggtttgctgttaggtggcttctggttggatatcagagtgaggtacaagctgatttattgttctgtatgaggtagatttcacaaatttacgttcccaggactgtaggttgtgtaggccataggttctgtcgaatttaatttaagtggttcaaagccgagaagatgatttacttgtacgatagatgctaccactggatcatgatcatggtgtaatgctcaagttttgtttgttaccctacgtatttccatgatatgtgtcctgtgtcctgatgttgtctgacggatatgcgcatgctcaatcacactactggagtgacaatctccttgcttgcatgaataggaagcatttagaatggtggacaagaacgatggatctgaagggctcaaattcaacacatcacacctgatgcaaacaactgaagaggtagcgagagcatttattgctgcagcttctgcagccactgtacagtcaacacgaccatctgtggtgtactcttccagagaagagagtggcagcccaatgcagaagctgcaacaacaattttcgaagatcctgaaagggttttcaacgtcacctgaagtgtctggatcttacaacccggaggttctcacaacacaaaagcgccagtggtccaggttccaactaaagtcgctggtatgtatcgcattttcaatctatatgttggtggacatacttttgcagattaacttcggcctttaattcagagctttaatttatgagtgacctgtatcctttaactgctatgacagagtacagtagtgcacaaaacagagctaaatatgctatttttttcactagttgttcaatagtgtgtcttcattggcagtggtttttcaagcataatattcaaacttgcagttcatcttagggatgttagtcttaattctttcccattacaacctatacaggtcatagcatggtcacaagacaagataacagtcgcttcaacgtctatgttgttccatttacacgaactatgtgtattttttgatcaacattttttgtcttggagttttacttatagaaaataccagaactcatttaatatcgcttgtcaggctcaatgatctatcacacattgagtttgatttgcatgaaagttttactttggttctttcaccttgctcatgtatctatcatgtgtacttgtgtagtgagtggtgacttatcagcattttgctgaattatttgaaactatttaggaaggtttactcaacagttatgattacatttatactagtcatctctggacagtttcacactctatagattataaatagcagttacctttgttctgtaatggttgaaataacctgagcatcataacaaaaatatccattttgttatattcttatgtacttgttcacaagtgcctctgaattctgagtacttattccagtgcaatagccatgtacagtaagaactcaatagggtagctttgtttctcgtctacctttgtctttgttggtacagctttcttagactttgtagggccaaagtgcaaaagttgttgctgctgatgcatcaaaatggtgggatggcgccatttgtgagcagtcagttcagctttatcttttctgctgttctgctttcagtttatatcttgtaatgaactactatcgtttctattaatggaaacgggagaggctctctctccactcc

SEQ ID NO: 25087 - DNA, 2761 bp, Oryza sativa
  ref <308>: DATABASE ACCESSION NUMBER: AK100529
  ref <309>: DATABASE ENTRY DATE: 2002-08-28
gacaagccaagggccacgattccagatcaaacgccacaaactaaaaaataaaaaaaaaatcggaagaatagagagagagagagagaaaaagaacgatgagagcctccccgagcgcgcccacctcccacggctccggctaaaaccctagagcgcgcgcgcgcgagcgcggatgcccctcgctctcctcgcccgcgccgctctctcctccacctcctcctccatcgccatggccaccacgcgctcctcctcctccagggtgcttcgtgcctcccgtgcggagctcaacccaggtgctaaagaagtgaaacgtgaatccagtgtttcttttgacttgaccaaaactgaagcggttgcttccatgagaagcaaaaatgtgaaacgggtgcttgaagtaactggggaaaatattaagaaagaggttgatatcgttcctgacattgaagattttcgatatggcaaggcatcgccatctttagttaggttggagaaaaaggtgagagtttcatctgctataaaaggtactcagaagactacctgatgagagaagctatgcatttcttgtttaacatctttgtaattttcttgttatgtgttagtttctttctctgccagctgatatcaagttaaatctgtacaaacaatattgacaatactttactgaagttttcagttatatattttatatattgctaaaatgtttatgctgctctggattgcaaaaataaacaatcactagattatgacttgcatcatcttaaccagaaggcaatatagtactacatattggttcatacatgatggctattcattcctcaatttcccacacacatcattcatggaatatctaaatctgttgttaagttcaaaattttcattgcatgttcacctactattaacaaaaataacaatcctagctgccaaaaagctgccaggttggtagcagaatgttcaacatcagattcagtgtatccttgtgacacatattagtgattatgtggccattatggcattatcaattgctctaccgtttaaacacaatatatgtcaagacaatgatttgttgtctattgtgtgaaatttttttcatacatttatgcagttggagctccagaaaattgggaggcaatccttaagggtattaaaaacatgaggttatctggcgaggcccctgtagatacaaagggctgtgaaaaagctggttctcttcttccacccaaggaaaggagattcgcagttttgatatcaaccatgatgtcaagccaaacaaaagatgaagttacacatggtatgtctcatgaagatttcttttttggaattggttatacactatttttgctagccttgttatagttttcctatagctaaaatgtgaaaaatgaaaaagagcatgtgatctattctgattggagtgttatgcatactctgctgtgcaatggttcagatgataatatgttcttaataattgattggtagtacagaacttcatgctatgtgaccatcctgtgtctatacccttccatttgtttccccattgaactaaccttgtcataaacatcactttatgtaccacaactatgtctgtttgctgcatctgtactatattctttcatataaatgattattgtattttggatcaattgttatcagctgctgttgaacgtctatctgagaaaggtttacttgatccggatgctattgtccgaacagatgaggccacactagcgaatcttatcaaacctgtaagttgcaagaactgtttggtgggaactttcccaactacaataaattactgctctgaactacccaatataaggattgatcctacaaatgtacaaaagaatatacatgatctgcatatcacagtatgggctctagcaaatggtaacaaaccaaactttgaatgcatgcaatttagttgaagcataaccttgatttggacctcagaagacaagaagctagctagagctgtacctgctttgttaattgtactgttatagtttcttgctggaaattactcagctcagcctttgacatcatactggttattgtttaatcaggttggattctatcagaggaaggccaaattcataaaagaagcttctaaaatttgccttgaacgttttggaggggatattccagattctctgaatgagcttcttgctctgaaaggagttggtcctaaaatggctcatctggtgatgagcattgcatggaagaatactcagggaatttgcgttgacactcatgtacatcgcatatctaaccgtcttgggtgggttttccgagagggaacaaaacagaaaactacaacacccgagcaaacaagaatgtctcttgagaagtggctaccaaaggatgagtgggaacctatcaacccattactggttggatttgggcaaacaatctgtactccacttaggcccaaatgtgacatgtgcggcataaacaacatctgcccttcagctttcaaggaatcatcaagcccaaatccaaagcaaaagaaaatgaggtcatcttagaactttttggcagggatgccttgtgtactttgtgtacatgcattatttactgacctgctagtgctggaatgctcttctaaaaggttggcatatttattgcctggatgaccttcctgcagccatctatcattttgtatagccattatgtagcattttgtatagccgtaatctattgagacaatgggtagggacattgatcttgccagttatttattatgggcaaacaactggcacttggtagg

SEQ ID NO: 25088 - DNA, 2358 bp, Oryza sativa
  ref <308>: DATABASE ACCESSION NUMBER: AK100530
  ref <309>: DATABASE ENTRY DATE: 2002-08-28
gctttttggtggtggtgctcgctctcgctcaccctgctttgacctttggatttttatttttaaggatccaagaaagtgctgtttcttgggttgcttggaggtggaggagtttgggagattgtttgtgtttgattgattggttgattgattggaggaagatgacggtggaggagaggcaggggagggtgggaggccatggtgtgagcggcggcggcggcgggagagaccagttcccggtcggcatgcgggtgctcgccgtcgacgacgaccccacctgcctcaagatcctcgagaacctcctgcttcgatgccagtatcacgtgacaacaactggtcaggcggccacggccctgaagctgctcagggagaacaaggaccagtttgacctggtgatcagcgacgtccacatgccggacatggatggcttcaaactccttgagcttgtcggcctcgagatggacctcccagtcattatgttgtctgcgaacggggaaacacaaactgtcatgaagggtataacccatggtgcatgtgactatcttctgaagccagtgcgtcttgagcagctaaggacgatatggcaacatgtgattaggcgtaagaattgtgatgctaagaaccgtggtaacgatgatgacgctggtcagaaggcacagggaatgaacaatgaaggtgagagtattggtgctaaccgcaacaagaggcagtcacggaaaagtagagatgagaatggagatgatggtgatgattctgatgagaacagtaatgagaatggagactcatcaacacagaagaagccaagggtcgtgtggtctgttgagctgcaccgaaagtttgtggctgctgttaaccagcttggcatcgagaaggctgttccaaagaaaatattggatctcatgaatgtagagaacatcaccagggagaatgttgctagtcatttgcagaagtatcggctgtaccttaaacggttgagcactgatgcaagcaggcaggctaaccttgcagctgcatttggaggaaggaaccctgcttacataaacatgaattcatttggaaactacaacgcatatggtagataccgtacagtcccaactgctggccatacccaggcaaacaacattcttactaggatgaactccccttctgcgtttggtgttcatggtttgctgcattcacagccaattcagttaggacatgcccaaaataatctgagcacttcactgaatgatttaggagggcttaataatggtaacatgatcagaggtgcacagatgtcaacaattctaactggtccttctggtaactcctttccaaacatatcgaatggtgcaccgctggcaactgcaaacagatcactgcaacctcttgagtcgagcaatcagcaacaccttagtcgggtgcattcatcttctgcagatccatttagcacacttgttggtgagtctccccagtttcctgatcttggaagaaccaccaatacttggcaaactgcggttccatccaacattcaggatcgtggtcacaatgataacatgtcgcaagccaccctgcatatgaatggccccaaaattgaacctgtctcaagcttcacatcatccaatcagattccgctgctgggaaatgagatgcagggccaagtagcatcactagctagcaatgttccaatagcattcaatcaggacacatcaccattcaactatggaagcagcacaaactcaagagacatgctaaataacagccatgtatttagtaactccagcatcaacacatcgttgcccaaccttagcttagacaatccggctgtaccaaggcagacactggatcgtgggaatacgggcattgtttctcccatgcaagatggaaggattcatcaccaagctgttagcaatcagctaaactataatgacgatcttatgcggacaactgggctgcaaaggggtctcagtggtggtctagatgacattgttgttgacatgtttaggccggaccgcgaagacgacggcgttccttacatcgatggggactgggagctggtctagccagcctccatttcaatcattagtccgcgtacgaggtttttctgcattcgcggtgtcggctgctgattggtccatgctcacttgtcagcacaaagtggtgttcatagtggctagccttcatcacaagtgcatttcacatttggcttcttttttcagcttagtgattattagttggccagtcagtctgtgaaatttatgtggagaaacggctatgtggtgtgtttttatcatgacttatactataataactatgttagttcaggtataaccggttatcctgataatatagtatgcttggtaaaattctcgttaatcatcg

SEQ ID NO: 25089 - DNA, 3630 bp, Oryza sativa
  ref <308>: DATABASE ACCESSION NUMBER: AK100531
  ref <309>: DATABASE ENTRY DATE: 2002-08-28
gataagagagactcagctcccttccctccactgtttgttcaaatcttttcacttcttcttggctgttttctctttgtttttttgagggggtttggtggggttttttggtttgagttttgaaggggttttcagtttgtttccttggtgatttgttttgttttcttctgggtgtatttttctcactccttttttttttcctctcttcaaaatggttgagaaaaatacttgcatctgtgtgagctaagctagatttaccaagttactatcatttttcccccttgtgtttgcactggaagtagtactattagtatttattctttcctttttactagaactttaagcaacttgactagtgatgactcttgcagtgaggtttttcttctttcctagtgtttcccctctctagctcctcttgtttaagacctctacaagcttatgtctccgctttttgaagtttccacctgatgtcttcctaaaatatgcttcttgttttgtacatcaaacgaacaggcatagtgcacttaggaaaaaaaaacttactcttttttctctgtagttttcttgctagtctcttctctgctcttgttcttggtttgaaagttttgagctcgttttaactttacatcgtccttcatcttgtgatctgtactcgtagttctatactccacctttttttaacctcttttacccacacatcttcaaggtaccccaaatgtgaaaataaactggtgtatagtacttcaaagattggatttttccgggctgcactttatatgtggcgtatatgcaaaatcctaaaaagaaatagcccgtgattcctgagattccatgtttctttgctctccattattagcagataagagattcttgtgcaaagctccaaaagatgctactgtttggtcctagatattgttcagtgaggctatttcccacatcccacatttctcttttattaatatattttcgtttttcctgagattttctctacctagacacgtaatgaactgcatctttttttgtcagtttctttttgttgtactactactagctgtgctcttgtgactgtgagagacaagatttcttgggaggaggataaggtcaaacaagaaatccctaggggtgcctttgtaaatttgttttaaaaatcttccgaacgttgagaaacattaggtggtgagatcgaaaatgtagtactgaatggacagtggaagccataagtatgaaatttatgaggtaccccaagccgaggcctgtgtgtctcattaaatatggcctgtgaaacttgcttccatgcttcagataactagccatatttcatttcaactactagtagtactgcaaaatttcttttgtgatccatgcagtgccatatacccctggagatggtagtagctcatttccttggctgatagatctagtttgtgtagctgagggttacattgcttttgtctcacttttgatagaaccaagaaaaagagtgcgcaaaagcagggccatgcttttgcctattctctttggcctgccctcctccctcccttttatttttttctcttttgaacaggaaaagaggcccctaaaccgttgcaattttgcctttaaccccaaatgctgttgagggctagccgcatgaccagccaactggtaggtgcaccacagtatggcatgcttaaattgcatcaggccaactaactgcccttgattgcaagggagattgttgatgctacttaaatgtgtcaacgttgacacctcaacacacaaaagttaccatcttttaacgggttaatctggtatgaacccctggaattctagcacggtgactttcagcaggcaatgcatgtgcttcttgcagtttatgttcacgcattgtttgtacaccctggaagcttttactgcataaatttcatagcatgcaatgtttacctgtacatgttcatgtgatgcaaccaaaccatcatggtccaccaagtttgtgaaatgttggcaggtaccagaggctgaccaagcattcgattgccattgatggatcccggctgtccccgttgggctggagtggcctatcatgggcgattggaatcctcattgcggctccgatcctcacccaggctgcacaccaccttgaccgtggccagtatcagtcgctcatcctcattgccgcgacatcgtttggctcattcttctgcctcctcactggcttcttcaagacagtctgggtgttcctcttctacatcctgttcattggtgcatccatcattgttgctgaggctgtgcatacacgcaatcttggactcatgatccgtggccttgcagcacatgactctggcaagcaccttgtccttcgccgtcgtgctgctgccagtcagctcaccctgtattgcactgccattggtggcattggggctgcgctcatggctgctttcatgtaccacatgcttcggcgcactgaccagctcacaggcctttgggtcgtctccatcttcagtggccttatctggttcattggtatctgccatggtctcttcacaaaccgacccagcagctcatcgcccaccacagcatttgagcctaacttcttcaccaagctcagctacagcatgacccttgtgcgatacccacaggccatcggaagcttggttgcagtgttcctttcatctttcgccacaatgtgcatcttcaccagtggcacattgtatgctattggtggtgtttgcatcaagccagtccttgtgctcgtgctctggatactctacttcctgttcccgttgatctcacttccgctgctgcacccaatccagatcgtcatccgtgctgatgctgttcgcatgcagctgcttgggttcatcatctgcctatttgtgtctggtgctggtttctacttcaagagccacaggtggagagccgctcacatcattgtgatcgctcttgtccagagcacagccaatggtgtgctgtactcatttggtcgcattctgctgctcgatgcctcgccaccagggaaggagggtgcttttgcggtgtggtatgcatttgtacgctgcattggtgctatgattggcttcgctgctgcatccgctgggcctgggcgtgctggaggatcgtttgctgctgcgttcctaggcagcttcctcggcatcattgttctgatctttggtaatgtgagcaacatcggggcgctgaaggctgctgggcatctgaagggaatggaagacgagaagaggctgggcatggagaaaggggaaggcatgagtgcggttgccgattccggcgagggaagggggagggtatgatgatgattaaatgggcttgtgggaaggaaagattggaaaattgctgtggaggttgtgtttgtgagagggatttgttcttctttcttgtttctttcttgttcatgtttcagtgacactgttaattcggtgctttgccccccttggatgcatgatgatgatgacatagtggtagaggaagtgtgctagttgttaatgtgttattctttgcttggaagacaattgtaactgatgatatggttctttgttcatcgccaccgaaattctctctggcagtcatgcttcgtggttgcttttctgttgaaaatgtgattgtcaaagtgaaataaaacccttatataatatttcc

SEQ ID NO: 25090 - DNA, 3285 bp, Oryza sativa
  ref <308>: DATABASE ACCESSION NUMBER: AK100532
  ref <309>: DATABASE ENTRY DATE: 2002-08-28
gatatatttcaaaacaaaccaaaccaaacctgctgcttttgctttggttaattagctgagagagaaattaagagagagatgagttgcagcagcagcagcgtccatggcttcttgtggctgatgctcgtttatgcgtcctgtgcagctgttcaagctcagcaagcagcgagaactgatccagcagaagtggctgcactgaacacgatcctggggagatggggcctgcgggcgtcgccggcgtggaacatcagcggcgagccctgcagcggcgtcgccatcgacgagaccggcgtcgacaacaaccccaacatcaacccggccatcaagtgcgactgctccttcaacgccggcaccgtctgccacatcatcagactgagagtgttctcgttgaacgttgttggtcaaatacctgaggagctgcagaatctctcttatctgaataacttggatcttcggcgaaattacttgacgggtcccctgccatcctttattggaaacttttctgccatgcagtacttggcggtgtccctcaatccgttatctggacctcttccgaaggagatcgggaatcttagaaatcttctatcattgggcattagttcaaacaattttactggtgaactccctgcagaactgggcaatttggaaaaactcgagcaaatgtatattattagttctggcttcagtggtcccttcccttcaacattctcaaagcttaagaatttgaagattctgtgggcatcagataatgatttaacaggaaaaatacctgattattttgggagctttccaaatttacaagatttaaggttccaaggaaattcttttcaaggtccaattccagcaagtctatcaaatctaaccagattaacaagtttgcggatcggtgatattctaaatgggagctcctcgctgtcgtttatctctaatctgacatctttgaatgtcttaatactgaggaactgcaagatatctgataatcttggaacagttaacttttctaagcttgcagggttaaccttactggacttgagctttaacaatatcacaggtcatgttcctcaatccatactgaatctggacaagcttagcttcttgtttcttgggaacaacagcctttctggaagcttgccatatgacaaaagcccttcactgaacaatttagatttttcatataaccatctctctggaagctttcctccatgggttactgggaacaatttgcaactgaatttggtggctaatgacttcattcttgatagcaccaacaatagcattttaccttcagggctaaactgtctccagcaagatactccttgtttccgtggttctccagaatattattcctttgcggtcgactgtggcagtaataaatctacaaggggatcagataatactttgtatgaaactgatgctcaaaacattggagccgcatcttattatgttagtgacaatgcgagatggggtgtaagcagtgtaggtaaattcaatgaggcttccaatggaagttatgcaatatatagcccccagcagtttcagagtgcacttaactcagaattattccaaactgcaagaatgtcaccatcatcacttagatactatggtattggacttgagaatgggaattacactgtctcacttgagttcgcagagtttgtttatccaaactcactaacttcaaatagcatcgggcggagagtttttgacatatatgttcagggtgagctgaaggaaaagaacttcaatataaggaagatggctggtggaaagtctcttattgctgtcaataagagatatactgcaactgtgtccaaaaacttccttgagatccatctgttctgggctgggaagggtacttgttgcattcctactcaaggacattatggacctacgatctcagcattaagcgtgaccccaaattttattcctactgtgcaaaatggtgttccaaaaaagaaaagtaaagcagggacaatttctggagtagtgatcggcgcttcattctttggattagcagtcctagttggattatttatgttgctaaagaagagaaggagaacgtcacaacggaaagaagaactctacaacatggttggaaggcgtaatgtcttcagcaatgcggagcttaagttagctacggagaattttggttctcaaaacattcttggagaaggaggatatggaccagtctataagggtatattaactgatggaagggtggtagctgtgaaacaactttctcaatcatcccagcaggggaaaagccagtttgtgacagaggttgcaacaatctcttctgtgcaacatcggaaccttgtgaaattatatggctgctgcattgacagtaatacaccattgttggtttatgagtacctcgaaaatggaagtctggatcaagcactcttcggggatggtaggttcaaccttggctggtcaacacgttttgaaatcattttaggcattgcaagagggctaagttatcttcatgaggaggccaatgtgcgcatcgtgcatcgggacatcaaggctagtaacatcctactcgaccctgatttaacacccaagatatctgattttgggcttgccaagctctatgatgagaagaagactcatgttaacacaaaagttgccggcacgtttggctacctggcacctgagtatgcaatgagaggccatttaactgaaaaggttgatgttttctcatttggtgtggtcgctctagagactgtcgctggtcgatcaaacaccgactactcccttgtggaagacaagaaatatctctttgaatgggcttgggggctctatgaacgagagcaagcgctcggaatcgtggacccaaggctcgaggaaatcaatgaagaggaggtcttgagagtcattcgtatgtcgttcctttgcacccaaggctcaccacaccaaagaccacctatgtcaagggtggtggcaatgctcaccggagacattccggtgagtgatgtggtggcgaagccgaactacatcattgagttgcagctcaggggaaggaatagcagccatgtcaccaccggctactccgggtctactgccgatgagctcagtgggcagagggagacatcccctctcacaccttccctagagattaacagagaaattatcgatgatggaagatgaatgcgaagttgcaaagtgatggtagtgatcttcgtttcaagagctaattttggacattattcgtgttcaaataaattgcatttttatgtgagttagagctaataaaattgaatgtgacatgtgctactattgtgc

SEQ ID NO: 25091 - DNA, 2426 bp, Oryza sativa
  ref <308>: DATABASE ACCESSION NUMBER: AK100533
  ref <309>: DATABASE ENTRY DATE: 2002-08-28
gaatttcccatcgccccgtcgccgactcgccgtctccttctccggctacggcggtcgccgccggcggtaccactcgtcaagttcatcctctccctctccctctctctcctctcgctctccgatcctctccaattctggattgctgctttcccccgtcgctgcccccgccagtcccgaatccacagatgccaggatgatgcccgcgggatcggcatcccttctcctcgagtgctacggcggtgaccctcctctttcctccatggaggggaccagcagcggcgaggaggtcgaggacgggacgggtccctcgccggaggcggaggaggacgacgacccggcgccgtacgtcgggcagaggttcccgacgcacgacgcggcgcacgagctctacagcgggttcgcgaggcggcgcgggttctcgatccgccgccaccggacggaggggaaggacggggtggggaggggcctgacgaggaggtacttcgtgtgccaccgcgctgggaacccgccggcgaagcccttcgccgccggcgccggcgacaggccgcagaggaaccggcggtcctcccgctgcgggtgcaaggcgtacatgcgcatcggcaggagcgccatcgccgccgcggccgcgggggaggcggagggggagtggcgggtcacgggcttctccaaccaccacaaccacgagctcctgggtcaggaccaggtccgcctcctcccggcgtaccgcgtcgtctccggggacgacagggaccggatcctgatgctcgccaggtccgggatctccgtgcagcagatgatgaggatcatggagctggagaggcgcgtcgagccgggcaatctgcccttcacagagaaggatgtgaggaacctcatccagtcgtgcaggaagtctgatcaggaggagagcgtcgatctgatcaaaatgtgcagaagatttcaggagaaggaccccgatttcaagtatgaattcaccaaaggcgcgagcaaccgcgtcgagaacgttgcctggtcgtttgcatcgtcggttcagtcgtatgagatgtttggtgatgctgttgtattcaacacgacacatcggttgcctgctctggacatgctgcttggtatttgggttggattgaacaatcatgggatgccttgcttctttggttgcgcttttctaagggaggaaagtctgcaatcctatgcatgggcattaaaggtatttctcaacttcatgaacagaaaggctccgctgacaatattgacggatgaaaatatgtacctcaaggaagcaattgaaaaggagcttccaggcacaaagcaagccctctgcatatggcttatcgcagccaggttcccatcttggtttgatgcagttcttggcgaacggtacaatagctggaaagatgagttcgataggttgtataacatggaaagcacaatggagtttgatcttgggtggagtgacatgatgaacagctatggactacatgggaatgggcacattgctagtctgtttgcatcacgaactctctgggcattaccatatttgagagggcagtttttcgcaggactgcttgcttctccagaaacttcaaagtcaattagtgtcttcattcagcgattctcgagtgctcagactcgcctagcccatttcattgagcaggtcgcagtcgttgccgagtataaagaccaagctgggaggcaacaaatgatgcaacacaatctgcaaagcataaccctcaagactgcaactccaatggaaaggcatgcggctgcagttctcactccttatgccatctctaagctacaagatgagcttgttgtggcttgtcaatatgcatcattccacttggaagggaatgtctttctggtccgtcatcataccaagacagaagacggtgggtgcaatgtgacatggagccaaagagaggagctaatttcttgcagcagcaatatgtttgagtctgcagggatcctctgccggcatggcctccgtgtgctctcgaccctcaactactttcagatcccggaccattatctccctcctcgatggcgtagaacctggccatcaccttccaaggccttgaatggtgcttatttccacgagtcgcctgagattgggagagtgaaggcattgcagtccatggtgtcagctctggtgagcgaagcttccaaatctaccgagcggatggatatcgcgacgcgggaggtctctgccctgttgtcgcggatgaggcagcaacctgttgtcatgcacgtttcaggtgatggtgttcacaagtaggggtagctaaaccgtgcactcctccatgagtgagtgacgactgacagctttagacctgttaggctggtgtaatgccgatgctgttttccccttcatttttaggtacattttggtagattttttagggataaccatttctttagacgcaattctgccc

SEQ ID NO: 25092 - DNA, 3665 bp, Oryza sativa
  ref <308>: DATABASE ACCESSION NUMBER: AK100534
  ref <309>: DATABASE ENTRY DATE: 2002-08-28
ggcttcgcacaagcaagcgcacgcacgcacgcgcggctttctctctcctccccctctctctccccttcacctccgcacccaacaatggcgcagccagagaaggtctcgtaatccaaagcggcccgcctcgaatcccctcgcgcagccgccgccgccgctcgatccccgcggcgtcgcgcggggtcaccggaggagagccgcctaacaagcccctcgcgagccccctgggggtattctgctccagccggaaggaatccgcggtggaaggccgccttcgaactcgcggagaggagattttacccgagggtttcgattccgagcttgggatgtacggtcagggagggaacttcaatccgcagtatcggcatgctgcgccaccgccgccgccgcagcaagctggggtaacgggtggcttccctcagcaaccactaccaccgccgccgccgcgaatggcacagtatccgcagccgccagcaatggcggcgccgccgcctggaccgtaccagcacaggatgccactggttcagaaccaggcctacccttttgcccagatgcatcagatgcaaatgctacctcagcagaggggttacgcccagatgccaatgccagggccgccatcgcagccgccgcctccacaagctatgtatcaggcccatcctcagtatcccatgccagggtctctccctccaccgccgccacggccaccaagctttgctccagagaatgcgctgccaccatctagccccccgcctccatctcccccaccaccaccaccgtcttctccacctcctgtgcccccttcaccaaccgctgcccccacaactgggcagtcatggaattcagagccagaaagaaaagaaggtgccactgccacagatgttggtcatgatgtcaaaactgagaaggtgactaatcagctaattgtctctgatgactcggatatggatatggatgctgacgaggactctccatcaagggaacatgtcagtccaatcaattcttcacttgcaactgctgaatgtactggaaatgttaacacgcgaaagcctgcgtgtgatgtttctaaccttgtcaaggacagtggtggtaaggctaaaactacaaatgtaactgatgaaggtaggagcacattccaactaattcaaggctatgcctcagatgacagtgaagatgaggatggtgcttgtgctgtcagcaaccttgtgccattgactgaaaataatgagcctgttcattcaattggtacaaatcctgatattggccatcaactccttactgaagctgctccttgcactgagagaagtttggaggatcgagagcatcaactcatgagtaagagcaatccagtgaaacatgattcagatgaacttggacatccagtcaaagaagatttaagtggcaatgattctgatagagggcaacagactagaagacatggcaggagccagtggaaacgaagccgtggccagtcacctcagggcaggaggagctgtagccctctgtcccaaagtttatcatctggaaggcaaagcaattctccacttgctaagcgggctaatctactcgagagcaaatcaccagatggagtgggtcagactttcagggcacaacctggcgtcaagcttggtataagcaaggatggattctacaacgacaaacatgattcccctgtaaaagttgccactccttttgatattcatcctgctggagggcacatttcaggagatagaatatctgagcaagatggcctgatgggaacaaagaagtttaatggttctccagatgatatagattgtaacgagaaaacgaatgatgcatctgttggttcctttggaccacatggtcatggtgcagttttaacttgtggaccttctcaatcagttgcttcttctgcaaatggttctgatcctcataagatgcaaaggtcaggccgtgcatcaatacctcaatcagacatggataaatcatctctgggtgctcatcaaagtctttcgagtcaacctccaggaatctcatttgcaacagtacatgctactgagaagaatatgatgtgtgatgtgctccaacctcattctcagaatttatgtcctcctggacagatgccatctggtttgagaccagctcatataccatcctcaaatataaccccactcccagggcaacagttactttcgactccagaatttcctcagatgcacttccagcctaatgttatggcaccagctaatgagtttctgcagagtcagatgcaaacctatcctgcaccagatctgcctcatcctaggccattggatttccatcctcatactctccagccagttgtccctcctcatcagcagcctgctgccatggttcactcctctttccaaagattcacaccaaatctaccaggaagtactgaatttggtgctatatctgatactgatctgcctaaatcatctatcaagccccactacaacccttttgcgtctacctttgaacaaacagatccgactctaaatattggctgtgatgttatcccaaatccagttgagtctgcttcaacaaaagcagcagaacacgcgaatgcactgtcaccttttggtctgtcggttcctggatctggaactcatgtgcgtgagaattctgcggaagttgtttccagtcggcaaaagcagcctcatcgtgaattcacttctagtgctccctatgatccactgctcgacagtattgaaccctcaagcagttcaatcaacaaaatggatcttggtcgagaggcaaatctgagtgctagcaatcataatgcatctaaaattgtgaacatagaagtggagagtaaaaatatgcatggcctggggcttgttgctgaatcggaagttgaagaatttggagaggtggcagcagatactgaagcaggtgttgtggataatttaagtcctgagcccttgggtgcaaaagactggagctcagatatgcccggtgatattgacaatgatgaatcggtggataaaaataagaggactaaggattccagatcaatgaagctatttaaggttgctattgcagattttgttaaagaagttcttaagccatcatggaggcagggaaacataagtagagaggctttcaaaaccattgtcaagaaaacagttgataaggtttctagttctgtccctaacaatcatattccaaaaacgccagccaagatcaagcagtatgtccagtcctctcaaaagaaagtgaccaaacttgtaatgggctatgttgacaaatatgtgaagctatagttggatcagtaaatgggactatgaactggagcaatcaggacagtgtccttttcctgttgcagaaatcgtgatgggactatggactatgaacagctcacacgaatctgagctatgctatggtattttggatcatcaatttgcagtctttcagcagtaagggattccgggtaatagttctgcagaaatggatgtatttatcagaaaatcacgagtttacattggaacaattgctgcctagtcttcatagccttgtaagatgtatctttgctccactgtttctttttttcttttcttttgagtagtttgctctactatttcaccatcattaggcaagtgatagtagaacgttctttaatactgactgcatgaacgcattgctgaaaagaattatatttcttc

SEQ ID NO: 25093 - DNA, 2401 bp, Oryza sativa
  ref <308>: DATABASE ACCESSION NUMBER: AK100535
  ref <309>: DATABASE ENTRY DATE: 2002-08-28
gatagaggaacaacgaaagatcaagagagagagagagaggcgaaatcaaggcccttttcttttcttgcgatttccaccatcgccgcccaaagcaaaagattagataagcttaatccccacaaaattataaggattgttagacaggaggagtaatcgatcagagaggggagagggaagagagatcgatcgatgaagtcgccgttgctgaggctgaagggcttcggccaccaccagcagcacagggagaggaagtcgcggcagccgcagccgcagccgacgccggccaagctcgacgagctcgccgacgccgcccaggatgtggaagaaatgaggaactgttatgatggcttcatttcagcagcagctgctacaacgaatggcgtatatgagtttgctgaggctttagaggaactgggaagttgcttacttgcaaaacctgtgctaaatgacgacgacgacgatagtggcagagtgttgatgatgctcggtaaggcccaatatgaactacagaaatctgcggatagataccgaacaaatatcatccacacaatcacaaccccatctgaatctcttcttaaggagctgcaaactttagaggaaatgaaacaacaatgcgacatgaaaagggacgcatatgaaaccatgagggcatcctatagtgacaaaggagggtcaaggcattccaaaaccgaatcattctccacagaacaactggacgcttcttttcttgaataccaagaggattcagcacttttcacatttcgcttgaaatcattaaagcaagggcaattccagagcctgttaacacaggctgctcgccatcatgctgctcagttaagttttttcaggaaaggactcaaatgtctcgaagcacttgaacctcgtgtcaaagcaatatctgagaaacatcacattgactataacttcagcggtctagaggatgatggttctgacaatgatggctacagtacttacgattcttgtagtgatgacggagaactgagtttcgactatgaaataaacgatagagaccaagattttcttacttcgagaggttcaatggattttgataaaagtgatcagactacttcaccaaagccaatcaaagaaaacaagcaggaagaggcaaaacaagcagaggccgaaatagtgttcccgcaattgaagcccgagttcgctacacattcagctccactttttgctggcaatttgcttgatgaaactgacaggcttcggcaaatgaggccatcctcaaccaaacactcgtacaggctccctaccccagttggtgctgacaaccccgtaccatcaggttcacacaggctgcatcattccgcgcaattcttcgaaacaaagccccatgccccgacgaatctgtggcactcgtctcctctgacaaaagactacaatggcgccatgcacaacgccgctaccaagccgtcgtcatcatcaagcaccgatgatctgaagaagctgaagagggagtcatggtcaggtccgatcccgatcaaggccgggtcaggcggcaagcccttctctcaggctgaccacaggccatcgcccaccatggcttaccctggtgcaatgcctgcggccaagccgcacgtccggcacgcgtcgtcgtcgtctgtgtcacccaaggtttccccaaagatgtcaccggtgccaccagcatcgtcgctgaagatcagcgagctccacctgctgccgctgcctccagccaatgtggatcctgtccggccttctggtctggtcggctactccggccctctggtgtcgaagcgcgcgccgacgccggcccgtgcctccccgaaggcgtcaagaacggcgtcgccgctgcctaggccgcctgcggccttggcaaggagctactccataccttccaacagccagaggacgcccatcatcactgtgaataagctcttggaggctaagcatagcagggagggcagtgatgcttcttccccaccactgactccattgtcattgtctgatttgtgccaccaggagaaggcagggaaggcagctgcaggcaacacaaggagaaaggaaaccttgtgatacacccgtcaaattcgaaccattgctggacaattttgtttgtaagttagtggtgtattgtaggtttttgtgttcataatattctttcgttttgccacctgccttgtaaataaaaagaaataaaggtggcaaagcaatgtaagtatgtaacacattctttaacgcttttttttttttttttttttggtttagctatctacactagttcttttggttcagaaaatctgagttagcaagggcatgaacagtggttttacaacaggttgtgctagttatctgaaataacagatatgtatcattgatgattcgattctatagattttacctagaatggtatacg

SEQ ID NO: 25094 - DNA, 2366 bp, Oryza sativa
  ref <308>: DATABASE ACCESSION NUMBER: AK100536
  ref <309>: DATABASE ENTRY DATE: 2002-08-28
gactagagctttgagaggctttgacccgtcctctcctcctccattctcttctccacacacccttgtccctttgcactctgcagtttgcagcctgaaccctgaagccccacacaaattgagcccccaaggccaccactagcatgcagcagctccagctttgccttttgccattgccattgccatggagtcagggagagagagagagagagagagctgggtgaatgaacagctgaacatcccctagccggtggagcaggcagcaagcatcccatctgtgaagatctcccctctccacaacctgccactgccatggcctcttcttggccctagcacagatgaggaattattgaccgccctgctgaagtactgaatttgggggtggagggattttgttcaccttgctgtccgattccgcgcttgattgtttctgataaactgcttagttcatgtcgtccaaatcaccgctgcaaagcatgcctggtcaagcggcaaagccgaagggcactggggaacagggaggtgatgctgaggtggtttccgaggagcgaacaccatctgaccagcatcaaggttctccggcatctacgctggacaaggagctttcaggcctctcttcggagtctgggatcctggatgattcgttagtcgcggaggaggaagattccggcgaactgaaggagatccaaaacttggattgtaatgggaatcaggagaagaagacgtcacagaagagtagtacgagcgatagttttgcttctgctaaagtgagtgatgggacgaatagtttgaggaagaccagtggtagtgctaagacaagtgacagggctaatttcactgagagtgggaagagcagcatgtgtcgcgcgagcacgagcagcgacataagtgatgagagctcacgcagcagcatgagcagcgccaccacaaagccgcacaaagggaatgattcaaggtgggaagcgatccagacggtcaaaaccaaggatggcattcttggtttaaaccattttagattgcttaagaagttaggttcgggagatattggcagcgtgtatctctcagaattgagtggtactaggagttactttgcaatgaaggtcatggataaggcatctttggcaagtcggaagaagcttcttcgatcgcagactgagcttgagatactgcagtcgcttgatcatccatttctaccaaccctatatactcacttcgaaacagataaattttcatgtctggtgatggaattctgccctggaggggacctccacactcttcgacaaaggcagcctggaaaacatttttcagagcaagcagcaaagttctatgtagcagaggttctcctagcgttggagtacctgcatatgcttggtatcatataccgtgatctgaagccagaaaatgtcctagttcgggaggacggccacatcatgctttccgactttgacctctctcttcgctgttcagtgagcccaactgtgatcaagtctgcaaatcctggtttagatgcactgcagaggaataatgcagcgtactgtgtccagcctgcttgcatagagccatcgtgcattcagccatcatgtgttgctccaaccacatgctttggaccacggttcttcaagtctaagtccaaatcgaagtccaagaaagagaaatcaaagcctgaagctgcaaaccaagctagcttgttccctgagctcatcgctgaaccaactgatgctcggtccatgtccttcgtcggcacccatgagtacttggccccagaaataattaaaggcgagggccatggcagtgcggtggattggtggacctttggcatattcttgtatgagctattgtttggcaagacccctttcaagggttcaggaaatcgagcgacgctcttcaatgtcgttggccagcccttgcggttcccagaatccccaatagtgagcttctcggcaagggacatgataaggggattgctggtcaaggaccctcagcaccgacttggctacaagcgtggggctactgagataaaacagcatccattctttgagggtgtcaactgggcgctcataagatgcgcgagccctccagacattcctaagcccgttgagctcgattgtcgcccgaagcaggtgccgtcaacgaatggcaaggttgcaccagcttccaaccagaagggctcagacaattatctagagtttgaatttttctaggttttttcttttgtggtttctgaaatccgaaactgtgcatttgagctgatgcgcgaaacaaagagaaacatgtagagctcctccaggcatatatatgcctggttatgaggtactcttcagctgtagatttgtaagctcatttctggaaccccgagctattttccattg

SEQ ID NO: 25095 - DNA, 2566 bp, Oryza sativa
  ref <308>: DATABASE ACCESSION NUMBER: AK100537
  ref <309>: DATABASE ENTRY DATE: 2002-08-28
ttttatggagacctggaaacataagttactatagattttatggccatattaatattgtttttccctttatttcttgatggaagttaaaatcaggaatcatgtatttagttaactattataacatgacccgactttctttatctgcagttgtaaggcactcttgactaatgctgtatctgtcattgtatacatcagctacatggcaggataatgtggtgcttaaaaagagcactaaaacgtaatatgattatgtgatattgcctgctgctcacccttaattactgcatattatacaggactgctattgttgtgtatcagttattctataggatggtgcttggaagaactttcgatgcaggatcaataataaaattcttgtcagaagtttcacttggagcgtatgtggaatattctttgaatctcaagactggataatgatgttatagtgcttttaagtactaattctttttgtatattcctttaccagtgttgctctgggccttgcttttggaattgcatcagtactgtggctgggctttatttttaatgatacaatcatagagatcgcgcttactcttgctgtcagctacattgctttcttcactgtaagataaataatacatccaaccttctccacctgttcttttcttcagaagggcatttctggttaagttacttgagctacgttgcagcaaacagaataagttgtggttcatcctataattacaattcatgatggcctttttttttgttttgcaattttgctagagatgtcattttactgctaagcagtggtagttgctacatgcacatatagcttgaatatctatgatatatttaaagatgcataatcggtcagggattcatggtttcttgaaatgtgcatatgcaattacagagcgtcaaatgatttgttcaaatattattattattgagggttactactgatggcatctctgatttatagttctaataatttgggctatgatgggtgaaactttggataggtgaatggatctgtgaagaaattatttgaacataggttgtaaaatgagcatatgctaagaaatgtaagggtacatgtctgtacattataatgtgcctataaatggatcagtcatcatttttactagcccaatcatttgtcttcttcccatatttttgcaactactgactgcatgtatatttttctgtgagcatttgcacatataacattaacatatcagtacccctgattattgttagcttgtttgatcacctgtgcaagtatccatcatggactggtttttctgataccttctgcaataggaattcgtctgtgttttggataaaattatgccaattaataataagtgtttatttccctctattttcttggagtcttctcatttactaatgtggttatatcaggcacaagatgcactggaggtctctggtgttttgaccgtcatgacactgggaatgttagtaaaacatttgttggcgacctattctgtgtatcccttaaataccatcaaatattgacacgtcatatgtccaggttctatgccgcttttgcaaaaactgcttttaagggtgacagtcagcaaagcttgcatcatttctggtatgtcaatcaatatgtgtcactttaacaaatattaaattatcaagtcatgatcaatcttaacattccatcagttctgtaaagctgtttgatgttcatgcttcctacatttacattaaattcttgtgctcttgtagagctactatgctgcattgttgattttgttggattcagtagccagtcatttcacttgcatgccattattgtttttctcagtggtggatctataaatgttttagagcctgggcaagtaaaaatagatgatgataaaataacataaaataaaattcattcaactctatataccatttacacaagcaagagtgcaagttctgaattaggagaggaaaaccagtagaagggattatcaatgaatgattgtatacttgtacattgttgatagactagacatatatacagagtagtgacatgtgctacccataattcctttatagctgttctgtttccttttgctagttgtgtattttggttggctaatctaggaggctaatgagtaactaaatacaaaatttaacgctgcatgcggtggcggagcccggcaactgctcagggttgctgggccttggctccgctgctgttttttctggttgcaccaaaacaatgttagtaagaaatctgcagcaaaatgagatgtaaatccaatttataagtggaagaccaacaagaaagcagattagaaaatccctcgagtggcatgcaacttaattcactgctctaagaccaaattacaccccattatgcagtccattactcatttggccataagatacaacccaggatatgtcctagtggctaatggatatgttgcggtcctgaacttttcttttcttttccttttgtttcctcttttttagccctgtgctgaacttctatgaaactcctgtaaaaatcgtctgcgttttcattaattaaagcgggggagatgctctccctttctcc

SEQ ID NO: 25096 - DNA, 1595 bp, Oryza sativa
  ref <308>: DATABASE ACCESSION NUMBER: AK100538
  ref <309>: DATABASE ENTRY DATE: 2002-08-28
gattcacgggaggttgccgtgtcgggcgcgcgcgggtgattgatttcgccggcggcgaggggagggagggaggcaaaagagatggaccgggcggcgctgacggtggggccggggatggacatgccgataatgcacgacggcgaccggtacgagctggtgcgggacatcggctccggcaacttcggcgtcgcgcgcctcatgcgcagccgcgccgacggccagctcgtcgccgtcaagtacatcgagcgcggcgacaagatcgacgagaacgtgcagcgggagatcatcaaccaccgctcgctgcgccaccccaacatcatccgcttcaaggaggtcatcctcacccccacccacctcgccatcgtcatggagtacgcctccggcggcgagctcttcgagcgcacctgcaacgccggcaggttcagcgaggacgaggcacggttctttttccagcaactgatttcaggagtcagctattgccattccatgcaagtatgccatcgtgacctgaagctggagaacaccctgctcgacggcagcacggcgcctcgcctcaagatatgcgactttggctattcaaagtcgtctgttcttcattcgcaaccaaaatctactgttggaactccggcatacatcgctcctgaggttctgctgaagaaggaatatgatggaaagattgctgatgtgtggtcgtgtggagtaaccctctacgtaatgctggttggtgcatatccttttgaggatccagatgagcctaagaatttcaggaagacaattcagagaatattgggtgtgcagtactctattccagattatgtccacatatctccagagtgccgagatcttattgcgaggatttttgtggccaacccagccactagaatctctatccccgagatcagaaatcatccatggttcttgaagaatctcccagctgaccttatggatgatagcaagatgagcagccagtacgaggagcccgaacagccaatgcagagcatggatgagatcatgcagatactggcagaggcgaccataccagcagctgggtctggtggaatcaaccagttcttgaatgatggccttgacctcgatgatgacatggaggaccttgattcagaccccgatcttgacgtggaaagcagtggggagatagtatacgctatgtgatgctgtgaattctagcaagcagacaggcagattgcttgtcagttgcccgcgaattggtttgttgtattacagtcacagatgacaaagatggccaagaaactgggaagtggatacatgtgtcaagagtacatcacaaaaaagttcggttgcctatgctgtttattatgcctgatgatccctgttgtctcctgttttgtcgccgttgatttgtgtattggagtgtcctagatctcgttttgagaactgtttggaaccttgtctttgctccccttaactgagggaaagcgatgtagtggtagtagtagtagtagtagcagcgtgaagactgaataagagatgcccccagtaagctcagtacacgaacttgtttccattttcaaagcaccatctgcactgcacgtcattaattttatttatgttacttc

SEQ ID NO: 25097 - DNA, 2472 bp, Oryza sativa
  ref <308>: DATABASE ACCESSION NUMBER: AK100539
  ref <309>: DATABASE ENTRY DATE: 2002-08-28
ggctggctactactactacttgcactccacgccctcatcccatcgacccacccatctctcctattctctcttcaaaaaaaaatcaggaaatttaatcgcgaggaggagagagaaaagaaaaaaaaaaggaaattcgcaggagaaatccctggaagcctctagagaccgcgcgaacaggagaccccgaggagcagagcagagcagagcagaggcggcgccagctttgggagctctcgggttttgatccagagcgtttggaattgggaaggattgatcaagaactggggatcctgagttgaatatgatatcaaatccggtgaattggtacagtttcggtcccggatagaatttgtagtgatgccagattggagggtgggcgagtttgaaggtaagctcaaggatggatttgctcggagcaataatagcgaacatgaaaatggagccgggactgtgagtatatccagcaagaagtcgaagcatcgggttgacagtgaaaaaaaaccccatgttgacatctctggagtgattgattcagattcgcagaaatgtaattcagagcaaatccattcagctaatgggatagtatcccgggatgtcaaccatgatcacatagaaaactgcaaagttgaatcaaatgattttcccttgaatactatctctgaaacaagatatccaacagacaattggaacagttctcagtttgctctgagcaatgatggttcacctgttctcaataatcagagtactccacaaactggtcatggctatggagataatgatctaacctacattgattggcctgctattgataattttgaggacgtcgacaacttattcaggaggtgtgattccacgtacggtcagcagcaacttccgaacacggatgaactgtcatggattccttcttcagatgccatgtactcttctgatgttgctatgcaaccagggtttgaatcctcgtattctgattatggtatcctggatgacctctccgcattcaattgtacggaagataaatccctgacaacagctgatccttcaagtgctgtatgtgacgagcaattcgatgactcttatctgttcaatgagcaaaaacctgaagatgtttatggcgaacaggcttaccaaagggatgcgatggaattgttgtccagcgaccagatatgcactgggcaggaaaacctagatatgattggaaatcgatattcatcggaaaatgccatggaacagcctgaagatcagaagttttctatagcttcaggttctcaactaagctcttctcagaatttattgaaccaaaagaaccacttggattcaacttcaccaagtaacataacttctgagtcctatccagaaagaaattgccagatcattccatctggggcttcctttgcagagagaaacttgaaggtgcagaagaaagtggccagttcggcatcaggacaacttatcagtgataatgtgactggacatcctggtcatcaaacattgacaagaagggcttcatatccttgtgagaatcatgaaattggaaagaggtccttaggaaaaagaggtttgggtcattctgatgttgcaatgggcacctcaatggtagttgatgggtccttcgtatcgtctatttcttctgataactcagttgaagagaacagctttcggcagcttcaggatgcagttagtcagttggatgtgaaaacaaaaatgtgcattcgagatgggttataccgcctggcaagaagtgcgcagaataggcaagtcttcccaaatacaatgaacaacaatggagatagccacaatgtaaaggacatgcaaaatgcagaaacttcgggaaagtttgttgatcctgggagcatcgagacacagacaaatccaattgatcggtccatagctctgttgcttttccatcagccatcagagcatgtcactggagctgttgatgaagcggcttcactaaagtcacataatgataaccaccaggctgctgctaaaaaccaaagagtgatgcatgcttcatctgtacattcaccaagagggcagggagaccccatggatgcaaaatcttgcagaaacaactgaagttatctcatgaagcttcaacaactgtgactgttaatattgtacttgttgctgcaaacctttctccgttttgatccgatcatgcagttagcagctgtgtagtgtgtactactactctagtcgattagtcaggtacaggcaaacttgtaacaccaatttaacaagttagattggcttttgaccattagctttgtatcttaattattgagaaggtcgtctgtgccgtggccattcgtgtctgttctcactcacattttgtgtaatctcaaacatagattttttttttctgttttcagctaactatttttattttctgaactaacaccatttcatgttgttaaaacaagccaactctgtacttctgttttaaatgattgctggggtgtgttacatgtc

SEQ ID NO: 25098 - DNA, 2826 bp, Oryza sativa
  ref <308>: DATABASE ACCESSION NUMBER: AK100540
  ref <309>: DATABASE ENTRY DATE: 2002-08-28
gtctctcgctatctctcgtcatctccatcctctctcgccatctctcctgtctcctcgaatcctaagccccggcggctgctgctccctccctagcggcggctgctgctcttcctccccggcgtggtggcggttgctcccctccccgtcctggtggcatctgctacgcccccctccccggctgccccctcccctccccgacgtggagccgaaggcggctcctgctgcctctccccggtgtgggagcgtggcggcagcggcggcggttgcttccctcccggcgtggtggcagcagctgccccccctccccgacattgtgttgacggtggctcctactctcccttcccggcatggtgacggcggctgtggcggctgcttccctcccccggcgtggtggtagcagctgcccgctgcctcctccttcccggctgcccctcatctccccgatgtggagccgaaggcggctcctgctgcctctccccggtgtgggagcgtggcggcagcggcggcggttgcttccctcccggcgtggtggcagcagctgccccccctccccgacatcgtgttgacggtggctcctactctcccttcccggcatggcgatggcggctgtggcggctgcttccctcccccggcgtggtggtagcagctgcccgctgccccctccttcccggctgcccctcatctccccgatgtggagccgatggcgcttctctcctccatcgcgacggtttgatttgggaatattttgaggattttgtgatttgggatgttgattcagtaaccaccgtgatgaggattaagtttcttgcgatcaaattcatgagctctagattgaatttggctttttcatactgtttttggtcgtctcgtttgattgatttgggatcgcttggggattatttttctatgttcgagtcggactggaaggacagacaaaccgaaaacatcacaaaaatcgcaaaaaaacgcgggaatcggacttgagcagtgggacgacgtacgaaaatatttggtagaaacatcttaaacttttataataggtagaggtagagatagagataagtaggttagatagatatatccagttggtttattcgtttggtggtcgcaaataaatcgtaggcgagacttttccgtctcctagacggactcggtggccgtacgtgtcacctgttctgtccctgcaaagaaatactatggtataactagctagacgagacctttttggtctctactagacagataccgtaacagtgtctgtcttacctggattactggaacattgcagtatttatacctacatatatatatatgtgcacacaattcattatgaataatcataagtctctctccctttggctgcatgcatgccacgaagatgcagaagatgggtgtgaagaggaggaagagcagaagcaagcacacaaacacgacgtcgtactcctcccgagctgatggaagacatggttacggagatcctggtgcggctgcctgtcaagtccctcctgcggttcaagcccgcgtgcagagcctggcaagccatcatcgacgaccccgtgttcatccgagctcacctgcgccgctccgcctccaggtgggagcagagccacagcttcatcatcaaccctcacagcatggtcagagtcccttgggatcggtggccagtcccctccaatcgctaccgcttccatcagtggcagctgcaacgcggcaccaccaccacctctcccagaaacaataatgtggcgacgttcttgcatgccaaggacttatctgacgatcagcagttctacacaaccgagttcacgcaccgcgacggcctggtgttttctaccaccaccaccagcctccacgtcttcaacccagccaccagggatgccatcacgctgcctaccagttccaggtccaatctaatgggaggtggaagattcaactaccactgctcgggtctaggcctggatccacgcaccggcatgtacaaggtagtccaggctttcttccggttccagtcaatggaaccagctgaaacaaaaatggggatggaggtgttcaccattggaggaggaggtggtggtgccggttggagggagatcacgagtgatcctccatacccagccaagagattccagatcggcgtgtctgtctgcggctacatgttctggcgcttttccgagaggcatacgaagctcgagcgcggcatcctccatcttagcctggaggaagaggagttcggcatcacgggcctgccagatgagctggacactgataacagcttcttgctggacgagctactcggccgggatctgtgtgtgtcggcgtctaacaccagctgcacgatgctgaacatatggacgctgcctgtagcggacgagagcctgtgcacgctgtggcaatggcgttactgcatcgattacccctggagtctttgctctgtgatggctcttcctcctttcagcgataaaatcatcttgttgcgaggtaataatatatgtcgctatgatctggcgacttctaagctcaagatactatgtagattggatcgcacgaggtaccagggggagggggcacggaagtcggaattgttcagtgccatgccgttcatcgaaagtctcgttcggatcacttattaatagccgatcatcgccctgttcagttggggctttagccttcagcagcaaagccagcacaaacaggattttgtgccttctcagctgtctgcagcgctgccgcagaataagcagctatttgcatgtttatctattttatatgtattttgaaccatgtgatatgtactaattaagttaaaagttttatgcttagctagtg

SEQ ID NO: 25099 - DNA, 2626 bp, Oryza sativa
  ref <308>: DATABASE ACCESSION NUMBER: AK100541
  ref <309>: DATABASE ENTRY DATE: 2002-08-28
gtcggagttcatctacatcggctgcctccgcgacgacatcccgctggccgaccaggacgccgtcgcgcaggcgctcctcgagtcgtacaactgcgtgccggcgttcctgccccccgacatcgccgagcgctactaccatggcttctgcaagcagcatctgtggccgctgttccactacatgctgccgctctcccccgacctcggcggccgcttcgaccgcgcgctgtggcagtcgtacgtgtcggcgaacaagatcttcgcggacaaggtgctcgaggtgatcaacccggacgacgacttcgtgtgggtgcacgactaccacctcatggtgctcccaaccttcctccgcaagcgcttcaaccgcatcaagctcggcttcttcctccactcgccgttcccctcgtcggagatctacaagacgctccccgtccgggaggagctcctgcgcgcgctgctcaactccgacctcatcggcttccacaccttcgactacgcgcgccacttcctctcctgctgcggccggatgctggggctctcctacgagtccaagcgtggccacatctgcttggagtactacggccggacggtgagcatcaagatcctcccggtgggggtgaacatggggcagctcaagacggtgctcgcgttgccggagacggaggcgaaggtggcagagctgatggcgacttactccgggaaggggagggtcgtcatgctgggcgtcgacgacatggacatcttcaaggggatcagcctcaagctgctcgccatggaggagctgctgcggcagcaccccgagtggcgcggcaagctggtgctcgtccaggtcgcgaacccggcgcgcggccgcggcaaggacgtcgacgaggtgaagggggagacgtacgccatggtgcggcggatcaacgaggcgtacggcgcgcccgggtacgagccggtggtgctcatcgacgagccgctccagttctacgagcgcgtggcgtactacgtcgtcgccgaggtgtgcctggtgaccgcggtccgcgacggcatgaacctgatcccctacgagtacatcgtgtccaggcagggcaacgaggcgctcgacaggatgctgcagccgagcaagccggaggagaagaagagcatgctggtggtgtccgagttcatcgggtgctcgccgtcgctgagcggcgcggtgagggtgaacccgtggaacatcgaggccgtggcggacgccatggagagcgcgctcgtgctgccggagaaggagaagcggatgcgccacgacaagcactaccgctacgtggacacccacgacgtgggctactgggcgaccagcttcctgcaggacctcgagaggacgtgcaaggatcacgcgcagcggcggtgctggggcatcggcttcgggctgcggttcagggtggtgtcgcttgacctcagcttcaggaagctcgccatggagcacattgtcatggcgtaccggagggcgaagacgcgcgccatcctgctcgactacgacggcacgctcatgccgcaggcgatcaacaagagcccgagcgccaattccgtcgaaacgctgaccagcttgtgcagggacaagagcaacaaggttttcctctgcagcgggttcgagaagggaacactccatgactggttcccctgcgagaaccttggcttggcggctgagcacggttacttcctgaggtcatcgagggatgcagagtgggagatttccattccccccgcggactgcagctggaagcagatcgcggagccggtgatgtgcctgtacagggagaccacggacggctcgatcatcgagaacagggagacggtgctcgtctggaactacgaggacgcagaccctgacttcggttcatgccaagccaaggagctcgtcgaccacctcgagagcgtgctcgccaacgagcccgtctcggtgaagagcaccggccattccgttgaggtcaagccacagggcgtgagcaagggcctggtggcgcggcggctgctggcgagcatgcaggagaggggcatgtgcaccgacttcgtgctgtgcatcggggacgaccgctccgacgaggaaatgttccagatgatcacaagctccacctgcggcgagtcgctggcggccacggcggaggtcttcgcctgcaccgtcggccgcaagccgagcaaggccaagtactacctcgacgacacggcggaggtcgtcaggctgatgcagggcttggcctccgtctccaacgagctggctcgggcggcgagccccccggaggacgacgacgaatgagcacccatagggcgcgcgaggcgtgccatggaaaggattaggcagtgcggtgcaccggagagcctcgtttagttccccccggtttgagcgtttgatgggtcgtagttgctagttaggtgtacatgatttcctatgattcttcagggtattgtaccgtacggagtagtgatttagtccttggttagagcatcatgaattggtttgtcatcagtaagagagtattattgatctagtaaagctcgggttaccgcaacaattatcatatttttctccgagcaacacgtgatctagtgttgaactatatctcgacaaatctgctgcttaatcaatgcatggtccttcatctggagc

SEQ ID NO: 25100 - DNA, 2783 bp, Oryza sativa
  ref <308>: DATABASE ACCESSION NUMBER: AK100542
  ref <309>: DATABASE ENTRY DATE: 2002-08-28
ggttggcttcatcaccacagctcagcagcatcatcgccttcgccttcgcctccctcccttctccccgtctccatttcttttgtctctctctcgctcttcaaatccagctgctgccgtacgaacgcgcattgcctcagcagttcttggctcctcgcctcgcctccggttcgcctccggttcgcccccatctcggggttggaggtgagcttggagctccctgttcttggaggagccgctggttcagctggtggtgttcttcgatggggaggggcagccatggctgctccgttcttgggtcgtcgctgctgctgctgttctgtctgggctccgccgccgcgcagaaggcctcgacttggaagacactgagcggcaatcctccagcaatcatcgccaagggcgggttttcaggcctttttcctgattccagtgattttgcttatggctttgttgcggcggccagctctccggatacagccctgtggtgtgatgttcaattaaccaaggatggtgcaggcatctgccttccggacatacgaatggataattgcacaaacatagctaatgtttatccaaaggggaagaagacttacagtgtcaatggtgtatctacgcctgggtggttttccgtggactatgacagcactgggttgagtaaagtaaacttggtacaatccctattctcccgtgtgccttactatgatggaactttacccatacttcctgttgaatctgtatttgctaattataaggcccctgctgtttggctaaatgtgcagcatgacagtttctatagccagtttaatctgagtatgagaagctatatcctgtctgtttcaaaacaatatattgctgactacatctcatcacctgaagtgaacttccttaccagtttatcaggaagagttaacaagaagacaaagcttgtgtttcggcttcttaatgaactcgctgttgagccatctacaaaccagacatatggctcaatgttgaaaaatctaacattcatcaagacttttgcatctggaatacttgtccctaagaactatatctggcctgtaacacaagacaattatctgcagcccagcacatcggtcgttggtgatgctcataaagcaggactagaagtttatgccgctgattttgcaaatgactttttgctcagctacaactacagctatgatccattaacagaatatcttaacttcattgataatggtgccttctctgttgacggtgtattgactgatttccctattaccccttcagaggccattggttgctttagtaacctcaacaacagcaagacagacaatgcgaaacctctcatcatctcccacaatggtgctagtggtgactacccagattgcactgacctagcttatcaaaaggcagttactgatggtgcagatgtcatcgactgtcccgtacaagtaaccaaagatggcatacctatatgcatgagttccattgacctaatggatgtcactactgtttcaacgtcacaattttcttctcaaacgactgtcataaaagatatcaagaatggtgctggagtctattccttcaacctcacatgggatgatattgcgaagaacctgaagcccaagatatcaaacccaatgaccacatttgatgtgtacagaaatcctagaaacaagaatgcaggagtttcatgagactatcggacttcttggcctttgcaaaaggaaaggagttgtcaggagtcatgatcagtatagagcatgctgcattcatggcagaaaaacttggatttggtgtagtagatgcggtgatcaaagcccttgatgactccggctatagcaaacagactgcccaggaagtcatgattcagtcaaccaacagctcagtactagtgaagttcaaggagcaaaccaagtacaaccttgtttacatgcttgaggaggatgtcagagatgctgcaccttcctcccttgcagatatcaagaagtttgctaatgctgtttcagtccgcacaacgtccatttacccggagagcaaacattatttgataaaccagaccagtcatatcgtccagaccctgcagtccgctgggccttcccgtttatgtttacgtgctcatgaacgagtttgtttcgcaaccgaatgacttcttcgcagacgccacaacacagatcaacacatacgtgcagaagaaaggtgctggagtggatgggatcatcacagatttccctgcgacggtgcacagatacagactgagcccctgcacgagcaaggaaagcaacttgccgaccttcatgctgcctgtccagcccggtggcctcagcgggaccatcatcgatccagctgcacagccaccagcaatggcgccaatgcctctcttgacggactccgacgtcgcggaatcacccctaccgccggtcaagaacgtcacagctccagccccgggcgcttcacgagccatcaagatgcggaccgacgcctcgatcatcgtcgcgctgctggtgctatgcgcttctctgatcatatgatctaagtgtagtcttcacctctcctgtgtagcagaagcatggcggggctagagcttttgagaatttgtgttgagctacggatagttattctttttattttaccactcctacgtagccattcttttctcttctttttttttcttttgctgtattcttggggatggatgttcagcttgataccttgacgcctggcactattgtgggctgccgcccctagctactacattttggtacatatgtgtgatgcaatgaattgtttcagtttctggccgt

SEQ ID NO: 25101 - DNA, 3186 bp, Oryza sativa
  ref <308>: DATABASE ACCESSION NUMBER: AK100543
  ref <309>: DATABASE ENTRY DATE: 2002-08-28
ggatcggtattggcagttgcgcactagcgctatagaatttcagagaagggagaaaaatagaattgttcggagaccgaacccgcggcctcagatctgagacaagccaccgggctccctctccctcctcgcgcgcgcggggccttcgcgaacctcctggaagcttccggaggcggaggcggcggctgctccggggagatgggggtgttcgaccggctgccgccgatggaccgcctgcggtccgagaagatgtgcttcgtgcagctcatcatccccgccgagagcgcgcgcctcgccgtcacctacctcggcgagctcgggctcctccagttcaaggacttgaatgaggataagagtccttttcagcgtatatttgtcaatcaggtaaagcgatgctctgaaatgtcacgcaaactaagatttttcaatgatcagatcaacaaggcaggtgtaaagtcctctgttcgacctgcaatgcaaccagatatagatttggaggagctagaggcaaaattgcgcgagcatgagaatgatctgcttgagatgaatacaaatagtgagaaactactacaaacatacaatgagcttcttgaattcaagatggtcttgtcaaaggcaggtggtattcttgcttcttctcacaatcatgctgctccagctgagcgggagctagatgaacacatatatgacaaggaaatggatgatggaaatgcctatttacttgaacagggtgtgcatctaggggcttcggagaattctggagtgaagtttgttagtgggattattttaaagtccaaggcaatggcttttgagaggatgctattccgagctacaagggggaatatgtttttcaatcaggcgcctgcaggggaacctgttactgatcccatttctggtgaagaggtagagaaaactgttttcgtagttttcttttctggggatcaggctaaagcaaaaatattaaagatttgcggttcatttggagcaagttgctaccctgttcccgaggagatggttaagcagagacagatttttcgcgaggtatctggacgccttgctgatctggaagccactttggatgctggaatccagcacagaaacaaagcactagagtcagtaggttcacaattatggaggtggacaatcatggtgaaaaaagagaaagctgtatatgatacattgaacatgctgaattttgatgtcacgaagaaatgccttgttggggaaggatggtgtcctatatttgctaaatcacagatcaaggatgttttgcagcgtgcaacgcttcacagtaattcacaagttggaataatatttcatgagatggacactattgattcaccgcctacatatttccaaaccgataagttcactaacgctttccaggagatagttgacgcatatggtattgctcgatatgaggaagctaatccagctgtctattctgtcatcacattcccatttctttttgctgtgatgtttggagattggggtcatggtatatgtctattgttaggagcatgtgttcttatacttcgtgagaagaaactttcctctcagaagcttggtagctttatggagatggcatttggtgggcgttatgttatccttctgatggcattgttctcaatatactgtgggcttatatacaatgagtttttctcagttccatttcatatattcgggaaatcagcgtatgaatgtcgagagaaaacctgcagtgatgcacatactgctgggctcattaaagtccgtgatccctatccttttggagtggacccaagttggcgtggaagtcgatctgagctaccctttctaaactccttgaagatgaagatgtctatactaatgggtgtaacccagatgaacttggggattgtattgagttattttgatgcaaagtttcatggaaatgctcttgacataaggtatcaattcataccacagatgatctttctgaacagcctctttggctacttagcactcctaattctcatcaagtggtgcacgggctctcaagctgacctatatcatgtgatgatatatatgttccttgatccttctggcaatcttggagaaaatcaactattttggggccagaaggaacttcagatacttttgttgcttatggctattgtagctgttccgtggatgctcttcccaaagccttttatcttgaagaaacttcacaaggagaggtttcaaggtcacacctatcgctttcttgggacctcagaaatggatccagattctgaaccagactcagcccggtcacgtcatgatgacttcaactttagtgaagtttttgtgcatcaaatgatacattccattgaatttgtacttggcgctgtctccaatactgcatcgtatcttcggctttgggcattaagtttggcgcattctgagctatcaacagtcttctatgagaaactgctggtacttgcttgggggtatgacaatcttgttgtgaagttagtggggcttgtaattttttcttttgctactgcctttatattgctggggatggaatcattgagcgccttccttcatgcacttcgtctacactgggttgagtttatgaacaagttctaccatggggatggctataaattcagacccttttcattcgctctgctagctgatgacgaagactgatgcatacaaaattcagcagataaagagattaagcttgtttcttgccatttttggagcacgtgagtggaattctttcgaccaagatgggtttccccaatacacagcattttgtcagaccgccgggcttcttccgaacgcatgtgtgcagtcctggttgagattgccagcgtggtgggaggagattttgtaagttcacggcaatactgtagagggcaggtttctcgtacagttcctccagtggagaagcagattatagatgctaacaacaaagatagaaatgtagatttgctatgtctacttttagctcttatactttgtccaagtgactgtcccagtatcccttaccacttgaaaatggaagttgcagtcgttttttttaatcattacgtgattaggttgtaacgaagggtgacaattattgaactacaatgtttgtcaattcaaataagaaaagctaaagcatatatggtttcccaagatgttacaaatattgatgaacaatatttatcaatcaatatataatttcgttatctc

SEQ ID NO: 25102 - DNA, 3578 bp, Oryza sativa
  ref <308>: DATABASE ACCESSION NUMBER: AK100544
  ref <309>: DATABASE ENTRY DATE: 2002-08-28
gtatcttttcttttcattgccgctgtttgttaatttgtttgatatgataggagtagtaataggagtaggaagaggaagaagagctctctcctctcctctcctcgtctttaatggattctactggtactacttcttctactactaatcttgttcgtctcgtcttctcctaccacctaccaaatcaatcccatctgctgtctactactaaccggatccatccatggggaccatgccgatcgatcaactatttcctctcccgcctctcgcattggctacaaactgcaaagcaaagtagtagcaaacatgatctcctcctgcccacttcttcttcttcttcgtggcatttccatggattcataataatagcccccaatcacgggacatccatggattctttaactttggctttgttcctgattttcgccgctacccacctctggctttgatttggttgggccttttaccacacatccattctctatttctctctctgggtaagaaaagccggtgcctttctgaggagagaatgcgagctgagctgagctttcttgcggctgcctgctttccctttcgtgtggatttgatctccccggccggacgcatcgccacccatgtcgtcccgttccgtgttgagagatgagaggggttcaagataggaagcagaagaagaagcaggacctgcaggttctcgggcccttccctggatgcttgggtaggatgataaacatgtttgacctcagcaatggcgtggtcgcgaccaagatgctcacagagaaagcgcatagagatgtttctccagcaggtaaagaccgtggtaatgctttcaagatggcaattggtccattctcatcacagatagaagataaaaagagagatagtcagcctagaaagcagtccccaactaaaagattgagctcaccaactaaaagatctggtgaggctcctgttaaattgctcatggagcaggacatgtggaaagaagggatgtctggcgaggagccactgaatgttgttgccagattgatgggtctaaatgatgctgccggccaccaatctgatctgaaatcgggaaaaagatcagacaaggaatatcgatctggtggttttgatgagaacagtcggaatctcagaccaaagaaggacagcaaaggccacccaaaccaaaaggcaggaacacacagtgaaccatgcagtggtttcagtgatcaaactttaagaatgaatagcagcaggaataaacaccaagggaaggagccttcttgtgagaagagaatgacccttgtgcgtgaaaaatttgctgaagcaaaacgtctggctacagatgagaagcttctccacacaaaggagttccaagaagcattgcagtttttaagctcaaataaagatctgttcttgaaattccttgatgagccaaatccactgttatcacacaacaattatgagttccaacctgataccccaccttcggagacaaagcaaataaccatactgaagccatcagactcaatcaagagaaatggcaacactcttgtagggaggcagctctattcagacggagatgaaagtgaagggaacaggtgcaggcgtcatcagagtttaagtgtttccccaacaaattcaacattgtctgaaccaacaagaattgtagtactaaagccaggacttgtaaagtcccaggaacccaagattctgaggtccccttcatcatcatcaactgcagctgatagtgaagatgatagtatgtcggcagttgatgagacagtgccaagctcaagaagactggccgaagagatcacttggcagatgaggatgcgtttgaaagacaagcaggatgaagaaaacctactctcttatgagttccatgatatttatattggagatgactccttcagcaagtcagaagttgagaatgcaaaagaagtgtctggtgaaataagtgaggatttggagttcggtactcctacttctggccgttcctgggatttcctgagcaggagtggcagcccttactctgcatcatgctctagtcagacatcccatcggcgtgaaccatcagtggtcagagaagccaaaaaaaggatttttgagagattgtcaattgtatcatccaccgtcggtggtgaggaagaaagggaagcacgcagaagtatgggcacactaggtgagatgcttaccattccagaagtcaagaaagaccaagaagtgtttgggggagtcacattggagaacccatcacctgagatggattccgaagaaccgttcttgtgtttgccacggtctcgatctgttccgatttctttgtcttttggaggcactgagctaaatggagtagcgaccggttgtcaggaagccgagaaggaaaagaacaggaagtcattatcatttagggaaaaggtttccagtctgttctctaaaaataggaaagtggctcgggggaagctagatccatctggaattccatcaactgatgatagactcaagcatggaaattctgctactgttaatgatttcagcgaaaacgctgatcattctgcactggacaatccgcttaactgtactatacagaatgtcgatgatatttctatgccaaggctcatggctagttcttggcacatgaatgatatggaaaacatgcctgccaaggatatttcttccatcccggttattggtgccccaggaatctttggtgagtcacaggaccaaccaagtcctgtgtctgtactagatggaccatttctctccgataactgcaggagcttgctgtgctcatctgaaagtttcatcaccgcatccccacaagctttgtcgagatctccacttatcggatcattttcacgctcactttcatgggaagatcccccactggaagtcatgtcgccaaattccttgagactatcaaggcttttctctaaggctgacgaagatcaagactcattgacatttatccagaagttagtctgctctgctggcatagatagagaaggttgcatgttatccggtcctttggaactgtatttgcttgagaagttctcagattaccaagaagagggaaccaaattacgggaaaggcggtcgaaagagaagtttctattcgatgctgtcaatgaggcactcacagagctcacttggactgcagaactgatggcgtatccattgggaaggtcatcttctttggaacgcaaagattgtgagaatgctttcagtaactcggcagctgatgaaatttggcgagtcataaggaactggtcgattcttgacaagtatccacccggagaaactattgaaagaaacctcctggtggaaatgatactgaagagagaggtgttggaggcggccagcagcgacacgacacgattggagacattcgagctcaccagtatggtctgtacaatggtcttggaggacctgattgcagatgcagttgtagatctgagtgcctgactaacaactagcgaggtacctccacttttctaaccactaattttgcttatgcctcctaacattgctgtttcacgcgatacttgctgctgtaacactgcttcattcattcacatcaccacagaaatgcatgtgatgcc

SEQ ID NO: 25103 - DNA, 2070 bp, Oryza sativa
  ref <308>: DATABASE ACCESSION NUMBER: AK100545
  ref <309>: DATABASE ENTRY DATE: 2002-08-28
gacgctccggtttgcctcccgcgcgagccctcgtcgacgccgccggtatattgctgaaggaagaagagcaccaacctatttatcatgtcaggaggatcttcaccaaggtcaagacgaagcagctttaattctttatcaagagatctcgaactcccttcagagcaaggttgtctctctgttattgtcctcggggcttctggagacctagccaagaagaaaactttcccggcactcttccatctttttgcacagggatttatacaatcaggtgaagtgcatatatttgggtatgcgagatcaaacctttctgatgatgggttaagggaacgcattcgtggatacctcaaaggagcctcagaagaacatctctcagactttttgcaacatataaaatatgtcagtggttcctatgacagcggagaaggatttgagaaattgaacaaggaaatttcagagtatgagaagtcaaacaaatcagaaagccctcgcaggctcttctatttggcattgcctccatctgtctacccttcagtctgcaaaatgatcagaacatattgcatgaatccatctggatggactagagtcattgttgagaagccatttggaaaggacttggactctgcagaagaattaagtgcccaacttggggagctatttgacgaaaaccaactctacagaattgatcactacttgggaaaagagttggtccaaaacctgcttgtgcttcgttttgccaaccgcttgttcttgcctctttggaaccgtgacaatattgataatatacagattgtattcagggaggactttgggactgacgggcgtggtggatattttgatcaatatggaatcattcgtgacatcatccagaaccatttgttacaggaaagtattctcaatatgtgtcaacattccatatgatatgatttgcatcattgtagtaacccccaccctgtcctaacaaagaaaacttttagtactttagtgactaggaaagaaaagcctcttcttacattaatttgtttaaaatttatattcacagatagtttcatgctgaattatatatggtcaagtagtacatgataaattccttgatgagaacaatgtctttagcctttaggagttaactgttccaacaacaatttaatgaactgttgcttcttctgcaggttttctgtttggttgcaatggaaaagcctgtctctcttaagcctgagcacattagagatgagaaagtcaaggttctgcagtccgtgaaccctataaagcatgatgaggttgtccttggacaatacgaggggtacaaggatgaccctacagtgccagatgactcaaacaccccaacttttgcatctgtcgtgcttcgggtacacaatgaaagatgggagggtgttcctttcattcttaaagctggtaaagcactaagctcaaggaaagcagaagtccgtgtgcagttcaaagatgttcctggtgacatctttaaatgtaaaaggcaaggaagaaatgagtttgtcatacgccttcagccatcagaagccatgtacatgaaacttactgtcaaaaaacctggattggagatggccaccgagcagagtgaacttgatctgtcatacgggatgcggtaccaaaacgtcaaaattccagaggcatacgagcgtctcatattggatacgatacgaggagaccaacagcacttcgttcgccgagatgagctgaaggctgcttggcagatcttcactcccctgctgcacgacatcgacgaaggcaaggtgaagtctattccataccagcctggcagccgaggccccaaggaagccgatgaactgagcgagagggttgggtatatgcagacccacggttacatatggataccacccacccttgcatagacagacagacagacagacagtagtattgtttagctaggaagagtgcctctaaactgttattattgcggatatattcgtttcatattttcacgataacgcctgactagtgactacctggcgttgtaataatgtgttgcttcgtaagtataactgctattgtgaaataaaagtgcatgtttcgacc

SEQ ID NO: 25104 - DNA, 3389 bp, Oryza sativa
  ref <308>: DATABASE ACCESSION NUMBER: AK100546
  ref <309>: DATABASE ENTRY DATE: 2002-08-28
gatgttgcttccattgccaaactgttcccttttacccataggctgattgatcttggctgtgtgattttttgcttgggtttttgagctgattcagcggcgcttgcagcctcttgatcgtggtcttggctcgcccatttcttgcgattctttggtgggtcgtcagctgaatcttgcaggagtttttgctgacatgttcttgggtttactgctttcggtaaatctgaaccaagaggggggtttctgctgcagtttagtgggtttactatgagcggattcggggtttcgaggaaaaccggcaaaaaacctcaaatcctcgacctttagttttgctgccacgttgctccgccccattgcagagttctttttgcccccaaatttttttttacttggtgcagtaagaatcgcgcctcagtgattttctcgactcgtagtccgttgatactgtgtcttgcttatcacttgttctgcttaatcttttttgcttcctgaggaatgtcttggtgcctgtcggtggatggcgaaccaaaaatgaagggttttttttttttgaactgagaaaaatctttgggtttttggttggattctttcatggagtcgcgaccttccgtattcttctctttgatctccccgcttgcggattcataatattcggaacttcatgttggctctgcttaatctgtagccaaatcttcatatctccagggatctttcgctctgtcctatcggatttaggaattaggatctaactggtgctaatactaaaggttcctgaaattgagtcatggctgccaagctagctcgcctccacagtctccgcgaacgcctcggtgccaccttctcgtctcatcccaatgagttgattgcactcttctctaggtatgttaaccagggaaagggaatgctccagcgtcaccagctgcttgcggagttcgatgccttgatcgaagctgacaaagagaaatatgctccctttgaagacattctccgggctgctcaggaagccattgtgctgccgccctgggttgcactggccatcaggccaaggcctggtgtctgggactacattcgggtgaatgtaagtgagttggcagtggaagagctgagtgtttctgagtacttggcattcaaggaacagcttgttgatggacacaccaacagcaactttgttcttgagcttgattttgagcccttcaatgcctccttcccgcgcccgtccatgtccaagtccatcggaaatggggtgcagttccttaaccgtcacctgtcgtccaagttgttccaggacaaggagagcctctaccccttgctgaacttcctgaaagcccataaccacaagggcacgacaatgatgctgaatgacagaattcagagccttcgtgggctccaatcatcccttagaaaggcagaagaatatctgatgggcattcctcaagacacgccctactcggagttcaaccacaggttccaagagctcggtttggagaagggttggggtgactgtgcaaagcgtgtgcttgacaccatccacttgcttcttgaccttcttgaggcccctgatccggccaacttggagaagttccttggaactattccaatgatgttcaatgttgttatcctgtctccgcatggatactttgcccaatccaatgtgttgggataccctgatactggtggtcaggttgtgtacattttggaccaagtccgcgctttggagaatgagatgcttttgaggatcaagcagcaaggccttgatatcacacctaagatcctcattgtaaccaggctgttgcctgatgctgttggtactacatgcggccagcgtgtggagaaggttattggaactgagcacactgacattcttcgtgttccattcaggagtgagaatggtatcctccgcaagtggatctcccgttttgatgtctggccattcctggaaacatacactgaggatgttgcaaacgaaattatgagggaaatgcaagccaaacctgatctcatcattggcaattacagtgatggaaaccttgttgccactctgctggctcacaaattaggagttacccagtgtaccattgctcatgccttggagaaaaccaaataccccaactcagacatatacttggacaagtttgacagccagtaccacttctcatgccaattcactgctgatcttatcgccatgaatcacactgatttcatcatcaccagtacattccaagaaattgctggaagcaaggacactgtggggcagtatgaatcacacattgcattcacccttcctgggctttaccgagttgtgcatggcatagatgtttttgatcccaagttcaacattgtctctcctggagctgacatgagtgtctacttcccgtacaccgaggctgacaagaggctcactgctttccaccctgaaattgaggagcttctctacagtgaagtcgagaacgatgaacacaagtttgtattgaaggacaagaacaagccaatcatcttctccatggctcgtcttgaccgagtgaagaacatgacaggtctggttgagatgtatggtaagaatgcacatctcagggatttggcaaaccttgtgattgtttgtggtgaccacggcaatcagtccaaggacagggaggagcaggctgagttcaagaagatgtacggtctcattgaccagtacaagttgaaggggcatatccgctggatctcagctcagatgaaccgtgttcgtaacggggagttgtaccgatacatttgtgacaccaagggagtctttgtccagcctgcattctatgaagcgtttggtctgactgtcatcgaagccatgacatgtggtttgccaacaatcgcaacatgccatggtggccctgctgagattattgttgatggggtgtctggtctgcacattgatccttaccacagtgacaaggctgctgatatcttggtcaacttctttgagaagtgcaagcaggattcaacctactgggacaatatttcacagggaggtctgcagaggatttacgagaagtacacctggaagctgtactctgagaggctgatgaccttgactggtgtatacggattctggaagtacgtaagcaaccttgagaggcgcgagactcgccgttacattgagatgttctatgctctgaaataccgcagcctggccagcgccgtcccattggctgtcgatggagagagcacatccaagtaatggaggggaaaatatgcatcttcagcaggagaagccgtcagctgcattcgaatttgataattttctgtagttgtcatttggcatccatgtttgccatggatgtgtactatgtctaaggtttcagtacttttgcgagattttgggcagtgcttgcctcaaataaacgccggttcctggtgtt

SEQ ID NO: 25105 - DNA, 1774 bp, Oryza sativa
  ref <308>: DATABASE ACCESSION NUMBER: AK100547
  ref <309>: DATABASE ENTRY DATE: 2002-08-28
gttccccttcgtctcaccctctccctccgccgtcgccatcgtgccaccgccgcctcctccacctcctccgccaccgccgtcgcatcgccgtctcggaggtcggagctcgtccgcctccgcctcgcgccgtcgccgagcgcagccgtctccgccgagcaacggtgaaggcgggcgcagccttcatcagcgacgaggtcgtagctccgacgaccacgccacaggcggcgcaaagagctgacggcccagatcctggcatcgggagccacgccgctgcgcccgccgatggcgacggcgaggaggaggaggaggccccgtcgccgcgtccgtcctccgccggctgctacaccttcctccgctccgcgtctcgccgcggcgggcactggcgcctcgactcctccgcctccgcgtccgcggcggcgcatgtggtcagggtggaggtggggacgacgaagggagagaggaacttgttcccccgtcgacctggccgtgctcgaggccgggccggtgcggcgcctcctcgcggcggccgggcggcggacccgcggtggcgttcgccgtggacgcgttgctgttcgagcacctgtggtggctgcagccgacgccgacttcgtccctcccctcaccatcgtgggtcatcgattcccctaacagccgacccctcgcgccgcccgactccgtcgacgtcatccctccccttgccatcgtcggccgacgcgccgccaccgcgccgccgccgccctcccacgcagcagatccatgccgcaagacgtccatcggccacaaccgtcgctgccctcccctgcagcagatccacgccaccggccgccgccctcgatcacaacgtgatttggaggtggagaagcttggtgtgttacgagttcattctcaaatccgctaccctcgatgacagcccaggctgcggcttcttcgccaacaccagggtcaaccttgccaacgatatgcggacgccatcaacttcatcttcttcaccaagatggacattggtgggttgttgtgctgccttcaattatgcagggttgggttggactctatgagggtttcgagggcgtgtgcatttgttgaccatggctgcgggtggtcctcacaccaacagcggccggtgactccatgaagtatcttgtctggatggacgaatgtggcagtggcagtgcggcttgccttgatttggtttgttgtgctccacgattatcagttcagaatgtcagataagtgaaggttggttggttagctgggatgtcggtagcggtcgttgaagtggctgcggcgacgattgcttcttccttggatgggagccaccgttcgccgaccttgctgccgccgacgcccgcatatccttccatgtctgtgtgccagaggtaaacggcagtttctttctgttcttccaccgtttgtgctgatgaatgttgtgcattccctccttgtttgagctcggccatggaggagtcaccggtatctctgggctggcggtgctagaacagtacacacggtcgtgttgccggtggagctggacggccttttcagggatttgtgggatgcaagcagcagcagaaacagcgaccgagcacgtccgattccagctacgttcagcgtcatgtatgggaaggtggggatcagtgccgacacacacccccagttctacctccgattatttcttcagcgatagtcttaattaatagctcttgtgggcagtcattgacaggcatggtgtgtacttaactgcttattgaaatggtcaggtttactttccattcgt

SEQ ID NO: 25106 - DNA, 2465 bp, Oryza sativa
  ref <308>: DATABASE ACCESSION NUMBER: AK100548
  ref <309>: DATABASE ENTRY DATE: 2002-08-28
gaagctgggccgcactctcacccgcttcctctccaagccccctttcaagcccaagcccaccaacccctcgccgccgccgcccccgccgccgccggggatccagcctcctccaccggcgctgcccggcatgccgcacggacgcccgccgccgccgttcccgggagggcgggacgcgttcccgcaggcggcgtcgacggtggtcccggacccggccaggttcttcgcgccggcgctgctctcgtcgccgctccccaccaactccttcttccagaacttcgtgctcaagaacggcgaccagccggagtacatccacccgtactcggtccgctccgccgccgccgcgctcaccctgtgctacccggcgcggaaccactccccgtcgttcgtcatccagacgttcgtcgaggacctgaccgtctccgcggcgtccgacgccgcggcggccgcggcggggcagaggcaccgggtcgccgcgttcgacgacctctcagtcaccctcgacgtctcgccgtcgctcagggcgttcctcgtcaggggctgcccctttgtcaccgtcgccaccgccgacgccgcgggccccgtcgacatctccgtcgcgtccgtccacgccttcatcgaggtggcctcctgcgacgacgcgctcaccaagtggcggctccggatgaacagcggccagaccttcctcctctacgcgtccgcgccgatccgcctcgcgcagtccagcgtcacgcagctgtcggcccccggcttctccggcgtcatccgggtcgcctacctgccggacccgtccatggaggcggttcttgatcagtacagccggtgcttccccaccgccggcgaggcctcgctgaaccgccccttctgcgtcgagtacacctggcgcaagcaagggtggggagacctcctcatgctcgcccatcccctccacctccgcctcctctccgaggattgctgcgtccgggtgctcgacgatttcaggtaccggagtatcgacggcgacatggtcggcgtcgtcggcgattcttgggttctccggaccgatccggtgtcccccacatggcactcgatgcggggcatcagcgacgacggggtgggcgaggtcgccgccgcgctgcgcaaggatgtggatgcccttgcttccagctccatcacgaccacctcctcctacttctacggcaaggcgatcgccagggcggcgaggttcgccgtaatcgccgaggaggtcggctgccctgacgtcatcccggcggtgcagcgattcttgaaggccaccgtcacgccatggctggatggcagcttccagggcaatggattcctctatgaacccaaatggggtggccttgtcacattgcagggatccaaggacaccggcgccgatttcggcttcggcatttacaatgatcaccactaccatttggggtacttcttgtacgccattgctgtgcttgccaagattgatccctcctgggggaggaagtacatgccccaggcctactccatggttgcagatttcatgacattgtcgcggaaacacggcgcaagctacacaagattgaggatgtttgatctctggaagctccattcctgggccggaggtttgacagaatttgcggatgggcgcaaccaggagagcactagcgaggccgtgaatgcgtactactccgctgcgcttctcggattgagctatggggatactcaccttgtctccatcggcgcgacattgaccgcattggagatgcttgcagcacagacatggtggcatgtccgtgaaggtgacaccatctacgaagacgatttcaccggcaacaaccgtgtcgtcggcgtcctgtgggcgaacaagagggacagtggcctctggttcgctccaccggagtggaaggaatgcaggctggggatccagctgctgcctgtcctgccgatcagcgaggcgctgttcccggacatcagcttcgtcaaggagctggtggactggacaatgccggcattgtcaagggaaggggtcggagaagggtggaagggcttcgtgtacgccctggaggggatctacaataaggaatcggcattgcagaagacgagggcgctgacggggcacgacgatggcaactccctgaccaaccttctctggtggctgcacagccgcggcaccgccgatgatggcgtcgtcgggttctccaggtgctgctggtaccgccagtattgccattgatgggggctgaaatgatcgcagcagagattgcccgagatgatgcgttgttgctgaagatcaggttgtgtgggtgatatgccgaaggatacagattattatagagtgggctgttcagtttcagagtttccgtgtgattcaaacatcaggatgctacacacacatcttttacactttgttgtttcaataaaaagtagtcaaaagtcatggtatgttgatattttacatggaacgcaattggttcagaagttttgagttgccg

SEQ ID NO: 25107 - DNA, 2824 bp, Oryza sativa
  ref <308>: DATABASE ACCESSION NUMBER: AK100549
  ref <309>: DATABASE ENTRY DATE: 2002-08-28
gtcttctctctttttcctcgttctcctcttctctccctcacgctctctccagcgccgccgcttcctaggcagcgccggcgacgccgtcactctccctagcgccggctgccgcgccccactccggcgacccctctagcagatgtcccgcagccgcgaatcggttcccctagctcccatgagctcgtttctgctaaccctagcctccagcctcctcaacctaagatgcaaccggcgaccaactccggcgagataaggatttagggaagttttcccctggcccctatcgctgctaccacttcaatttcgctcttctatctccttttccctgatctctagtgttgtactagtaaggtgttcttccccttatctactactgatttatggttgtaatgcactaatgatacttgtaaactaatcctaatgatcaacttgatgactctatgctatggattgtaattagtagttctagggttctagagaaattggcttgctaagatggatgatgcctatatgctcacgatgaatgaatccagacatgaataaacccatgaattgaattactgaaatttaaatcacactaacatcattggtccttatatatgcatacatgttgaattaactgaatcttctgaagatagtgacatactagcaggaccagatctttagctaaaatcttattcaatgatgaagcaatttacatggttctacactttgataatcatggcaatatctatactaagaattattggactgaaaatccctaaaacttgaatcttgaagttaataaatgataatttgtttctctaaataatatactgctggtctatatgtccagaatttcatctctacataatttattagattagagttgttgataaattagactactggtcaactattatttataatggttttattatgagactatgctctaacatttactctcctgcacataatgatctggtaaagaaacttgcatgttctgttaagtctttacgatttagtacaactattattacttaacactatacatgcttaaatgtacatccagattcatcctatgatgtcttttctgaattttgtagtaaggaactagatacatatgcaaacccagattcataatctactaatttcacatgctatccttaattgctcaattctattctttttactaaaacctgctgctacctaatcttttatattttaatctgaaataccagtgcctcctgaacttctgctatattcataaggtcaaattcagtcaggttataattagttctaattgtttatgtaatcaaggttcctactatagggtctatcatgaatcctgatttcaagaactatgcacatatgcaaacccttaactgaaatgcatttataactcatctggaataattcttgttgctaactatgaaatgagataaccgatctgtacttgaattatccttctgagaatccactaaatttaggatgatattatcctgtccaactactcaaaaaaactttaccttattgaactaaggatgcatattcagtaatataaccccaacatctagtactagtatatgcacagatcaacatggctgccatctacttaggttcatttttcaggtttaatggatataactaggtgcatgcacacaactcctaaacatactaatatatgcatcaaccaagaatcatgccatgatgtgatttccctatcattcttatttcaggattaccttgttaatgactctggtgtggctgtgaagattgtgtggtttctccctctctggttctaccacttctcctgctgggactgtaacttcactcccttattggaactagaacaattgaatatttctcctccttgctcaggcaccagctgctcctccagaaactaagggtatttgggcatttccttcatcttcctgagctggactgctagatcaccacttgctccttcttcaggttggtctctctgatgtctcatttcagcatcttcttgctgctatgatttatacggtaaggtatgtgaaaatcttgattggtatctggatctgctacttcccttgctcctcctggagttgatcctcttgcttgatttctgctccatcttgtttgagctgctgctggtggcttctcctcttactctctctcaccgatttttgttctatggctgctactattgagatacggtgtgattgtggtgctagactattagctacttctctctgctatttctctctaatttgagctggtttttcaaccgaactgctggctactactgcttgattctgtggttggttgttcctgcgactgaggagtattttactatggctgctgcttgagattggtttccaaccgatataaccaagactggttctctagtagctgggttgatatatgggttaatttttttcctttgtgaaggtgactcacctgcttgcatgccggttggataagggcttgctgccacctcaacaaagctggtttggtgtgataatctcaagctatatttactatcagtagaaattttgtaaagcctgacatgtttagtgcttttgcacttgagtcccacaagttagtaaaatttaagattactatgaatttagggactgatatgcaattgccctagaactcaagagtttttctgaaaaataaataattattgaatctttgactgagatggttcagtttatgatatgatatctataatcaccatgtatatgcacaatatatagaatgcatactgtaaaatttctagtgtacaattatatgcatgtatgtatgcagacctgtagtggtaaactgtaaataaagaactgtgattctactgtgc

SEQ ID NO: 25108 - DNA, 1979 bp, Oryza sativa
  ref <308>: DATABASE ACCESSION NUMBER: AK100550
  ref <309>: DATABASE ENTRY DATE: 2002-08-28
gactactactactcctctttcccactcctctcgcttccttcctcctcctcccctgcttcgccgccgcgtgctcctccgccgccgccggagaagctccaagcctcctcctcctccgggccgccgggaatggcggggaagcaaggagatgggcgcgaggaggatggcgctaaggtcggcctcccggcgctggatatctcgctcgcgtttccgcaggccacgccggcatccatcttcccgccatcagcatcggactattatcagattgatgatttactcaccactgaagagcagtctatcaggaagaatgtcagggctataatggagaaagaaattgcacccattatggcaacgtactgggagaaagcagagttcccatttcatgccattcctaaactttcaagcctcggtgtagctggaggcacaataaagggatatgggtgcccaggactttcaataacagcaagtgctattactatggcagaaattgcacgggtagatgcaagctgctccacgttcattctagtacactcctcccttgcaatggtcacaatagctctttgtggatctgaggttcagaagcagaagtacttgccatcccttgctcaacttactgctgttggttgctgggcattgacagaaccaaatcatggaagcgatgcaagctctttgataactacagcaaccaaggtacctggtgggtggcacatagatggacaaaaacgctggattggtaacagtacttttgctgatgtgctcgtggtattagctaggaatgccaatacaaaacaactaaatggatttattgtgaggaagggtgctcctggcttgaaagctacaaagattgagaacaaaattggtctcagaatggttcagaacggtgatatagtttttaataaagtatttgtccctgaggaagatcgactgccaggtgtcaattcatttcaggatataagcaaggtccttgctatttcacgtgtcatggtggcatggcaaccgattggtatatcaatgggggtgtttgatgtctgccatcggtatctgaaagaaaggaaacagtttggagttcctctagtagcttttcagctgaaccaagaaaaacttgtgcgaatgcttggtaacatccaagcgatgcttcttgttggctggcgactatgcaagctttatgagtcagggaaaatgacaccagggcatgctagtttagggaagggttggacttccagaatggctcgtgaggtggtttctctcggtcgagaattgttgggtggaaatggaattttggctgattttctagttgcaaaggcattctgtgacctggagcctatatactcatacgaaggcacatacgacatcaacagcctggtgactggtagagaaataactgggatcgcaagcttcaaacctgccgcattagcaaaagctcggttataaccatcattttccgaagaggataaagctacagctcactgcaatttcttctcagattgctactacaggaagcaaataaaaatcaggtccccatgcaccgattattggccggctaatgcagcatgatgcagaccaaatagactccttggaaaattctctggtcaatcttggctggctagaaggctgtgccgtgcgagaggatatctaacgtatccgaatcacctcgttggaatcgtgtccggtggtggaggacagcatgaataaaagctccgtcctgtatgccaagtcttggcatttaactgttgtatacatttgtgaacgctgtaaaatctgaataaaggtcaagaacagtagtgtcgaattttacctctttcaaacctacactgcctgttcttgttttggtttgtttcaagcatgggtccagagaataattgtcctttctcgattgtttgccttactctgtcagtaaattttctgactttagacaggaaacttctgtatatctagcatgcgcactgctacacgtgcttaaaagattcaagacaacttttacg

SEQ ID NO: 25109 - DNA, 2893 bp, Oryza sativa
  ref <308>: DATABASE ACCESSION NUMBER: AK100551
  ref <309>: DATABASE ENTRY DATE: 2002-08-28
gaagttcatctccatgcattccagtaaagaccatttttaggacaaacacatcggtttcaaaaaaaaaaaattaggacgaacagagcaatctcttcgcatgcaacagcggccgccattttccctagattcaccttccattggtagcttggttgttcaccaatggcgcacttaggggcggtcctctgcatccgtgttgctctcgtcgtcgtcctcctcccgtcgcttctggcgaccgtcgccgtcgcgcacaacgacaccggcgagcacaagaactacctcatcatcgtgcgcaagccgtacgagtacgaccacaatgtgtacaagaccgtgtcgagctggcacgcgtcgctgctggcgtccgtgtgcgacacggccaaggaggagctcgccaccgaccccggcgccgagacgcggctcatctactcctaccgcaacgtcgtcaatggcttctgcgcccgcgtcaccagggaggaggtgtacgagatggccaagaaggactggttcgtgaaggccatcccggagaagacgtacaagctgatgaccacgtacacgccgaaaatggtcgggctcaccggcgccccggcggcctaccatggcggcttgtggaacaggagcaacatgggcgaagggatgatcatcggggtgcttgacgacggcatcgccgccgggcacccgtcgttcgacgcggccgggatggggccgccgccggccaggtggaagggccggtgcgacttcaacagctcagtgtgcaacaacaagctcatcggcgcgcggtccttcttcgagtcggcgaagtggaagtggagaggggtcgacgacccggtgctccccgtctatgagctggcgcacggcacgcacacctcgagcacggcgggcggcaacttcgtgcccggggcgaacgtgatgggcaacgggttcggcacggcggccggcatggcgccacgcgcgcacctcgcgctctaccaggtgtgctccgaggacagaggctgtgatcgggatgacatattggcggcgatggatgacgccgtggacgagggcgtcgacgtgctctccatctcgctcggcgatgacgaggccggagatttcgccggggatcccgtcgcgctcggggcgtacacagccatcatgaggggcgtctttgtcagctcgtcggccgggaacaacggcccgaacccattgacggtctccaacgaggcgccgtggctgctcaccgtggcggcgtccacgaccggccggaagttcgtggccaccgtgaagcttggcaccggggtcgagttcgacggcgaggcgctctaccagccacccaacttcccgagcacgcagtggccgctgatagcggacacccgcggtgacggcacgtgttccgacgagcacctaatgaaggagcacgtcgccgggaagctagtcgtgtgcaaccagggtggcaacttgaccggactccggaaagggagctatctacacgatgccggcgccgccgggatggttctcatcggccctgagttcatgggctcaatggtccaacccaagtcgcacatcctccccgtggcgcaaatcgtctacttgtcgggggaggagctcaaggcctacatgaaatccacgaagagtccgacggcggcgctgatctacaaaggaacagtgttcggcgaccgcaagacgccggaggtggcgcccttctcgtcccgggggccgagcaggcagaaccaggggatcctcaagcccgacatcaccggccccggggtgaacatcatcgccggcgtgcccgtgacctcgggcctcgccacgccgcccaatccactggcggcgaagttcgacatcatgtcaggcacgtccatggcggcgccgcacctcagcgggatcgccgcgctgatcaagaaagcgcacccgaagtggtcaccggcggcgatcaagtcggccatgatgacaacggccgacacgttggaccgccggcggaggccgataaccgaccagaaaggcaacaatgccaatatgttcggcctcggcgccggcttcatcaacccgacgaaggccatgaacccgggcctcgtgtacgacctgacagcgcaggactacgtccctttcctttgcgggctcgggtacagcgaccacgaggtgagctccatcatccacccggcgccatcggtgtcctgcaagcagctgccggccgtcgagcagaaggacctcaactacccgtccatcaccgtcttcctcgaccgggagccctacgtggtgagcgtcagccgcgccgtgacgaacgtcgggccccgcggcaaggcggtgtacgcggcgaaggtggatatgccggcgacggtgttggtgacggtgacgccggacacgctcaggttcaagaaggtgaaccaggtgaggaagttcacggtcaccttcaggggcgcgaatggcggcccgatgaagggcggcgtcgccgaggggcagctcaggtgggtctcgccggaccacgtggtgcgcagcccgatcgtcgtctccgcccaaaagttcttgaacggtaacacgagctcctccgatcacgcgggccattgattgttgattacgtagctttgccagtaaatggggtacttgattagacccccaaggattataaactgccccctgatgattgtcctcgaaaaaagatgaagagaaagacaaaataactctattagaagatggaccaagatgcgaagggattgcgtggccggaaaaaaaaaaaagcaacatgggattctttttccatgatggccatggcctggatatgtgcccctgaaccaaactgcttcgatattgggcttgatgggtttgttacggatttagacctttatacaattagcatagctaaaatttcgatcttattgttgtgggttggatattggatgatagcactacggcactacctttgtgg

SEQ ID NO: 25110 - DNA, 1981 bp, Oryza sativa
  ref <308>: DATABASE ACCESSION NUMBER: AK100552
  ref <309>: DATABASE ENTRY DATE: 2002-08-28
ggttgcaacccttccgagctgcaaaaggtgcattcatggggtcgtcgctggaggcggagcagcagagcttgatagtgcggacgacagagccggaggatgttgatgactacacaggcgatggatctgtaggcttcagtggtcaacctattttgaagcatgaaacgggcaattggagggcatgctcactaattcttggaactgaagtttgcgaacgcttggcctactatggcatctcaaaaagtttggtcacttacctatcgacaagattgcatgaaggaaatgtctctgcagcaaggaactttacaacttggcaaggaacttgttatctcacgccacttattggagcaaccttagcagactcatactggggaaagtacaagactattgctgttttctcaacaatttactttctggggatggcagcattgacattttcagcattggttccttctcttcaacctcctcaatgttttgggtccttttgtccacaaccaaccgtgcctcagtatctgatatactttgttggactatacatgattgctttagggtctggaggtattaagccatgtgtttcatcctttggtgctgatcaatttgatgacactgatccagttgagagaacaaagaagggtgctttcttcaattggttttattttgctataaacatcggttctttgatatctggcacagttcttatttgggtacaacaaaactgtggatatggaattggatttggaattcctactatcttcattgccttagctattggaagtttttttataggttctcagagatatagatatcagatacctggaggaagcccccttataagagtatgccaggtggttattgcagccatccacaagagaaatgttgatttgccggttgatagttctgttctttatgagcttcatggtaagacttctgcaattgaggggagtcgtaagctggaacatagtagtgaattcagtttccttgacaaagctgccgtcattttgtcgaatgaacgtggtggttctcatgatccttggagactttgcactatcacacaggttgaagagcttaaaatattaatgaggatgtttccaatctgggcaactggcattgtgttcttcactgtatgtgctcaaaattcatcaatgtttatagaacaagggatggccctcaacaatcaaattgaatcctttaaaattccgccagccactctgtcatccttggatgttatcagcattgttgtttgggtcccaatctacgaaactttcgttgtgccgatagcaagtagactgactggtaaagagagaggcttctcggagcttcaacgaatgggaattggtctgtttgtggctactactgcagtggcaactgcagcgttggttgagattaagcgtctggagattgcaaggtcagaagatctgatccatagtaaggtacctgttcccatgagcattctttggcaagcgcctcaatacttgttggttggtattggtgaggtgttcacagccattggccaagccgagttcttctacaaccagtctccagattccatgagaagcttgtgctccgctttcgctcttgttacggtgtcgcttggaagctatcttagttcattcatactgaccctggtttcatattttacaactcgagatgataatccgggttggatccctgataacttgaatgaaggccatcttgaccgctttttctggctcatagctggccttagttttctgaatcttcttcttttcgtctactatgcacagcaatacaagtgcaagaaagcagctgcaatttaatgtcagccttcatagagcaatattacttggacaaaggaatttattgtacagcaaattgtatgtatatattttatctcaaaaaatactgaataatctcttgtatatgtacattgattctcctcagtggtactggtacataatattacttggagaatgggaaaaaaaacaatcttcttcttgcttttgcc

SEQ ID NO: 25111 - DNA, 1819 bp, Oryza sativa
  ref <308>: DATABASE ACCESSION NUMBER: AK100553
  ref <309>: DATABASE ENTRY DATE: 2002-08-28
ggtgtgcgtctctccttctcctctactctctcttcacgcgggctggctggctggctgttgatgagcatggggcactacaccaacctgacggatccgaggacggagctggaggtggtcagggactggaacggcgtcgaccaggtcgtgctccgctcgccgcggggcgcctacgcgcgggtgagcctgcacggcgggcaggtcctctcctggaggaacgaccgcggcgaggagcttctcttcaccagcagcaaggtgacgtttttttttttttcaattcatttttcgattcttcagtgctctgcaaccgggttcacattactgcgattagcctagggaagtgtatttcgcaagttcaattgattgcagtagaattcaaactgtacgctcgcgggatatgttcttggattgattctgtttgagaagtgtgtactctgaacattaaactgtacttgtggaaggacagttcagacgggctctgaagacacaaaaacctgaactgtttcactgtttccatctgggaaactgaagaaatcttcagtattctcttccatggctctttcactggcttcaacacgcagtttcttgacgtgcaggcaatcttcaagccaccaaaggcgatgcgtggtggaatcccgatatgttttccacagtttggaaattctggaacattggagcaacatggatttgcaagaaacaggatatgggccctagatgaggagcatccaccattaaatcaaaatgataacaacagcaaagcttctgttgaccttatactaaagccatctgaagatgacctgaagtgctggccacatggttttgagttccgcctgagagtttctcttacaaaggatgggaacctgtcactagtatcacgcatcagaaatgttaatggcaagccattcagtttctcatttggttatcacacatatctgtctgtttctgacatcagtgaggtgaggatagaaggccttgagacacttgattatctcgataatcttagccagagagaacgttttacagaacaaggagatgccataacatttgaatcggaggtgaaaaatgtttgaataatcatatgcgctatatactttgatctactgattccgcaaatcttgttttgacattttgttgtaaaaatttacttgccacatcataaagtccaagatttacggtgttagcacctggtctatgtgcaaacatatgcaggttgaccgagtctatgttagctcaccaaatgtaatagctgttctggaccatgagaagaaacgcacatttgtcataagaaaggaaggactgcctgacgttggtaagacacaatattctctttgccacctaaccatggtaactttgcttgaaaaatttccatcatattcgctttattcctcccagttgtgtggaatccgtgggaaaagaaatcgaaaaacatcgtggacttcggcgatgaggagtacaaacagatgctgtgcgttgatgcggctgcagcggagagacaaatcactctgaaaccgggagaggagtggacagggaagcttgagctttctgaagttccatcgactaactgcagtggccatcttgatcaacccggtatcatcatttagaatatggcttgatagtttagaattttaccattttccttttttacatgagatcgatatgctcctcctctgccatcttggtaaaaattcttcttgtacgtgtacaaagattttaccatcttggtcagcggttcgttttaagcttatgccagagtcatcttgtttgttttggtttctgtgataccaatacatgtgggcgcaagatatactgaacttttctgatc

SEQ ID NO: 25112 - DNA, 2318 bp, Oryza sativa
  ref <308>: DATABASE ACCESSION NUMBER: AK100554
  ref <309>: DATABASE ENTRY DATE: 2002-08-28
ggattgaaagatgcaaaagcctaacatccttgccggatggtcctagagcttactcctccttggagagtcttgaaatcaagtactgcccagctatgaagtcacttcctggatgcctcaagcaacgtcttgatagcgttgaggagaaactcttgtcacatatgcgctccagcgatccacgggaaggtgctaaattgctggaaccaaaatcttggaaatatgtcattcgtcggaacagagatttgtgatccaacactattgatgaggccatgaagaagctttttctattaaggatagctccctagcagagctcacccattgttgacttgggatttgaatacatgggcaatgcatcttctaggttctaagatggagcattttgtatggtcaagtctatggctaaagcaacttggaaacctcatctcggtgaaattatcttcttttttcaccatattgttgcagacttagcagcagcagtatatatttttacataatgaaaattttattgttactcagtcaaaaattattccgaaggcactctcgggctctgcaccatgacagtgcacacagccaacccactcacacattcccacgacagtgcagcggtatatattctcaccaattacgcatacttcgcacgtccgtgtgagcacatctctatgattgtagctgctgtatatccaaatgggactttggagtatcttataacaagcttttagtattggtttttaggaaaaactaatcaacacggattctgaattgtgatatatgctagtaattcatctgtttaattggactagctagctgacataatacagggtccaaatattgaaattgagatttcagcaagtagaaatacagcataattaatacaggtccaacatgttaccacttctttcctcgaatacaatatatacttacctatcactagagctgataaatcacgtttcaaaccaagcaaatatcctcccggaggcagccaaaaaaaaaaaagaccagacgaagctgtcaaagaatcgaccaaggcatgagccacctgaaaacctagctagcgatatcacacgcccaaatttcttcggtcctgagagttcagagccaccgacgacgcatccaactgcaaaaaccccaattccatcagtcttcggagctgccatcaccagcaaccaaggatgcaatgcacctaactgcagaaccccagtggagaacgccggcaaactgggatgcgggtcggcgacgccgtccaggcatgaccacaacatgctcgacggaatgcccacacgtttctagcctgactgcctgcaccagctgcaaacccggataggattcagtgtaatgcatctgcacctactagcttccaattcgtcagagctaagcctgaacaagtactcatgaagaccgtaaaatactctcctcttaaagtaaagagttactacacgaattgcagtactatatttgcaacaagttaaagtatggtgctgcttcttccaactattgatctggatcgatccaccatctcagcccacatataggtgacacaccatggaagaggacggcgacaccgtggcagggcggttgatggcggtggccagtgagtgatggccgatggcagttgaggtgaaggcgctgcttcgggcctcgctgccggacgttgggcatcaccttaaccagcaaggaggtgttcacctgggcctggatcaacaaccagcagctgctccacatcggcgacattggcagaacaagaaagtcctacatttgcacatcgtgctccatgtgattagttgcagaggatagggtggagtccgctggggatggaggttgtttgctatttttcttttactcgtcgtctctatgacatgaacaagaatgtttttgtatttttttcgtgcttgctagatgatggagggctgttactgtgcaacgtcgagcccatctctataccacaccgctacacccttccatgattccatcatggactaccacttgccacccagttgccctctccattacctatcacaagacaccggccagttatagcaagatccagcaaagccaccaggatcctagtttcacaatggatttttggctgaatcatcttttttgttttctagtttgattcacctgtgagtaatttttatcacttgtgtatgattgagcctgtaattttttcattcgtacgactattttgtggtacagattaacaatactcttagtatcagtttttactcttatactgtgtattgaacacattagtaaacatattactacacgattgctacgagatcatgggctatatcgagaggaaggtggcaattgttttactc

SEQ ID NO: 25113 - DNA, 3218 bp, Oryza sativa
  ref <308>: DATABASE ACCESSION NUMBER: AK100555
  ref <309>: DATABASE ENTRY DATE: 2002-08-28
gacaggaaagactaatgctttggattttggagaaggtgaaggaggaagagacagaggaggcaggatgctgcagcgggcggcgagcaatgcgtattcatggtggtgggcgagccacatccgcaccaagcagtccaaatggcttgatagccatctccaagatatggaacacagagtgaagtgcatgctcttactccttggagaggaagctgattccttttcaaaaagggcagagatgtactacaaaaggcggccggaggtgatcactcaagtggaagaagtatacagggcgtacaggggtctagctgaccggtatgacatcatttcaggggaactgcacaaagcaaaccataccatcgcgacagctttccctgaccaagtgcagtatgcaatgctagaagaggaagatgacaatatccccaaggcatttaccccagtcgatccacgtaaaattcacaagtcgactgttgacggattgatgaagaagaagaaaggaggagagcagcctgcagggtcgatgaacaagaacacgacgtcagctccaatcgacaaggacaacgcacgggaggagatcagcagactacagaaagagatacttgtgatgcagaccgagaaagaattcatcaaaagctcgtacgagagtggcattgcaaagtactgggatcttgagaagcaaatcaatgacatgcaggaacaggtgtgccatttccaagataagtttgatgaaagtgcggtgattgaggatgatgaagcccgggcactgatgacagcaacagcccttaaatcttgtgaagacaccattgtcaaactgcaggaacagcggaagacatctgctagccaggcaatgggcgagtcagaaagagtcaaggttctacgtgagaagctcaaggctgtaatggaggggcatgggaaatccttgccggattctccagatccttgtgataaaaacgtgaggaagaatcatggctttgagatggaagaggtacagcatatcaaactgggtgaatttgagacgcagacagtgctcgagaagatcaaggaacattttgagagggacggcagcatctcggtggcagaaatcacagaacatatcgatgaacttgttaacaaggtggttgatttggagcttatggtgtcatcgcagagctcacagatagacaggctgtgtcgagagaacagcgagttggagagttgtctgcagagtctggaggaagagaatgtgagtgacccagataaagtaaatgagaagctgaagaagctagaagaggagctggtgagagtgcaggctcttgaaagctgcttccacaaagacgagagcacgatccgctcgaacttcagcgaagccataagcagactgagtggtatatcagagatgttgcagtcatctgaacacggtggtgtaggaggcacattggcagtggcggatgggaaggaggaggaggaggacaatgatgcaggaggcatagatgatgttgctgaaccccaggtccagacggaggctgcatctgatgacgttgatcctgcgggtaaatcaacagctgacgttgatcctgcgggtaaatcaacagcgacgcaggaggaggcccaggcggtggacgttggacaggagaaagcaggaggatgttcgcgggagagagggtcgttggtacggctgcgtcacatctcctccgacgacctgggaggctgtgacgatgaagctccagctgcagtggatgaccccgatggcatgcggaagcagaagaaaggacaagaaggagaaggggttgaagaagagaagaaggttatcctggtggcggagtacagggcgctccttgaggaaaacaaggatgccaagaggaggctggctgaggtggagaagacgaaccaggagtgcatgcatgagatccggtcgctgcgtgagctgctcagcagtggctcatccgaggcaggagcggcagcagcaggaggaggaggaggaggaggagacagcagcggaggtcggcgcggccatcgaaggacgccgagctattcgctgggacatcacaggaagcagagcctgtcgtccatctcgaggatgatcagaatggggtcgaccatccatgaaggcgacgagagcgagaaggtgaaagctgaggagctgcggttgccagcggtggccacatcgtcgtcgcctctggagaacaagttacgcaaggacatcgacacgctgctggaggagaacctcgagttctggatgaagttcagctcgtccctgcagcgggtgcaggagttccagcgcaagcacgacgagctgatgcagcagctgcagccggcggccaccgacggcaacagtgacaccaagcagaagcagaagcaggagcagcagctgagggcgctcaagacggagctgcaggtgtggtcggagcagaacgcgagctgcgaggggagctgcagtgcaggttcgcggccctgtgcgacgtgcaggaggagatcacggcggcactggaacaaggaggaggaggaggagagttcacgtcgtaccaggcggccaagttccagggcgaggtgctcaacatgcagcaggagaacaaccgggtttccgacgagctgcaggccggccaggaccacgtcaagggcctccaggcccagatcgagaagaagctgcagcacgggggcgtcaccctgcctgacgccgacggacctgcagccggagccggagccggagccacaaccccgccgccgctgccattgacgcgcgtcgcctccaagtccaaggtgcccctgcagtcctttctgttcccggccaaggccaagaagccgtcgctgctggcgcgcgtcacccctgtcctccagaagcagcagcccgatctcaggttccttgccaagctgcaaccgaggtagctcctctcttctctacttccaccattgcattccgcccttccttcgatttggacttctttcccaactgtaacctcgctcattccttgtaacatctcaattttggacatgcataatgggtcttgatagataacgactgcaattagttctacttctgaaatgggctatacgtacaatctgtgtatatgactcatgtccgactcaactattgttttactagctcctatagagataagctgatcctaaggatcaacttcccataactattattttcctatctccatagagataagctgattgtaaggattgatggatgagaagtagttggatcagtcttataaaagacgcataactattgttttcct

SEQ ID NO: 25114 - DNA, 2296 bp, Oryza sativa
  ref <308>: DATABASE ACCESSION NUMBER: AK100556
  ref <309>: DATABASE ENTRY DATE: 2002-08-28
gagacttggatcgatgcgatttcagcagccgtcgtcgttgattcggattcggggagtaaccgcgcaagagcagcgacgatgaggttcggtttccgtctccgatttcccttggggttccatccccttcaaatttaacgcgacccttcactccccgtcgcatcgcatcttggctgactcgtcccgaaaatcttgagcgaccgagttaccggcggcggagatggtggtggctgacaatggcaagtgggcgctggagaaggctcgggcgctgcaagatttggaggaggaattcaaccaacagattgcaaggattctcagctgctaccagctacctgaccacatcaggctggatctccatgagcagcaccgcaatgactacaaggtgcctgacgatctccggctcaagttcgtgaatgccgttttcgaggggaaatccgggatgcttgatcaagacgaggaactcagggttcaggctcggaaggaatccgagaagttttgggtggaggcggcgggggcggcgaagaaggcgcaagcactacaagacatggaagagagaaacaggcaattgttctttaagcattatcctggcgtgcaagacatgcctgaccacattagggagtactgcttcaggaaattcatggaagatgccagggatgaggtagaggtcagattcgggatacgtaatcacgaaatgcgactcaggatccgagcttgggaggaatcgcagcagtttctgatcaagacaatggccgatgggcgggcagccaagaaagtgcagaccttgcaagatgaggagaagagatatgttcagggtgttaagaaaacttttgacagcgaaaacatatctgagtacttccaacaggccttcctccagcaaggcctacttgataatatccggctgcttttcatagatgatatagaggagaaattcaatatgcctgatgacgaagaggaacctaagggttacatttcggaggattacaacaggttgaaggcgcaggccttacaagatttggagtacaaattcaaccaacagactgcaaggattctcaagcgttatgacctacccgagcacatcaggctggatctccaggagcaacactacaacaactacaaggtgcctgacaatctccggatcaagttcataaatgctgttttcaatggaaatccccggatacttgatcacaagagggagctcaaggtccaggctcgcaaagaagcagaaaagttttggatcgaggcggcggcgacagcgaagaaggcacaagcactacaagatttggaagagagatacaagcaacaatttattaagcctagttatgacagggaagacatatctgagcacatgcaggagtatttcctcagggaaagaaagataactgacaaggcctatctcgagtacaagaataatgtagaggataaattcgcgatacgtaaccacgaaatgcaattgaagtttctagcctgggagaaaacacagcagtttcggattaagatgatggctgatgagcgggcggcgaagaaggtgaaggccctgcaagatatggaggagagatatgttcaagattatatcaacaaggttgaaagactagatgtacctgactacatcaagcagggcgttatccaggaatacaaggtacctgacggtacccgactacgttacataaattatatcgaggagaaattcaggatgcttgatgaccaagaggaacgtaaggttcacatttgggagaatttcaaaaagttgaagatccctctcacaataaagtctcccatcactgtcgctatcatgttctcgattggcatcatgatcttgttctccggcttccttgtccccaagatgcccaaatcgttgaagatcatgtgttgggcgacttcaattgtcatctgctttgcggccgtgctcagctacgataatgaaagctcgaagaccactgccccaactgaaatgcatgatctggaaaatcctccaagtatttaatactgaataatgccatttaactggcatacagttccatccctgtgtaatctattgttagataggaaatagtgctatttaacagatcggttagtaataagaacttgttagtaataagaagtcatctgagaactcgttccatccctatgtggaaaaacaagttcttttttatttggaaggtaaacaagttctttgttctagtgctttaagtctagctgtttacagtcttgtgcttgaaattttagacttcagtgtatttctatatgctatgagcctgttaatgacatactatcagactgatgaaagatgttttgatagagc

SEQ ID NO: 25115 - DNA, 2319 bp, Oryza sativa
  ref <308>: DATABASE ACCESSION NUMBER: AK100557
  ref <309>: DATABASE ENTRY DATE: 2002-08-28
gatacaatgagttgggccatttgcatgtgaagcgatccagttttagctaattaagcacggctcggctgccgacgatggccttcatcgtgcctttcttcgcggcattcgtgttagcagtgtctccggcggtcggacagcggccaggtatccttccgatccatacgatcggtactggtgggcagaggacagtaacccaatgtggggttatcttaactccaaacgggacatccagccggaatccatcacggaggtgccctccgcggtactccaaaaggccgtccaagtggctgggaacggcaggatgctcaacattacatgggaaggcaacacgcccgatctccaggtcacggtgtttctgcatttcgctgacttccagaaaagccggccccgtcagttcaacatctacttcaacagctatgacaagccgtatctgtacagcccatcatacctggccgctggggtcgtctacagccccagttggtatggtgagagcgatggagagttcaatgtcactcttgtggccactgccaagtccgtgctgctgccgatgctcaatgcatacgagatctacacccccatcaagcataaaactcccatgactttttccaaagacgttgatgccatcatggctattaaagttgagtacggggtactaaataagaactggatgggtgatccatgttacccaacccaatatgcatgggaaggtgtgaaatgcaaaaactcaagtgaaaatattccaaggataatatctatcgatctctccaacagtaacttgcatggggtgacatccagtaacttcacttcgctcacagctctcgagtacctaaatttgtcaggcaaccaattgaatggaccaattccagattccctatgtaaactaaatgcagggctgctcgttttcagttacgagtcaaatggagatatgtgcaacaaaacaacaagcctgacccgatcaaaaaacagagcagctatcttagctatctcagtagcagctcctatgctggttgtgatcgcactttttgttgggtatttgatgtggaaagcaaaaagaaagcccaatagtatgtatgctcttcacatattatctgtattgaaatatattaattattaatgttttttcttttttttttctgtgcaaccagcttctgcgtacaatcctcccagagtgccagaaccgatgaatgctccagtaagtgaaaaatatcactgggatcatctggaaaaaaatgaaaaccgccaattcacctacgaggagctggagaagtttacaaataacttccaacgattaattggacaaggaggctttgggtgcgtgtatcatggttgtttagaagaccatactgaggttgctgtgaagatccattccgaaaattcacggcatgggtttagtgagtttttagccgaggttcagagcttgtcaaaggtccatcacaaaaatctagtttctttggttggctactgctcagagaaggctcatttagcattggtttacgagtatatgtctgggggcactctttttgatcatctaagagataaaactggtgtgggcgaatccttgaattgggcatcgcgtgtgcgaattctgctagaagctgcacaaggcctagattatctgcacacaggatgcaacaggccaataattcaccgtgatgtgaaaacaagcaatattctcttgggtcaaaatctacaggctaaaatagcagattttgggctttctaaagtttatgttagcgacacgcagactcacatgtcagccacggccgctggatcaatgggctatattgacccagagtactatctaactggtagaattacggagagcagtgatatttacagcttcggtgttgttcttttagaggtagtcacgggtgagcgtccgataatacaaggccagggccacatcatccaacgtataaaaatgaaagttgtggcgggtgacatcagctccattgctgatgcgcggctcagaggcgactacgatgtcaactccatatggaaggtggtggaaattgccatgctgtgcacagaacctgtcgctgctcaaaggccaacgatggcaagcgtggttgcagaactgaaggacagtttagtgccagatccaccaccacatcatgccgtcgctatgtcgcctacatttggtccgtcggcaagatgaagaagctgtacgcctgtacctctatatatacctgccttcggtgcatctagatggtctctcaataatggggcatgatgcatgaatcctagctatacatgtcgagaacgctattgagtcttgtgatgaacgatgtcattattaataaagtacattattcgtgc

SEQ ID NO: 25116 - DNA, 2812 bp, Oryza sativa
  ref <308>: DATABASE ACCESSION NUMBER: AK100558
  ref <309>: DATABASE ENTRY DATE: 2002-08-28
gagtgtccttacacgagtgccctgggcctgcagctcctccgtctcaggcgacgtcggaggcagagctccagtcctcgatcgtctgctcgctgctccggcgggaggacgaagaggagcggcggggttgggggtgctcccgcctgcccgcccgccggccagccagtaccctatggcagcagcttccctactatgccatgttattgctagatccgcccctgctggccggagccgccgctgcctcctccactccgacccccacaccgcgcaccccctcctcgtcgccttctcccgcctctgcgcccacggcccgctccgcgacgcgctcgcgctgctcccggacctcgccgcggccgggctcacagcggaccccgtcgccgtctcccgcctcatcaagctctgcgtccgccacggcacacccagcgatggccgcctcatccaccgccacgttttcggcggcggcgatgtggcggcgccctcctgcagcagcctctttgtctccaactccctcgtctccttgtacgccaagttcggcctgctcgacgacgcactcaggctgttcgacggaatgccgcacaagaatgtcgtgtcctggacgaccgtcgtcgctgcgctggccaatgcccgcgggaggaaggaggacgcgctgcggctttttgtggccatgctcagggacggagtggctcccaacatgtacactttctcgtccattctgggtgcttgcagcacgcccagggtgctcgcggcgatgcacgggagcatcgttaaggattcgcgcagagcggggatggtgtcggggcgatagagctttttatgaggatgaaggaggctgggttcttgtccaaccagggaaccttgaccagtgttctccgggcatgcactggtttggtcacacttgaggtggggaggcaggttcatgctcatgttctcaagtatgacaaggacctgattttgcataatgcacttcttgacatgtattgcaagtgcggtagcctgcaggatgcagatgccttgtttggcaggatgcctcagagggacgtgatctcttggagtaccatgatctctggtttggcacagaatgggagaagcattgaggcattgaaggtttttgacatgatgaaatctgaagggcctagaccaaaccacataactatggttggagttctctttgcatgcagccacgccggtctagtggaagatggttggtactactttagttcaatggagaaactcttcggtattcaacctgagagagaacactgcaactgcatggtcgatctacttggtcgggcagggaagcttgatgatgctgtgaagttcatccatgagatgaactttcagccggactcagttatatggaggactcttcttggggcttgcaggatgcacaaaaacgccgatcttgcagcatatgcagcaaaagagatccttagactggagcctgacgaccaaggtgcccgcatattattgtcaaacacgtatgctgatttgcgacaatgggcagatgctgagaagtcgtggaagatgatgagagacagaggggtaaagaaagatcctgggcgaagctggatcgagctgggtaagcaggtccatgttttcattgctggtgacttgtctcacccatgttcagagagtataattcaagagctgagccgacttttcagcagggtcacaaacctcggttataccccccagacagagtttgtgttgcaggatctggcaactgagcagaaggaagatctattgaaatatcatagtgagaagctggcaatagcatttggaacgatgaacgcgatggaagggaagcccataaggatcatgaagaacctcaggatctgtggtgactgtcatgcatttgcgaagctcgtctccaagagcgaaggcaaggtgatcatcatcagggaccctgttcgtttccaccatttccaggatggagtttgctcctgcaatgattactggtagggatgaccggcactgtcccccattcgcaaggtgcaacgaaggttagcagtgagtagtgaccacatcaaaggtctgatttgaaaatgtctccaaaaatgtcctgtccgtgtgctattggctggatgcacatacatgtcagcatacagcactggacaacatgtacggttgtacatgttactcctatcacatcaactccatatgttctcctacagctgatcctgagccacatctagatttcagtggaagtctgaaagaggagcgtgagaaagaaagagctaagctagtcgaaaggaggaaaaagaacaaggacggaatgcaaaaaaagggagaggagaaagagaaaggcaggaatagaaaccgcagccatagaaaagagaaggcctgctggccagccttcttcccccctcttccagctcatccaagccagcagttgtcaatcattttccccccgacttggaatctctgcaaaacacatgcacctataggttcaagggaagtggctgtaaggtcatacatggtgcgtataatgatccatgtgtaccctgctatgtagttgttatgacttctgagatgtgcttgggtatcggacatggttaatggcttgtttcaagtttcatataatttcaagtttcaagttatgataaaacagtgataagatcattgccagttaagactgaaataatgtgctgaaagtttgtctaatttttgtgaaaactgaatcccgagggctcttcttcctctgctattgattttgaaggttattgtaaccatctgttgatgaacaacgacatcatgaagttaacagagtatcagtctcctaacaaaaccagtaaaatgagttctgttatttgcc

SEQ ID NO: 25117 - DNA, 2694 bp, Oryza sativa
  ref <308>: DATABASE ACCESSION NUMBER: AK100559
  ref <309>: DATABASE ENTRY DATE: 2002-08-28
ggcttattacaacttaccaagagacgattttcatgattcattgataacaaattgaatacgtcaacgaagagaaaaacatgtcgatgtcaaaaatcaaacatgcagcgaaatcgttgaagacttttcaaggtattcatttcgatgagtgtctggatgatggtggaatagctgaagaattaaacaaatggcttattgaagtatcttgggaagtggcaaataaggttggaggaatctatacggtgattcgttcgaaagtaccgataacaaaaaaagaatatggaaataattatatttgtttgggaccgtacaacgattcgtttgtgaaaactgaagttgaagttggcgaatcgaagattgaagctgttcgagaaactgtcaatgaaatgagacgattcggtattcatgttgtcaccggaaattggctaattgaaggttttcctgaagttgtgctttttaatattggttccgctgctcatcgattagatggttggaaaggtgatttcttcgaacatgctcgtattggtattccctattacgatcgagaatcgaacgatgcattattattcggtttttgtgtgttttggtttcttggcacgtttatcaatcaagttaaacgtcgacagaaaagctatgtcatcgcacattttcatgaatggttgacaggtgttggtttaattatgacacgtttacggggttatgattgtgcattgatatttacaacacatgcaacacttttaggaagatatctatgtgctggttcagcggatttctataatcatttaccttatttcaatctcgataaagaagcaggcgatcgacagatctatcatcgatattgtatcgaacgtgctgctgcatgttgtgcacatgtgtttactactgtttcaaatatcactggtattgaatcagaacatttattacacaaacgagcagatgttgttacacccaatggtttgaatgtgcagaaatttgctgctcttcatgaatttcaaaatcttcatgcgcagaataaagaaaaattgaacaattttatccgtggacatttctacggacattatgattttgatttggataaaactttatattttttcattgctggtcgatatgaatatacgaataaaggtgcagatatgtttattgaagcattagcacgtttgaatcatatgttgaaatcatcgggttcggatatgactgttgttgcatttatgatctttccaacagcaacgaataatttcaatgtagaatcattacgtggccaatcaatttcgaaaatgttgagagataccgtacaaaatattcagagtgaaattgggaagagactttatgaaatctgtctaaaaggtcgactaccgaatgcagatcaaatcttacaaccaagtgatacgattgaactaaagaagtgtatctatgcatcacaacgttcaacgttacctccaatctgtactcataatgtgaataacgattcaacggatcctattctcaatgctcttcgtcgttgtcgtctcttcaacgaccgttatgatcgtgtcaaggtcatctttcatcctgaatttctgcgttcaacaagtccgctacttcctcttgactacgaagaattcgttcgaggttgccatctgggtgtctttccctcgtactatgaaccatggggctacacaccagcagaatgtacagtcatgggtgtaccaaatatttcaacaaatttaagtggtttcggtggttttatggaggagcatgtgcatgaaccacaatcgtatggaatctacgtcgttgatagacgatttaagagtggagatgaatcgtgtcaacaacttgcacaatatatgtttgattttacgagattaacaagacgacaacgaattattttaagaaatcgtacggaacgattgagtgaattactcgattggaatacattgggaatttattattatcgtgcaagacaaatcgctttaacacgaattcatccggaatatgaagatgaattacttcgatttgcaactacttcatcaactccgtcgactccgggtgtatctcgttcatcaacacctgcaccacccgaacatgaagaagaagaaagtgacgaagaagctcctgaacaacaaccgattgatgctaaaccaatctttcctcgtgctgcttctgccagtcatcttccattggacaaacaatttcgtgcatcagctattgctgctgcaaatgctgcagatgctgctgctgcaaaagagcccaatcttcccgatgcacttgacgatgaagtccgtcaaatcactctcggtaaagaaaatcaagcgcaatccacttcaaataccaaaccagtcgattttggtctgcctgaacatggtgcatttagtgatgcacacgatggtcaacgtgaagatgcatttggagatcgaaaagcatcgatttcgacacaagatgattttgctacacccgatgttttgaaacaaacaccaagcgctggcaatacagcttcattcgaaccttcatcaacgccgcacgaaggaccaattttaacaagctttaaagatcaatcgaacacatcctcaactaacaattaactaaacagtccgtatttatacccgctaagatttagtttttcaactcctgaagatttagctactgtctgtctttcttttctctttttgatttctgatcaataaacgtttgtttttttccccgaagagacatcttcggtac

SEQ ID NO: 25118 - DNA, 2253 bp, Oryza sativa
  ref <308>: DATABASE ACCESSION NUMBER: AK100560
  ref <309>: DATABASE ENTRY DATE: 2002-08-28
ggcgctgcctattcctcttccccgccgcctgctagggttactgcttcatcgcggccaacgccaccgccgtccaccgtcatccttgaccgccgccgctggccgggtgagcttcttccacgcccgccggcgtccatctcgcgtcgctcctccggccatttcttcacctcctcgactccccgaagctcccgcccgcgtgagccaccaaatgcggctggcggaggaggcggggctggccagcccgctcgacgagctcctcccgccggtggacttctgctgcgcgtacggctcaaccctcctccacgcgcgctccggcgcggcctccatgatcaactacatcctcggcatccccgacccgctccagtggcactccgagaacttggagaggaatcccgcgcactactccggatggatggctcgcctcggccccggcgctgtacgcactactctggatggatggctcgcctcggccccgacgctgtatgcgttcattcctcacctttaaattggttgctcctctaattgttttgtgtgattgagattactcggcttgcggatagcatcggcgttggggtgtacttcaatccatttgttgagtggagggacaaggtagcatttgcaacgaagcctcctgaattttgtagcctgatgctttgactgcattgtggcctacttgtcttcctgtacgtgcattgagttctaagtgacaattgtagctatgtggatgcagaggataaagtacgccggaggattaatgatgtcttaactaacatggcagtgaatcgatgatgccattacagataagaagagcactaagtcatatcactggaatatattttccttttcttgcttttgatcaaagagttctgccgtagttgttcgtctttcccaaggtcggagctggtttgcctgtgatagcttccgtaacccacattattgcctctggagatccagtttgtttgctctggttttctcatattgttggtagtctgagtggtacacttggttatgtgatgagtgagctggaggatggaaagagatttagtgaagttgtgaaaactgctaggtctcttggttatacagaaccaggccaaaaaaaaaatttcattcatttgtggcattataagattaatgtgtactcagtattcattcgttatctgtcattgcagctttcctgaatttagtgatgcttgtgataagttcacttactcagctatttaattttggtagatccacgtgatgatctcagtaggatggacgtagctagaaatgttagatgccttaaaagtttccatctgatgaattacatgctactctacataattcactttatctgtgtatttgttgaccattgtcgctgttttgttcaactcctatgtccatgaactaatatatcatgaactgcatgctgctgtgtatctcttcttttttgtgtttaattgttcgtactgggatttgatccaaaatactccacctgttcagggaggcctgtgttatgcactgatcctatttggaatttaagtaaataacttgcaatagctattggaatatggttcaaataaagtattttcaggtttagatgttttatttcattctttcattctttgtctattaggtgtgaggactaacaaattcatatttgaatgcaggcattgatcttagctaggcttctggagcaacggatgggcatggagaatattaatggtggcgaatcctacttagacagcctcagaagcttgtttcagatgatgtgaagtcctactcggcagtttcacccgaagggaacacttctctacggatgccgattctccagacgcctatgcaagatgcaggctaaaaacgagaacaaaccgtagaggtttctcctatagggtccttagcataaacacttgtctagaacaaacgtgcaggaataattaaggaaaattacttcatattaaacagataagcttacatacggttttccctttcgggaaacccgaaggtaggtacaagcaagctgttcttaccttacacagcgttataacacaactccttgcttcaatatactatgcaaggtaggctaaagtcactactactaagaacggtggaatggagggtgagagcgcgcttggaagctttgctctgaatggtgtcttatatatatatgtatgttgtgtgtgtgtgtgtgtcatgaaacctttgttggtctgaaaaacattgcccatagtttctttctgctttatcaatataaagtttgagcaatcaagttgattc

SEQ ID NO: 25119 - DNA, 3021 bp, Oryza sativa
  ref <308>: DATABASE ACCESSION NUMBER: AK100561
  ref <309>: DATABASE ENTRY DATE: 2002-08-28
cggctgttcctgctgctttcgaagatggtggcagttttcttggaggagaaggaggtgacgagcaccaacctatggtgatcttcgttgtctccttttattttcgatcttacttatcattcttctccaccttgttcctgttgttgcgtctactgctgcttccgtgtcgctgctgttgcggttcgcatggtctctgttggaggaggtggtaatctgtaattctgtatctgtccgtcttcttgcaactggatagtgttcatcagttcatgagttcatccttcatcgtagcacccgtttctacctacgcattttcttgatgtttcttttcctggcgttatcgatgtaaacatggccgctcgatgatctatatctgctcgtctctatcgtttacttattttggtatgtttttccagattctttctgcgtgtaggtgtgctttcctctctttttttttcccacactgggttttgacgttctgttgattcctcttattcttgttgattcttgatgatgctgtgcacgcggaaactcggtgatcttgatttataacctgtccgttcttgctgttgagtgccagcgagcagtgttactctgtttttcatgaaagtacttttcattcagtagatgtttacatccatagatgtatgagtctcttagttcttacttactatcaagcaatcaagttaagccatctttatttgcagctcacattaaatggtctaacacttgatgatgtttcacttccccagtatggtgtgaagtgcgattctgttaagtagtttgttacccggcaccaggtgttactgaaatttgagtgggaaatcttagcctgtgattatttgtcccctttcatatcgtgtgcactgcaggctgctgcatttgttcttggcacaaactttggagtttttatttttgttctgaaatgctgaagccatttttcatggtcttcttaagtcttagtgaccctgatcagtattgaacaatgtttggttcaacagatagtacaatagtgtgttcacattagtccttacaggaaagaggcttctgccatgggtgcatctcccagccgtccactagaacaatcaccatcatctagtgaaggagagaatcacagagttaagtatgcctcatatactacgcaaggatttcgcccgcacatggaagatgcacttgcagttgaactagatctagatgcgaccacgtcattctttggtgtttatgatggccatggaggagctgaagtagcaatgtactgtgcaaaacgatttcatactatgcttcttgaggatgtagactatatcaacaatctgcccaatgcaattacgtctgtatgcttcagacttgatgatgatttgcaacgatcaaatgaatggagggagtcacttaatccctgtgctaatcgcaattgtctcactaacatttgtgctaatctccaccatttcacagaggattacgttccgccgtcatatgaaggtagcacagcatgtgtggtaatcattagaggaaatcagatcattgttgggaatgttggtgattctcgttgcgtgctttcaaagaatggtcaggcaattagtttatcctttgatcacaaaccacaccatgaagctgaacgcgaaagaattcaaagagcaggaggacatgtatttttgcaaagaattctaggaatgttagccacgtccagagcgattggtgattttgcatataagcagaacagaaatatgcctccttcacagcaaatggtgacatgtgttcctgacattcgcgtcgaaaacataactgatgatactgaatttcttgtcatagcaagtgatggtgtctggtaggtcctctgctataaaattagtaaaggttatttgttgttttatgctagctcctgattaaataaatctcttgcagaatatatccactccaatgacaattaacttgcttctaagacagtattgttttttccacaagggtttgtacatttgctttaattaaaattggatgtgacctggactggtatattatctagttcaccaccatgtgtagttatgaatgtttttacgtggtgaagatttttgaattcttattttgagttaaatgttatgtccttggagaggctgaatctactgaaaagagagacatctgtcattccctgcactagctggggttttatagtattcagacaattatttaatttgatggtttggtatctgacaggcttaataagttggaaatgactgcaacgaccactggtcaccttatatatctgacttatactgcaagatcattcttcaagaaccatctcactaaatgaaacatttacacctgtaggaattgtgctaagatgtatcagtgttaatattgataaatgacagcaatctaccatatattatcacaatctgatatacgtttcccattggcaatgctatgtctcttccttttgtttcttctacagttttattcatattcacatagtaaacttaaatacatttttttttctctttcagggatggcatgagaaataacaatgttgttcagtttgtgcgtcaggaattacgtccgggggaggaaaatctacgcgagacttgtgagaagcttgttggtcattgcttgcactcaaatgacaacgcgactgccatactggttaagttcaagcccattgaggaggaccccgatgaagttgccagtgccagggatgaacatcaacacaaccccgagggcggtgatgaaaaacttgacatcaacaatgacaatgactaatcactggccctccaatttagtgcaccttagttcttgcaaggatcttagctagctgcagggagttttggggttagatcaggaaaagaaggtccagagagtcctatttttgtccaaggcgacgttgatgggatgccactaagtacgtagtatgatgccatcagtccattagcataggagacagtccgttacattgtgcctgagagtcacttggattcgtttaacgcacctttatcattgtactctggattactgaagattttggtcgatgtagtaatactc

SEQ ID NO: 25120 - DNA, 3279 bp, Oryza sativa
  ref <308>: DATABASE ACCESSION NUMBER: AK100562
  ref <309>: DATABASE ENTRY DATE: 2002-08-28
tgttcgagtgctcgtcacaggcggctccacttctccgctggtgcggcggcgacggcgacggcgacggtgccccgcgcgccggagaaggccccgcgccgcatctacgtccgatggcctcctaccaggacaatgaggcagccctaactctggggtgttggcacataaaccgtcatttccttgaagggacaccctgctagcatttctgaaaatgccggttgatggaacaggtccatcaaaatcattaaaagatagattaagatccttcaaataattcatggatgcaaaaaaatctggaatgctccctgataagttgtttgaagagagatccaactccttgatgcttcttaaattcatgagaaaatgtggaatgcttcctacaaggagattttcttccatgtgaagggactctagaagcacacactttccgagagtggatggaatgttgctagtgaggcggttgttggaaatgctaaggctgccaagatttatgagacctccaatctccagtggtataggcccagcaaaggaattatgcgacaagtccaagctttgtgacagtgaagaaatattaaatacctcgcttggtatgcttccaccaaatgaaatgtgagaaagattcaacttctctaaatgtctccattgccctaaacttgctggtatagtcccactgaagttgtttccatccaaatataactcggttagttttacaaggttgccaatggaatcaggaacatggccagagagattattttgtgcaaagcttagaaccagtaagttgcttagatttcctacggaaggagggattgtaccagtgaacaaattttgatccatatacagcacttcgaggctcctaaggtttccaatctccaagggaattgtcccagaaagtttgttttgcttgagccagagccacttgagctccgagggaagattaccaactgagcttggcaagtgtccttgcagtccattcccatccaagcagagtctttgcagctgagtgcagtttgcaagggatgagaggaagctccagtcacccgcctcaagctggttatatgcgagatcaagttgttgcaagtgtgacaaggaaccaaaggatggcagtattccagtgagcccaatatcaacaagatgaattatttctagcttagaagcattaacaagagaagctgggattggtccactcaaacgtgtttttgataggatcaatctctgaaggtttggaagcttgtagccaatatctggtggcagtcgtcctatgagtgagttgttggccaattctagatatttcagagatgatatattgaaaatagactggggtacctgaccagacaagttgttgattgagagtattagcatctcgagagttgggattctacttaggctctcagggatgcttcccacaaggttatttgctgcaagggaaacaccaacaggagaggaaaggttccctattgaggcaggtatctcactagtgaggttattctctgctagactgaggtattgaataggtgcagcaactgctgtaacaggtggtatggaaccaattaatttgttcctgtcgaggtaaatggctgtcagagaggacgtgttgaagagagctcgtggcagcgctcctgtaagtttattttgtgtcaggctaagaaattggagagatgagctattcgccaagaactcggggattccttcagagaggccatttcctcccagatcaacatacgtgagagatgagccactgcccaacaaccacggtatgttacccaccaaagtattggtggcaaggttcagaattttcagctcacgaagtgtgccaaacccactaggaatgcttccttgcagcttgttgtttgacaggtctatgagctggatatgaacgagttgggctaggcttgcagggatctcaccttggagggagttgttccacaagctcaggacttcgagacggctacaggaagataactcggctgggatgcggccatcgagcgaattgacactcaggttgaggtgtcgtagttgttccaggcggctaagctcagctggtatacgcccgtgaaagctattgttcgacagatcaagcctctcaatggagctcaagttggctatgcacggaggtataaggccatcgagctgacaggagctgaggtctagcacggtcacgcggcctggcatcgtcgtactgcaggtcacgccatgccagtggcagaagtcgagagaggtgatcctccatgactctagggctctggctggatcagagaccagagacctgaaggaaaggagagcctgccgatcaatgtcattgccgtcgccatgacctgctgatgatgacgatggccatgaacatgtcaaggcaaggaggactagaaacagtgcaggactagttgggctgatcatactactggtgtggctgcagctacttgtgcttgtgatgtaagcttcaggaagcatgcgtgcttcttttatatggctaagcaccttgctcacttgactggctggcaacttgttcagatcaacggtatcatctgctgggattcagaaaccagcattgtggattggttttgaatgtttcgatcaaagttaggtacgtaccccatcttccctacaaatgttttccgaataaattacgctcttcagtctcggatggcaggctgggcacttgggcagctcaaagattagtactactcgacagaagaatggataccaatgggctatcaagacatcaaggggagtacatttgctgtgcggccgaaactgctgtttgctcaatgacgctgcttccgatcgagcggccgacgccgttgataagccgcttgtattgaccggtgtcagtaggaaggaggccagggagcatgggggagagaggaaagtttgtattcgccgcgtcccagcgccactgacatcgagacgataagaacctagggaagaaagagacagaaaatttagaggattggaagtttctctgctaccttcccggtagagaaaaaagaacaaagttaagttaacacgctatgtttactgaaggtaactgtatgtatgaaaatttagagcagttacagtcgaaattaaggcccgctaggagagctagagattatgagaagctggtgcatattataatttgtaaattctataacttcatagaaatggaccgatgctctgcctcccaatctggttgtgagggtattggggatccacatatccgtgtgatacctatagttactttgaacatggcttatatttttacatattcataataaattttgaatagatgaatggtcaaatgtttcc

SEQ ID NO: 25121 - DNA, 2295 bp, Oryza sativa
  ref <308>: DATABASE ACCESSION NUMBER: AK100563
  ref <309>: DATABASE ENTRY DATE: 2002-08-28
accagacagatcctccaaaaccaaaagaactgcctagcgcctagcgatgctgcgcgcggcggccacggcggcgctccggcgcctcccacagtcacaggccccgaggagacaagcgcgcggtctccagtacgcgagcccggagcggcgaccgctggatggtgcgaggtgggcgctctacgcgaggctgtcggcgcacctgccgtcgggtggaatggtggaggagctcggccggtggctccgcgagaggcgcccgctctcggaggagcaggtcctcttctgcgtccgcaggttccgcaagttcaagcagaacaagcacgccctccagttgatggactggatggaagctcgtggagtgaacttggagctcaagcatcatgctttgcggcttgaccttgttagcaaactgaatggtatacatgctgcagaagagtacttcgggagccttccagatattttcaggtcaaagcaaacttattccactctgcttaactgctatgctgagcaccggatggcagagaaaggcctagaactctatgaaaatatgaaagcgatgaacattgtttcagatatattggtgtacaacaatttgatgtgcttatacctgaagacagatcaaccagagaaaatccccactacagttgtaaaaatgcaagaaagtggtatacaaccaaacaagttttcatactttgtgctaacagaaagctacattatgatgaatgacatagagtccgctgagaaggtcctgaaagaattgcaggaggtaaattcagttccttggtccttgtatgctacacttgctaacggttataataagctgcagcagtttgacaaggcagaattcacccttaagaaagctgaggaagttctggacaagcatgacgttttctcttggcattgtcttctctcccactatgccaattccggcaacttgtccgaggtcaagagaatctgggagtctttaaagtctgcattcaagaaatgcacaaatagaagctatctagtgatgcttaaagctctgaaaaagttggatgattttgacaccctgcagcaaatctttcaggaatgggaatcaagccatgagcactatgacatgaaaataccaaatattatcatccaagcttaccttgataagggcatggtagacaaagctgaggctatgcgtcagacaaccatggctcaggatcattccaactacagaacattttgcatattcgcagaattctatttggagaaatctaaaatgaatgaggcactgcaggtctggaaagatgcaaagaaaatggtgaaggggcaggattgggtgccagaaaagcttgtgaacagatatctgaagcactttgaggattcaaaggatgtggatgggatggagacgttctgtgaatgcctgaagaatctcggtcgccttgatgctgaagcctatgaagccttgatccggacctatatatctgtaggtagaacaaatccatccatccctcagcgcatggaagttgacagggttgatattcggcctgaaatgtttgaatcgctcaaagctatctccactgaaggagttgagagttgagactaggggcatgtctggatttttgccatctactacattttggtaaggcaacaaaataggcaaataccaaacctactctaaccattacaattatatggtcacatttcgtaattcggggagcagtcatacccttgattttattatttttttaagatccttcgctatggtatcatctcataagtcatagcgagtgtcacggacaatttgtttggtgttgacgcagggtggttctcaggaaaaccctttcagttggaggtccttgaaatggctggagatgaaattgatgtcaagcagcccacccagcagcactttaagcactaacaagttataatcatggctgaaaatgaactgaaggatgatggtgttaggttgcaaaatcgttggaagacgggacactgggatatgaaggagcttgatgctagcatgaatatgctgcaaagggtgggagctcggtgctttacccacgcaatcactaacaagccaggtggaattacatccattcagaacttggtggatgtgatggattcagttgcatgcagggcctgacagttgaggtggacgattagtcatgtttagattaactggtagctcctaccttactctcgaattagcttcaaaatgtttcccttgccagattgaattttcttcgatttactccgtgcaatatatatcaacgtgttttgtacatgcacacgtttagttctattttgcacagcttaagatccatttttttt

SEQ ID NO: 25122 - DNA, 2792 bp, Oryza sativa
  ref <308>: DATABASE ACCESSION NUMBER: AK100564
  ref <309>: DATABASE ENTRY DATE: 2002-08-28
gggaaaataaaaaagagagagtagttcttgcaatcttgcttcgcctgcaaggaatcctctccggctctccgccctggaggaagtacagtgatcaaattaagctttgggggtggagtagactaatcctgctgaacaaaatagcccaggaggaaaaaaacggtttattctgctaccatggaagttcttaataccaatgatcatgggactgcaagaacacgggatggtgaagagacagcatctgttccagttgagaatcctgattcatcgcatgaaatggagaagaagttaacccacaatttgacagaaaatgggcaggctcctacaggtcatactgtaccttcattaccggatacggtctctaaattgaaaccagctcaggaatctgatgattctttgaaagataagacagaccttcctacttcaacaagtaagaccgaagtgaacaatatatctgaaaatggttcgaccaaccagagcactatgctatcagatgaatcgagaacaaaagaagacaagatgaatcatcacgagaacattgctgccaccacaaacaaaaaggcagaaacagatgcgagacctgaaagtccatacagaggtctcattgacactgctgcgccatttgagtcagttagagaggctgtcaccaagttcggaggaattgttgattggaaagcatacagatctcagacactagagaggcgcagggtcatgcagcttgaacttgaaaaggctcaacaagagattccacaattcaaacaagattcagaagcttgtgagatggccaagttacaagtggttgaggagctagggagaactaggagacttgtagaggagctgaaacacaaactggagagagcagagattgatgtggaccaggcaaagcaggattccgaacttgcgcagctgcgggcacaagaaatggagcaggggattgacgatgaagctagcgtaatagcccaaacacaattggcagttgctaaagagagacatcagaaggctgttgatgaactgaagttggtcaaggaggagatgagatcaacacacgaaaagcataccgttttagctagcgaaagggacatagcagccaaaagagccgagcaagctatttctgctgcaaaggagactgagaagagagttgaggaactcactttagaacttatcgcaatcaaagagtctctcgagtcagcccatgccgcgcatcatgaagcagaagaacacaagctcggggcggctttggcaaaagagcaggattgcctggcttgggagaaggaactgcagcaagcacaggaggagttgcagcaactcaacatgcaacttgtatcaaaaactgatgcaaagtccaaaattgatgaaaatacgcacatgctacaaatcctcagtaaggagctggctgcctatacagaaaacaaaatgagtgaagaagctggagtgatcgaggaggatggttctgatgaggctaaagaaattagcaggtcaatcaagcgagcccttgcttcaacaagaaaggagcttgaaggggttagaggaaatattgaaaaggcaaaagacgaaaccaatttaataagagctattgcagaatcaattaagtcagaggtggataaagagaaagcttcacttgttacattgcagcagcgagaaggtatggcatccatagccgtctcttctctggaagctgagctcaataggacaaaagaagagatagaaatggtgtacatcaaggaagcggaaacccgtgaaaaaatggcagagcttccaaagatgctgcagcaagcagctcaggaagcagaagacgccaaggtggcacctcattctgcacaggaagaacttcgaaaggcgaaagaagaagccgagcaaaccaaggccgctgccgcgactgcagagatcaggttacgcgccgttctgaaagaaatagaggcctctaaagcatccgagaagcttgcccttgtggcggctcaagcattgcaagagagcgaggagacaagtagtgttgaggattcccctagaaccattacacttcctataagtgaatatcattctctgagcaagagggtctacgaagccgaagagcttgcgaatgagagggtggccgcggcattggcgcaaatagagctagcaaaagagtctgaaacaaggaccctggagagattgcaacaagaaaccaaagagatgcacaagaagaaggatgctcttcaaatcgcactgcagagggctgacagggcaaaggaaggaaagcttggtgctgagcaggaactgaggaaatggagagcagagcttgagcagcgtcggaaagccgcaaaacatgttgctaatccttggactgctccacctataagatcacctgaacagaagggctcttacaaggaagacgatgcagttcttactgaaccaaattcacccatgtcaaatagtagcacggatgactttgttgtggaccagaagttgaggaaaaagaaaacattcttcccacaaatgtcaagcattttgtctagaaaggcacagacgtagacctataagattagtcctgtacaggcatatcttactgtacattgtacactgcaaaaatgtaaatggtgtgtttgagtacataagtttattttccacaaccctgtcacttggtgtggatacgtgagggcatacttttgtatgataattttggatatttttttatactatagttccttcgtttccaaaactcagaggcaatatgtatgtctgtttctgatgttagtcatgaaagcaagaattttctgtaacaaaaattgtcaattatgaaaacagattgaagtttgaat

SEQ ID NO: 25123 - DNA, 1820 bp, Oryza sativa
  ref <308>: DATABASE ACCESSION NUMBER: AK100565
  ref <309>: DATABASE ENTRY DATE: 2002-08-28
ggggtggctgctaccgaccttgacctgccccagctcctcgggagtcgggaaggcaactccgcctcttcatccttcgccgccgccgccgccttcacgtgctccctctcctctgcgagtcggcggcgccgatctccatttgtcgaggcgagcagagcaggggagccgggaggggagggcatcctggtgagatctggaagaagctctcctcttaattaacctgtgtaaaagtttgtttgttcccccaaaaagtttgcttcctgggattactacgaggaggaggagaggggatagatagtctgtcagatgatgatgatgccgctgcgttgcctctccgagctggcccgccgccggcctgatcgcgcggttgatgcaatgagagtggggctccgatgtttgatgagcacttgcccgttatccaaagctactgatgatagtcaaaggttatatgcaacttcttcttgtgctaatgtgccagaggtagcactgagtgaggcgccactgtcagacatgcttgtcgattcgttcgggagattccacaactacctgaggatctccttgaccgagcgctgtaatctgagatgccagtactgcatgcctgcccaaggagttcagctcacgccaaactcagagctcctgtcgcatgatgagataatccgagttgccggcctgttcgttacttctggtgtggataagatccggttgaccggcggagaaccaaccattagaaaggatatcgaggatatctgtttgcatctttccggcttgaaggggctgaaaactcttgcgatgaccacgaatgggctcgttctttctaagaagctcccaaggttgaaagaatgtgggctcaatgctctaaatattagcttggacacgttggtccctgcaaagtttgagttcatgacaagacgtaaagggcactcgagagtcatggaatcgatagatgcttctatacaacttggattccaatctgtcaaggtcaactgcgttgtcatgcgtggaatgaatgatgacgagatctgtgattttgttgaaatgacgagagacaagcctgtcaatgtcagatttatagagtttatgccgtttgatggtaatgtttggaatgtcaagaagttggttccttatgcagagatgatggataaagtgcgccaacgttttaaaggtgtagagagacttcaagatcatccgtcagagaccgcaaagaatttcaagattgatggtcatgctggaacaatttcgtttattacatcgatgacagagcatttttgtgctggttgcaatagattacgactattggctgatggcaacttgaaagtgtgcttatttggcccctcagaggtgagcctgagagagcctattcgagctggtgttgatgatgctggactcagagaaataataagcgctgcggttaaaaggaagaaagctaaacatgctgggatgtttgatattgctaagacggcaaatagacctatgattcacattggtggctgagatcagttttaccagctgaaagtaccttggctcctccatacgatgactgcgatgaactatcaacatgataaaacaaaacaaagattacatgatcttaccttgatatgatggtaaactgaggaactcaaaacttcaaacggcaatacatacagtttgtacaagatataaaaatgttactatacttgtgaaatagtagcagttacaaaacctcatgcagttgaaagttaaagcatctgtacttttcgctacttgtacgagaaagttgtaactgttgtatgatgtatgctcctcataaatcaatgctaatgtgtaactaattattcttttacggc

SEQ ID NO: 25124 - DNA, 2400 bp, Oryza sativa
  ref <308>: DATABASE ACCESSION NUMBER: AK100566
  ref <309>: DATABASE ENTRY DATE: 2002-08-28
gagtgtctttgctcctcttttttcttcttcttcctccgccaccacccgactcggcggcctctgctcctccgctcgttcctctcccgacgagggtgggtggggtggggtggggtgggggttcctggtcctccacagtccagggagctgagccgcgccgccggccgcagccttatgacagacaggaatggaccatttggtaggctccctgaacatctccttgtagaaatatttatccggttaccaacatgcgaatgggttcaaatatcatgtgtcagcaagcactgggcaagcatatttcaaggagaatgtatgtggcaaactgctattgcaaggaactggccatcagctggtttacggaaacgctggcctgggccaattcccagaggttctgctagaaggttagttttgtaatctgatgttgcatatcttctccatcatttgatggtgttggaaattttaaagttttgccagagtctgtctgacgcatgattgcttgctgctgtatttgagtatccactttaaaacaaatacacaaatctgaaacaagatgaaaaaatctcagatatcaaatggtttgcatcaagtttattaccttacgttcctttagtaacatgctttactagatgcctagatctactttaagcagctgagtttgaagcggcataaagagctgtgttccgctatgcatgctcactatcccaaaatcttaagaatagcttctctcttcggatacgatcttccatctgaacattcaataaaaaaaagtatctctcggacatttataggagattccaagcattatacgtcagccagaaccttgtctcatctggtggggatattgatgaacttgttggccacacttatctctatttgaaagaacagcttgagcgcccagttgttgctccttccagcatactccatggcaccatcatcggtgaggttttctgttccaagttccaactagtccaaatatagagtttattgtagttcatgtgttggcgtgctttttgtgttgagtgatcattatgaaaatcttttctcaaagataaaacacatgggaaggatacgattaaaccatgtcaggtacaggaaatttcgatagcacatgttttgtgtctgacattacaggaagaaatggttgatcttgtaggattggtaacaatagtatgaactcgtgattcaattgcatggcatgctgagttactgcaagatttatgtatgttcttacttttttgagaaaattttgttctccaataaaatgaaacctgggcagattctcaaacaaatgaagttcctatttttcctaagtggattcgcgtctcaaagaggcctttaaagctgcttccgatctaaaactgataaccatggattgaattttgtggtacaatgagactcattttcagcatcaagagtagagcttcatcactgagtattgcttatactgacgttattggttgctcacactgaatttaacattgcctcacccttctatgtacagatcagttcattgcttgtggtaggacaggagaaaaggcacatgaacttgcttcaaagatatggcttgcagttattgacaacttggaagaaaaccagcaaactttcttgctgttaaaacacctttctcaagaaggagaagtaagttcagcgtcccaattttatttatgacctgtgtactcacatttgacatgtcaatacaatggacgtgtcatccctcccttttccgtaagttatcaaaaatatctcttgcgtgaaatgatgcatttcatacttcttagggcctggctaggtgcatcttcataaaatagctatagctactatggtgcattctgctgttatttcgttactaaataaaagtaaataaaatgaatgtcatatttgatatgcaactgtgcaaagtgcaacaacttgctgaaaactgttatatttcgctttctgcttgcagtttttccttccattcccatactccagatcatataaagtcttgtggagggtgttcgacaagctgttcaccgacttccgtgactgcttcagccgaggggattaccatgatgcactagcgggtgccaagtctaggtttcagccagtaccatctgcatggcttggccactgacgagcagttgctgctcttgttgtgcactgcacattgccttttagatgtagcagctatactttctgaaatgcaaaactggaccgaaggatggtacttccattccaatggatgatttgtatatcttttagtgtcttagcaacttcagaaacaccaaactgttgtctgatcgaaaaatatattctcttgtaaattctaaacattcagaattacccgacttctccattttcggcttatgatggaacttattatatgaactcttacctatatcaagtcagatgtggggtattggt

SEQ ID NO: 25125 - DNA, 2127 bp, Oryza sativa
  ref <308>: DATABASE ACCESSION NUMBER: AK100567
  ref <309>: DATABASE ENTRY DATE: 2002-08-28
gacctttctcttatcccctctatccgccgctcgccggccatctccctcccccaccaccaccaccaccgccgcctcctctccggcgagatgctgacctgcggccgcttcctctcctcctccgccgccgcctccaccccctccctctcccccttccggaacctaaccctctccctcctccgccgtccccatctccgcctcctctcctcctccgccaccgcctccgccgccgccgccgccgtcgagcccgacaccaagggtggcgcgggtggcggcgccgcgaagccgcagtggaaggcggcgatagacttcaagtggatccgggagaacacggacgccgtcgccgccaacatccgcgaccgcaactccgccgccaacctcgacctcgtcctccagctctacgacgagtacctcgccttgcagaaggaagttgaacggctccgagctgaaagaaatgcagttgctaataagatgaaagggaaattagaaccatctgtgcgtcaagcccttgttgaagaaggcaagaacctgaaagaagggcttattgccctagaagaggaccttgttcagctgactgataagcttcaactagaagcacaaagcattcctaacaccacacatccagatgctcctgtagggggtgaggaaagttctgtcgtcagaaaagaggttggtagtcagagaaacttcaatttcaccattagagatcaccttcagctgggaaaagaacttgatttgtttgattttgatgcagctgctgaggttagtggctcgaagttctactacttaaagaatgaagctgttctgttggagatggcccttgttaattgggccatcactgaggtctcaaagaaaggtttcacaccactaataactccggagattgtaaggtcatctgttgttgagaaatgtggcttccagccaagggcccaaaatactcaggtatattgatccaagatacctttacatcctggttaatagatgaattcagcttttagagctggttgtgttaggaggatcttatgcccataatttcaagaaaaaggtgagtaactttctctaggatatgcttttgtgctgtatgatgtggcatgttaaagtcgtagttggctcctaatttatgaattctctcctaattacacaggatcagatcagctattttgtcatctttattttcattacatgatttggaaatttcatcgatctttcatcgtgtgaaagtaaacatttatttcactagttaaccttctattgtgtttctgtaggtttattcgatcgataacagtgatcagtgcctcataggaactgcagagattcctgttggcggcatccatatggactctatactccctgattctgatttgcctcgaaaatatgtagcctattcacattgttttcgcacagaagctggtgccgcaggtgctgccactaggggcctctaccgtgtacatcagtttagcaaggttgagatgtttgtattttgccggccagaggagagcgacaagtgccatgaagaacttatcactattgaagaggaactttatgcatcacttggacttcatttcaaaactttggatatggcgactggggatctgggagcaccggcctacagaaagtttgacattgaggcatggatgccaggcctagataggtacggtgagatctcgagcgcgtcaaactgcacagactatcagagcaggcggctgggcatccggtttcgcccatcacctgcagatcctccaccggcgaacgccaagaaaggaaagggcagctcaggcccaacacagtttgtccacacgctcaacgcgacagcggttgctgttcctcgcttgatcatatgcatcctggagaactttcagcaagaagatggaacggttgtgatcccagagccactgaggcccttcatgggcggacttgaagtgctctccccgaaaaccaaatgatcagcttgaaggtcaccacgtttacttcgaatcttgttttttttatagatttacagtctttttttcccccgaggatattggcaagtgaatgtgcagaatttcaaagaaatctgtggtcgattccaaatgttccatgcggaattcgtggctgttagttggccaccgattgtcgattgttgttttggct

SEQ ID NO: 25126 - DNA, 4592 bp, Oryza sativa
  ref <308>: DATABASE ACCESSION NUMBER: AK100568
  ref <309>: DATABASE ENTRY DATE: 2002-08-28
gaggcttggcaactcggcggtgatggcggcggcggctcagccctgttgggttgagaagtaataccaatagttgcctgaatctattgtgagtgtgtgagtgtgagaagtgttcatccaattcgagctgttaacatgttgctgctgcatgatcagagagaagggtacagagagattgtataggaggaagaaggaaaggaaaaggcaaagcaacgttgaggaatttcatcgttttcgcaaattagggaatttgtcgcaaggtagtgttgctcccctgcaataggcagcttctctttagtccctaggagtgtaagattcaaatagaaattaatttgatagctactcgtgccacaatttttgaggtgcttgaatataggttgaaaccgtattttcaattctggtgttaaaccatccggattcagattagttgtcctacataaaatttgtagtcattgtcgatatctttctaacaccgcaggtttcgcttgattccgataagcggtttaggagaaacaacagaaacagtactgctgactgggtccggaaaccaggacaacaatttgttttccttaatctgggatttccagagccataatctgatttttcgcccaacatgaaagttgtagacaattttatctagatgtccaaaattgtattatttgctagattctgttagacggtttgcgagttaaaaaaaacagtaaggaaactgctataggttattcaatacaaatcggtcaaaagtttatatgtcctaggttattgattttagtagatatcccttgtaactatcataagttggatatagtggtctatgcgtacttttgctctacatgtgtggagggttccaacgttggaggagttgagtcagagtatcgaaggagttaaggcaagtacaagacggatttatgtgatggacgaactgagttgttttgtttggttttacttgcataattattatttaattgcttgatattattgatcgtatggctctgatgttgtgctacttaatcatgtttcaatccatatttgaatttatgatgttattcatgttttattattccggatgtttttgtttacattattcaagaaccatgcgtagccatgggagtgcaatttgggtctttattcatgatccttgagaaacgctaatcacgcttgttcggcttaccggtaatgctaagaggatatttgtacctgcccgggagggaactactatcttttgacttctttgttttagaataaagtaaatccaacctttcatattggtttcttattgcattaaacctgtgtatgttttactagttcaatattgtagttgctgagtattctttactcactcctgtgtttaatttggtttttaggtatctaatgacattgatcagcatgggatgggagtagcactcttgaactacgcattattattgcacactattgatatttagttttagagctatgtttctgcttagcgtaagttttgcgtagaacttgtaaatgtcatttaaagttctggtccttattttcatgtggaatttgtggagctaggatgggttggattatgtggtttatatcgttatcaagttatcttataactgcctgtcgtggatgctcgtatttttaggggagactctaccgaaatttctaataattttgggagttagtggtttttgagtgtattttggtgtggcactctaggtaggtggctacctggagtgttacaccgtcgtcctcgtcgccgctgtcgtctcgccaccgctgctcccgttgtcgtcgctgtcattgcactgccaccgctcccgtcatcgtcgccgcgcagccgcctcgtggtcaccgtcatccttgtcgtcaccatcgttgcgccgccgctgctcccgtcgtcatcgccgtcgttgtgcagccgatcgtggttgccgtcgtcctcgtcgtcaccattgtttccatttatgatggataaaagatcaaaaaagaattgatggatgaaaattgtattacttagagatgtggttcaaaaactatttattggtttttacgaatatattataacaaacatttaaattgttgggagaattgtgtcgtgccaaaatctatataatctataatctatagtggcagagccacctctaagacaggttgccactatccatagaagtcgacatctataaaaaaaactaatcgataatcgaaaacactattagttgttcaggcttgacgacgccactagctccaccactaatactccgtaaatcgaatcgactatattctatgaaatgattttttttaaaaaaaaatatctcatttggtcaatggcgttttatcactgttcttttatttctttaaagaaattgttcgcattaaacaaacttgttttttttttcttcacacggacttacccatcacccgttcgtccgccggaaaattcccctcgtctcttccatgttccatcaccgccaggcgctagcttttcacctgcaagatctcgaggtagagtggtagaccacagcccgccggattcttgcgagcagcttcccatcgccctgccttgatctgtgctggcctgcgtcccatccccgtgctgccgcgcgcgatccctcctggcctggggctggatttgtggatactttgtacagggttgcagttgcagatttgattatttccagatcgaggacggatggttgcggccaatgccaccgtcatggatagggttccttctgtgtgggatcggccattttgcatcaaggtatatatcaaagtcacagccagtaatgtttagcaaggcattatcaagagtaaaagatctccctggggctttccaggacatgttataatctttggtacctggacttactgggattgcatgggaaaaatcaacggtgacatacataaataggtagtttgaggtgctaccgtatacaatagcatcaatatcttcgataacctctgtcccaccctgcaggaagagcctaggtggttgtgcggtgttgtcacaggtgagattgaagtctgggttcctgaagcagccagaaccaatgccgaatgggtagtcgaagctcaggttgccgcagctccgtgggcagccttccagagtggccgcagaaggaagaatggtgctgttgataccttgatttcctggcacgctggatgatctcacagttggattcactgcagaaaacaagacgaataggagcagaggaaccactgaactgaaggggctcatgtcgatcatctttatagtgcttagcattgttgccctagagaagtttcagagcttgagctgtgaaaatatgtgggagaaccggagaagcattgcaaatgagtacaatgggttttcatccatatctaggtcatggtcttgctgctttataagcatctggagtctggacagggccacaggggccactgggaaatgtaaaagtcagtgattgtcaatactgcaagaaaattgtcaaggtttactgcaagactacttacagcgatgagggttggtatcaggtatgtcacttcaatcagttccactattaattttacatgtgaaccaaaactttgctctctctttccacctggcttccattctttcaatcaccatcgttgactgactgggcaatatatggctctatattggaagcatcttctcacctttattcaacattaaagtagccaattgcagctagtaattgattcctggagtcctggtcagtcaacattctagctttctaagccattcaaaatgtccaaagcaaactcatgaatgtggcgagcacattttccaccatgccgttgatgctgacagcattgggaactgagtgccaaccagcgtaagtttctaacccatggagcggggagtcgaacagtttgatcgtgggagtctggatctggcttagtgttcaagtacatgattttgacaggtagagcaaacactcgacacatgtttacatttgaagaattagtttagattgctgaaatatgttggagaatattcttttagcaatttttacagagtcattaatagaacaataaccttagcaattttgcttgtgttgtctattgctcgctatttctgagcctggatggaacactaatggtgaatatcgatgcaaggtttttatccggttcacgtcatactgcaggatatagtgactgaagtgtgaaactgtctttcctggagattacccctgcattgctcatccagtggaggaaacagagttcactgcttgttacttgtgaagtcgatgaaggcagttgatggtagcagttcaccaaggtcaggcagagtgactgacccagcggctattcagcaatccgtgctaattaagtgattgtaataaagctctccatttcctggaaaagaagttacgaaagaaaggtgcaactgaaattggttaaggttcttcgaatccggtggaacacctgcctacttcaaccactggtttagaacctatgctaacgaactacattctgctgatttgattatgttctaagcttttcgtcgagatggcatcaattactttgcatccattcaacgcaagagtatgtacaaatatactgtcttgatgtccgttgctgttttgatgtgcctaaattaaccgacttactccccc

SEQ ID NO: 25127 - DNA, 2144 bp, Oryza sativa
  ref <308>: DATABASE ACCESSION NUMBER: AK100569
  ref <309>: DATABASE ENTRY DATE: 2002-08-28
gtaatttcttacctggtcctctttaatgtgaaagtatgcagcagatgtttaatttctttgtttctgtaatgcccgcattattaaagttccattgtcaggtttagtgaatacaaacatacaaataactttatttcattgtaaaattgtaataggtagtttaaccttcaactccatataactatatcaaatgaagtgtgttaaaaacatacaccataaaaactatcactcaaagtgcaagttgaaagggggcagatatataacataattctccttaaaaccataaatctcaagatccattcatgaaagttttgattttatttatttattttgtgcctgtcataatttgatatctcattgaggtctgatggaaacatggaatactatatcatactgctactgcaatctgtgagtgcacaatatatagaaacaaaaattatacaaaaatgagttatggcagtgtggtctccagtatattttcactatgaatctagattgtatagccttaattaacttgaatcagttggttttctgaacttcaagctggtaaaagctagaacttagaagcttctttgatgttgttcaattgaagaattgatacttcgtggctattattttcaagtggttgactattattgcagatatcctaactgcaataagagcaatacctcctgcacatgctgatgtattagagaagcagaaggatattcttgatacagtaatgaacatttatatcaagaccatgagagaggatgatgacaaagaagtagttgctcaagcttgcacgagcttagcagacatcgtgagggattgtggatttgccataattgaaccttatattacacgacttgctgatgcaacactcattcttttgcgtcaagaatcttgttgccagcaagtagagtcggatggtgaagacgacggtgatattgatcatgatgaagtgctgatggatgcagtttcagatcttttgcccgcctttgcaaaagtgatgggatcttattttgatcctatctttacaaaattgtttgattcattgatgaaatttgctaaatctcctcatcctccccaagataagactatggttgttgccactttagctgaggtcgctcagggaatgggagctccaatctctgcttatgttgataagataatgcccttggtgttgaaagaacttgcatcatctgaggcgacaaacaggagaaatgctgctttctgtgttggtgagatgtgcaagaatgggggtgctgcagcactgaaatactacggggatatactccatggtctgcatcgtttgtttgctgattctgaacctgatgacgcagttagagataatgctgccggtgccattgctaggatgataatggtgcagcctcagtcaattccactcaaccaggtacttccggtgtttatcaaagctttgccgctaaaagaagatcatgaagaatccatggttgtctatagctgtgtctgtaatttattattatcttcacatcctcagatccttcctctagtccctgatgtgataaatgcctttgcccaagtggtagtctccccaaatgagagtgatgaagtcaaaacagtagttgccaaggccgtttctcatttgatatctgtttatggtcagcaaatgcaacctatattgagtgctctgccacccgctcatgctaatgcattagcatcatttgccaataggagatgatcagcagaggaacatctatattcagttctttggcctactgggatgctttgtcagtggtttttactcactgaagaccatttgatttgccagatatttatagatctgccaaaaaccggtttggacatcttcattgggatatgaaagtggatgcaaatgctggaaaatgtgccagcagagttgtttgcgtcgtgattatgcgatatatttctgccttttgagttatagtgatcttttgttgggatggcttgtgcggtggttctggttgaaggaaatggccagcggtgagcttttgttggtcatcatcctggtttcgattttggttgcttgtgttgagtttacaattctttgctcgggtgtactaccattgctactattgtatataaacatatttctccatagaggtgtaattcttttgttctgaaagggagataattgtgatttttgg

SEQ ID NO: 25128 - DNA, 4222 bp, Oryza sativa
  ref <308>: DATABASE ACCESSION NUMBER: AK100570
  ref <309>: DATABASE ENTRY DATE: 2002-08-28
gagggagaggagaaaccctaggcttggttggctccaagcttcgcagccatcgccgcctcggcataaacccttctactccgcagccatcgccgcctcgagctgagcttgagattcgcggggggcgcagcaatggccgggaagaagaggccgccgaccgcgctctccgagcccgaagccgccgccgccgccgaggaggaggaggccgcagccaagacggccccggctgcggaggcgccagcgaagaagaagaagctggccatggagcggaagaagcagcggaaggagattgacaaggagaggcaccgccagtccgctgaatcggacgccgctgccgctaagccgaagcagccggcggaggtggcgccggaggctgcggctgcggctgcggcggcgcccgtggctcctccgcctgtgattccggtggtgtcggggcctgggcttcacatgaacgtgttcagggacctggcttcgcctgaggcgtcgcagagggaggccgcggcggaggcgctcgtggcggagctcaggcaggtgcaggtggcgcacgagaagggtgggcggaaggagggggagagcgaagcggagggtggagatgggtcgtcgaggatggaggccgagaaggacgatggcctggagaactgcgcgccgtcggtgcgttacgccattcggcggctcattcgcggtatctcttcttctagagagtttgcaaggcaaggattcgcattgggtcttgcagttgtgctcgaatcaattcatgcaatcagcgtcgaagcaatcatgaagttgatacctaatttgttagagtattcagcttcaatgaggggaccggaagctaaggacaatcttttgggacgattatttggttatggatcaattgttaggtctggacgggtctcgggacagtgggcacatgaagaaggttctcccattgtcaaggattttgtggatgaggttatcaaacttggtagcaagaaacgatatttaactgagcccgctgttgccgttatcctggatttagctggaaagctgccagaggaagctataatatctgagattctggaagctcccagtgtgcaagattggttcaacagagctgctgatgctggagatccggatgcactctatctggctttgaagttgcaagagaaaacaaatgcccaggagatatttgggaagcttctgccatatccattcagtccagagggtttttttgcagaagaacatcttctttcaattgctgcttgtttcaaggaatccacattttgtcttccacgcattcatagtttgtggcttgttatcacggacatgcttgttcgagaggcagcttcacagagtgatattgccacaagctcaagcaagaagcacaaaaagaataagaaaggcagctcctctgaggatacaaaaaagaatctacatactttctgtgaggttataattgaaggaacattgctgctatcatctcatgataggaagcatttggcatttaatattcttcttaatctccttccaaggctatccccatcttcgattcaagtaattctgtccagcaaggttgttcatggtttgatggatgttctgtcaaatgaatcgtcatggttgcacaatgccggccaacattttctgaaggagttagtaagtttagtgagtgatgataatgatcgacgtgttgctgttattactaacttgcagaagtatactggtggaagatttgactgcatgacaaaaacgagaactgttaaagatttggttgccaagttccgaagtggtcaagattgtttgtgtcttgtgcagagtttgatgtcactctttgtagatgaaagctctgttacagacgaaccatctgatcaaagtcagacaactgatgagaattcggaagttggttcaatggaagataaggacctttttggccaagggagtgctgaccttttgaaaagttggatagtgactacaattccttgtgttttaaaaaatctgaagctgacatctaaagggaattcactgacagattctgaaatggttaagtgcattgaagaaaaatttctagtgcagactgaggtattgaaattccttgcagttcaaggtcttttttcagcgtctttgggatatgaggtgacatcatttgagctgcacgagaagttcaaatggccaaagccagctatatcaacatcaatacgcaatgaatgcattgaacaacttcaattcttaatagaagatgcacaaaaggatgaagctttacacgttagtgaggttaagtctaatgacctgggcttctacttcatgcgcttcattaacaccctttgcaacattccctcagtttcactcttccggaccttgagcagcaacgacgacaatgcattcaagaagttactggatgtagaatctctgcttttctatgaggaaagaaaagttggccctggcttggattcgactaaaatgcatgcgatgcgttatctccttattcagttgctcctccaagttcttctccatccagatgagtactgggaggcagcaattgatgtgactatatgctgcaagaaatcgttcccttccatcgttcagaatgacaaatccagtggacagccatctaatgagggtgcggaggtgtttaatgaggatgggccaggcaaatctaacaaggatgggccggaagagcataatgatgatgcgtcagaggattctaatgaggacgggccactagagtttatggatgtacttgtccagacttttctttctgttttgccccatgtgtctggccctgtatgtttctccatcgaacaggtcttccgtgtggtctgtgatgaaattacagaaacagggcttcttgacatgttgagagttgtgaagatagatttgaaaggttctcgtcgccagtcaggtagtgatgatgatgaagatgatgcatgtgttgacattgaagatgatgatgaaaccattgtggaggacgcggaggttggggacactgattctactgcagacggactggatgaggaaatggatgatgattcagctgatgaagtagatgaaggtcaagatgatttggaagaatcagttgcccatgagtcaaaggatggagatggtgcagaagttaccaaagatggggatgactcagatgattcagatggtatggatgatgatgctatgttccgcattgatccttacattgcgaggattttcaaggagcgcaaccttcctggcagtgaaactaagcaatctcaacttatgcggttcaagctccgtgtccttacattacttgagatatatcttcagaggaatacaggaaataatctggtgctggaggtctattctttcttaatgcaagcttttgtgaagtcagcatagtgctgatggcagtgagcaattcaagcaacgtatagggtggtatattgcagaaaaggatattcaaagccaaggattatcctaagggtgatggtgtagagattagtactcttgaaagtttggctggagaaagctctaaaattggcatcgcggtcacgatacaccacggttgcttctgtagcccaaaatgctgcattttggcttctgaagatcatcaattcaaagagtcattcgaaacaggagcttgcgagtgttgtcgaaaagttccaatatatattgaccgactacttcaacaacaagaaatcgcggttgaagcttgggtttgtgaaggaggctgtccggaggaatccttgggtaggagaggagctctttggatttgttctgcagaagattggatgcacaaaagctgaatatcgaagagttcaaacgctagaattggtagactgcatactcaaatcttgggctggtgatgattcgagtgcatcgaaggtgttgaagaagcacctttctcagttgtgcgagctgatacaagaagttcttacaaagatcccagaaaacaagtcacgtcgtcaagaagtccggagattttgcacccgagtattgcagacagtgacaaagcttaacctcaaagaccggtttcagaagaaattgaatcctgaaacgctctccctttgtgaggcacagctaggagctgcttttgttcgctttcaaaaatgacattacatttatgaggagactgtatttgttccctttcgaaaatgatagtcactagaaatattttgagctgagctaagttttgttcctcatttcagctacatgagtagattctatcaaattaagctgtatcggtttttgtgacagtatctgaaaggaaaagatattcactgtt

SEQ ID NO: 25129 - DNA, 2453 bp, Oryza sativa
  ref <308>: DATABASE ACCESSION NUMBER: AK100571
  ref <309>: DATABASE ENTRY DATE: 2002-08-28
ggggatagatagatactccttcctccttccccctctcttccaatcctaatcctaatcctaaagaaagaagttggagaaatctcacggcggaatcaatcccacgcgattcgtcgtcgatctggccacggcactccgcttctctcttctcctctactccagcacagcagtatgagtatgaattaggataggagggagggagggagaggaatagcatagcagcagcctgcaggcggaggaattccgcccgatttgatttggatttgggattcttctctttcgttttcgtgtgttttttttttctttgttactacccttcaattcctccctttatttggggccaagccaaagccaaagcaatcaaccccgatttcacgccgcaagattctcttccttctcatgcaccgcctcttaatttcttcttctttcttggggccagaccccaacccccaatcccttgaccaccaagctcctgcttcttgcaatcttgatcgatagtctcctccatcttcttcgtcaagcctctcctccttggatctttcttactacctaggtttcctggtgcaagtgcaacatggttgggcagacggtcatgcggattgtgcgcccctgcttcaagcccgaccaccagctcgccgtcggcggcaccagggatggattgctctggtacaaggacaccgggaggcacgcttgcggcgacttctctatggccctcgtgcaggcaaacaaccttctcgaggatgccagccaggtcgaagctgcccctcttcttctctcccactcctcctccaccacttttgtcggcatctacgatggccatggtggcccggagactgctcatttcatcgcacaacatttcttccccaatctaaagaaatttgctacggaacagcaaactgtttcagttgatgtcattcgcaaatcctatgctgccacggaggaagggtttctcaatcttgtaaggaagcaatggctcatcaaaccgcagcttgcctccgttggttcctgctgtttggttggcatcatcaatgaaggagttctttatgtagcaaatactggtgattcccgtgctgttctagggagacttgaaaggggtgttattaaggcggttcagctgtcagccgagcataacgcaagcattgagtctgtaagggaggaattaagacagtttcacccagacgatccacgaatcgtggtcctaaagcacaacgtttggcgtgtcaaaggccttattcaggtttccagaacgttaggcgatgcttacctaaaaagtactgaatttaaccgagagcctcttttggcgagattccggctttcagaacccttccacaaaccaattctttctccagaaccatccatagaagtacataaactgtgtacagaagaccaatttgtgatatttgcctcagatgggctatgggagcacctgaccaatcaggaggctgtggatatagttaactgtgcgccaagaaatggtattgcaagaagactaataaaagcggctctgcgagaggcagcaaaaaaaagagaaatgaggtactcagacttgaaaaagattgatcgcggggtcaggagacactttcacgatgatattactgttgtagtactattcctggactctgctctagttggcaagagattctatggtggcccattactttcactgaggggtggtgatggtgcttcaacgcttacacagaaatgatgaagatcatagaggttttctgagtgaataatccatggtatcttggctggttaaagggtggagcatattaattttgattctataatatgtacggatagacttgtacctttgcatgagctcaggaatgcaaatattgatcatattactcctatgcggttggcgaaacctgggagctgcataacttcagcatctccctccgcctctcaagtctccgttgtactatgtgctagagagggctttggagagtttgaagctggaggtagccctgtgcaatgagagccggacttgtttgctttcagctttggactttgaatgtatgtccatcttcaccgcggcagaagaaagatccattccatctcgttcattcagtattttcgttctgcggtagtacatatatttatataacagagaacacatgcaagtgagaatcacaattttgattgcagcatcgaattgaactgccctatttgtaaagcgttcctttggcaagtctttggattttgagagcaaattagtgatcgtcatccatcagtttgtcactatgtaaagagttgcagcgatgtgagcaaaatatccaatttatagaatttgttagttacttgctctgcccatttttataggaccattttgatttcaaaaggtcgaaatttgaagattttgaccaactagttagtccatgcatattacggtgcaaaagttagtaaccttcgtcccaaaaagagtacaatgaacatggactagtattggtttt

SEQ ID NO: 25130 - DNA, 2211 bp, Oryza sativa
  ref <308>: DATABASE ACCESSION NUMBER: AK100572
  ref <309>: DATABASE ENTRY DATE: 2002-08-28
gagccgaggcgaccaacccaagggtaggcctaggcgtaaaccctgcacctgaatcgatcgccggcgatggccacgacgctgacgccgacgcagcgctacgcggcgggggcgctgctggcgctcgcgctccgccaggcccagatccaccagtccgtcctcctcggcgcccaccaccaccacgacgacgacgacgaggaacaggggcgcaccagcaccagcagcggcggcggcggcggcagctcctcctcctcctccaactccggcgccggcgccgacgccgacctctggacacacgactcccacggcctcctccgccccgtcttcaggttcctggagatcgatcccaaggcgtggtcggggctggaggagacggcggcgtcgtccgaggccaagcatcacatcggcgcgtttctaaggataatattcgaagaagatggcgaaagctcctcagacagatccgttcaggagcttgccttggcaaaaggagttgatgtgatggtaatgagtttgggcaatgacagtgaagtgggtaacacaattaaaggtggggatcaagatgctttgcctagcagctctggaacagataaatccccaggggaaagctctcatgatgaccagttaggaatcaataaattgaccttagatgatattcctgctaacaatcaccggaagatggcattgctgtttgctcttctctcggcttgtgttgctgataaacctgtatcacaagaggaagaggacagaaaatcaacccgcttcagaaagggttatgatgctcggcatcgtgttgctcttcggctgctatctacatggcttgatgtgaagtggatcaaaatggaagcaattgaggttatggttgcatgctctgccatggcagcagcgaaagaacaagaacaatcacaagaaagcgcatcacccaaaagtaaatgggaaaaatggaagcgtggaggaataattggtgcagctgctttgactggaggagcactgttggctattactgggggtttagctgctccagcaattgctgcagggtttggtgctcttgctccaaccctgggcacacttgtccctgttataggagctagcggatttgctgctatggctaccgctgcaggatctgttgctggctctgtggcagttgctgcatcatttggagctgctggagctggcttgacggggagcaaaatggccagaagaattgggagcgtgaaagaatttgagttcaaacctattggtgaaaaccataatcagggtcggcttgcagttggcatcttaatttccggatttgcttttgatgaggatgacttttgtagaccttgggaaggatggcaggataacctagagaggtacatccttcaatgggagtctaagcatataattgcagtgagtacagcaatacaggattggctgacatcaagacttgctatggaattgatgaagcaaggtgcaatgagaaccgtattaagtggtcttcttgcagcatttgcatggccagctacactgcttgcggctacagactttattgatagtaaatggtctgttgctattgacagatcagataaggcaggaaaaatgcttgctgaagtgcttctcaagggattgcaaggaaataggcctgtgactctcattgggttttcactaggtgcacgtgttatatttaagtgtttacaggaacttgctttatcgagtgataatgagggacttgttgagagggtggttcttcttggtgctccagtttctgtgaaaggcgagcggtgggaggctgcaaggaagatggttgctggaagatttgtgaatgtgtactccacagatgactggattcttggtgttacttttcgtgcgagtctgctaacacaagggttggctggcatccaggccattgatgtccctggtgttgaaaatgtcgatgttacggagcttgtcgatggccattcgtcttacctgtcggcagcacaacagatactggagcatcttgaactaaatacctactatccggtttttgttcccctgagcgcagccaacgaagaaacagatggaacagttgcacagtaacgtgtgggcaggattcgatgaaaatcgtatgtagacaaccaaatgtaacagactatatatacaaccaaatgtaacagactaactcgttcaaactgtaaaccagtctcagcctgaggcgaatgtgtctggttggtgaggcttgctgtttctggccgtgcc

SEQ ID NO: 25131 - DNA, 2919 bp, Oryza sativa
  ref <308>: DATABASE ACCESSION NUMBER: AK100573
  ref <309>: DATABASE ENTRY DATE: 2002-08-28
tttgtcaggctatgtgcaaaatctagggaagctgtttcatctcctgttgagcatttgacacttcattatcaggttcggcaccttgatacatctgaaaagagtgaattgcataagctacagcaactcaaagatgaacaaggtgaattgtcaagcagtgatgagaaaaagtacaaggcattaaaacgagctactgagagagagatattacaaagtgctgatgtgatttgttgcacttgtgttggtgctggagaccctcgtttagcaaacttccgattccgtcaagttcttattgatgaatctacacaggcaacagagcctgaatgtctcattccattggtgcttggtgtaaagcaggttgttcttgttggagatcattgtcaactgggcccagtcatcatgtgcaaaaaggcagctcgtgcaggattagcacaatcgctctttgaacggcttgttatccttggagtcaagcctttcaggctacaggtacaatataggatgcacccttgtctttcagacttcccgtccaactgcttctatgaaggcacactgcaaaatggagtaactgtaaacgagagacagacacctgggattgattttccttggcctgttccaaatcggcctatgttcttctacgtgcagatgggacaagaagagatcagtgccagtgggacttcatacctcaatagaactgaagctgcaaatgttgaaaggattgtaactacatttttaaggagtggtgttgtaccaagccagattggagttatcacaccttatgaaggacaaagggcatatattgtgaattatatgtcaaggaatggctctcttcgccaacaactatacaaagaaattgaggtagcaagtgttgattccttccagggaagagaaaaagattacataatcctgtcttgtgttagaagcaatgagcaccagggtattgggtttcttaatgatccacgcaggttaaatgtcgcattaactcgtgctcggtacggtatagttattcttgggaaccctaaagttctaagcaagcagccactctggaatagtttattgacacattataaggagcatgagtgtttggtagaaggacctttgaacaacttaaagcagagtatggtgcaatttcaaaagccaaaaaagatctacaatgatcgacgactcttcctgggtggcggtcaaggtgttatgcaaggagctagttttggtgctgcaggcacaaacccagtggcagataagagaagtggtagggggaaagggcattcctttgttccatttggcccaccaaatggggctcataaacctggtgtgcacccatctggctatcctttacctcgtatgcctttccctccatttgctggggctcattctcaaccctatgctattccaacccggggatcattgcacggaccgattggagctgttccacctgtgcctcaacctggaaacagaaactttggacctcgtggaaatactggtggccctattggtgggcaccttgctcaccaacagagttctcagcaagctatgggaggcatggggtcagcttttaactttcctggcctggagaatccgagcagtcagccttctggtggaggtccaatgtcccagactggattgatgacacagatgcctgtccaaggtctcagtcaaacattccgcgatgggttttccattggtgggatgtctcaggacttctttggagatgatttcaagagccaaggatctcatgtggcatacaacattgctgatttttccactcaggcttctcaaggaggctatggtgttgactactctcaaggaccccaatctggatatcctgggaattatttgaaccaaaatgcacacccagggtattcccatatgggtgcagcaaatgacattgtctctcaggatcacatggcccatggttcacatggaatgtttacacaagcgggatacaatgactcttcacaagatgagtcatcacagatgcattttggaatggctggtcctggtcttcagtctcagcccatgatgaacccgctctactctcagtcatatgctcattacaacacccaaccgcagtctctccaacctcctccccagtgatcaggaaagcttgtgatataattgctgaagccgcattaagttttggaagtttgatgggttgtatccttggcccacagcagcttggttgtgcctttctgcactgtaatgcagaaacgatggtgcatagacatcagttgcaagtattgggcacaagcatatgttggagcactacatggatatttattgaggcaagctttgtacaagatggctatggctgtcgaccattgaccattgctgaggagcacaaggattgcaacacatctctttcttgtcatggtagttcacagtggggcttgacaacaagaggtggcaacttgtgcactgagagatgctgacgacgctacccacatcgcttcacctgtatagaagacaaaatggagcttatagtggtacgatgtcaatacttcaggattggctggcgccgtgaagtctaaggtgcagccgctatcgcctgcctccatggtaccacgaaaacgcttgcagattggctttgtataggggtatagatggggggtggccagccctttcagaactctcgcacatggccattatatttatctgaacattatgtatgctttctttatagtttttgatatttaggttcacagaaatgatgtttggtgatcttgcctgaaagaacgaatgctagagcttgtagtcattgatggagatcgcgtgattttcttttttggatcagctgtcattttatggagctggctggatgctggtaaacccgtgatgggttttctgcgtggttgattccacaaccgtgagagcaaatgttctgtcacatgttttgataatactatatttggcctgtgttctgctgcg

SEQ ID NO: 25132 - DNA, 2965 bp, Oryza sativa
  ref <308>: DATABASE ACCESSION NUMBER: AK100574
  ref <309>: DATABASE ENTRY DATE: 2002-08-28
gtatcaaggtccaaaatacttatattttgggacggagggggtacattaacttattggcattctatgcaggtggatgtttgataatgacatcgaaggaatggttccaggatttattgcgaactttgccaatcttacagatttgagaatgtatgggatgaaacttcaaggacctattccagaaaatttctctaaattgatcaatatagaaaatctcatgattggtgaccttgataccgagggctatccttttaatttcacaggagattgggtaaatctttcaacgttatctctgaggaattgtggattcacggggaagtttcctaaccaaattctgaagaatctgaacaaattaacatacgtagatttgagatcaaacaacttgtcaggatcaattgaccttcagcagtacgatagtagcctaaagtacctgtaagttggattcttcgtgaaatatgatttgttaaataagaaaattaatttcggatgagatgcttgcgttagggaacttggtagtgcttgcaagttcaagttaaaacccattgtacatgttgaccaggtcgctcaacagcttttctttacatgtatcttgggatatgacctttcagtcagtaatgacatagacaagcgacatctttaaactatcatgttgtctttaaactattaaggatggatggcgaaattaatgtatctttgctgtccgagtttcctcattgctatccttgccaaaaaggaaagtcttcgttttctagagaccttgcttggttgcatttgtgccagggtttgcctgtctactcgtctggcttggaatatctacttcaatatctgatttatcatcactaactatgtaattttaatgtccaaacaatagtaagaggccttcaggggcacgagaagatgacaatactgccaccagggatgaacctgcctcaaagaatatgatgtgtttcacaatgctgtgattaatccgtcatctgaacacgtcacttctgaaattcttgcagtgccatacttttgttcaactgtaggattgtgttctggggaagctattgtttctaattgagagctgaaatcatgctatacttacgaatattttcagtcttccaccagcacttcaggaatttgtaattgaccatgctatacttttcagaatatgaattcccagtatgttgtagagtcagcttctaagctctaattcgtgcgcaaaatttggaaaccttatacattttaaagttttatctaattaccttttctttttaccgaaggttttatctaactatcttgagagctaacatgtttatttcaaattatcagtttgaatctggctaaggctgtgttctttgcctcaagtttgagagacatttttagcgcacgcgaaacgagaaagctcattaacacatgattaattaagtattgataattataaacttaaaaaatggatttatttgaatttttaaaacaacttctatatagattttttttaaaaaaagtatcatttaacagtttgaaaagcgtgctaacggaaaatgaggaagttgaaatttggagttgaagaaaagaactaggcctaaatcaataaactattggtcattggggtgcatatattattatttattcttttccatttttatttttccaagttattgtttaccctgcctttctgatgattttttatttgttagttatgtaggtgaaaacaatttcaatggatctctgcctgatcaaatgcctcaatcactagttgctctggatgtcacatataatcctttgcttaggggaaggcttcctagcagttctgctgatagaaagatgcggataaattatattggaacttcgattggtgcaggaagctcagttggcagtgaaaaccttcgtctcctcaattgtgtcgacatgaaaggatgcaacacaacaggtttaactaatcctgtatcctttgctgtgaactgtgggggcaagcaatatactcctccttcagatccgtcgaatatgttcaatgacgactccgctaaccttggagcagcagactttcatgtggacactaataataattgggtagtcagtcatgtgggcactgatccttttagtaactcttctggtattgtaactaccggcaatggaacaaacatacctgagctctacagaacggcaagaacatcaactggttccttatggtactatgtggttggcttgcctagtgggaaatatacagttcaactcttctttgcagagatagttatagaaagtggatcaggaaggcgtttatttaacatcgacattcaggatcggaatatcatgacagattttgacatttccaaggaagcagggggttccaacagacccattaacagaaattatacagcggatgtcaccacctcagtgttgaaaatacatctctactggaatgggcgaggcacttgctgtattccacgcaatggaacttatggtcctctggtgtcagcaataagagtattcccttccgcggagacgcaagccagcccccctccgtggcgcttacatcaaggcacgatgaaaagcgaagaggagtggttgcaggaattgctgctctttccatagctgctacagtgatatcttcatcagctgtctacctctggtggaaatgggtttcacttgtgaagcatcgaaaggcatgaggtgttcagatgtgcatatacaaagctggttgttttaattttgttccttctgtcttcttagcatgttcatgagcctatgtctgtattgtatgggcattgagctgggtttacatgagctgtacaggaaaaggtactgtgtaacgtcaagaggaaagcaacaatattgatgtacagtttggtttgtggtcatgatttttagcctatagttttgttgctctaccatcatttatagccagggtgtaatctcaagttaatttttttttgaaagttttgtacatgttacttgtatcaatttgtaaagcttttttgcaccc

SEQ ID NO: 25133 - DNA, 2123 bp, Oryza sativa
  ref <308>: DATABASE ACCESSION NUMBER: AK100575
  ref <309>: DATABASE ENTRY DATE: 2002-08-28
gacacatcacacgtttcgcctccctcctccgctcgtcttcttcattctctctccttcgcttcgcttccaaatcgcccgcaatttctcccccaaaaacctcccctccccccaccaccaccattaataaacccctcctcctcctcctcttcttcctcctccgcctcgccatctcaccgccaccgcctcctcactcactcacttcctgccacgtcattcgcgccatcgatcgcgtcgtcgcctcagctgcctgtaagtgagaggaagaggaggagtagagctcgtcgtctccgccgccgcagctggtgctcgctgttgatttatgtcgcctgctctacccccgtttctccatggttctgagctccagtcgccgccaacggtttcttcctgctcccttctcatcctcctccttcaaaattggtatacgaggggcgcaagaacacagcaaaatcccttcacgatctccagatttggatttggggtgaaatactttggctttcttcgtttagactggtgacaattgaagatagcccccaaattgccttaagatttggtttggcttgagtggatcaagtacagaatccgaacttttgcaacctgacattcttctagttcacaaagtcggccagatttgagatttctctcggacatctctgtacacacaggagctctcttttgctccagttttaaacagaagttggacaaaggctctgtttctggttttttgagtttctgcgataagcttagagagcagacaacaaacttttgtcctgattcatctaaactcttacctgactgcaatcaaggccaattgtaatccaataatctctgatcttgttctggttgcacgttgagatgatggtgccctcttcacggaaagtccgtgttttctgctctgatcctgatgccactgactcctctgatgaagatgaccagaataagaaggaaaggagattttcaagggaaatactaattccaatggaaaactccaaggcatccaaacctgttaagacccttgttcaatgtggcacaaagactgtaaaggattccgagaaggaaccgacgagcaaatacaggggtgtgcgccggcgggcgtggggcaaatgggctgcagaaatacgtgaccctgtgcgaaaatcaaggaaatggattggcacatttaacagtgaggaggaggccgctgcggcatatcttgcacaatcaaaccagttccatgaagagttgatggccttgaaaatccaatcttctgtatcagagcaggaagatttgtcaagctctgttactatatcctgcgtgtcctcatctcagtcatgtgaccagaagattcaggcaaagccacaagaacacaagagagtgtcagtggtggttaaccgtgagaccgttgagcagaagtttaaggcacagccacaagctcagaagattaaggcacagccagaagtgcagaagagagtgtcagtgaagattagccatgagactgaggatgagcacttgctgaacttgccgtccacgcctaaaggcaaagagatttcgatgggcgctgttcttggcaggatagatgagattcctgtgagcaactgtgtgggccatattgatgaatttccacctgatgatttcactaggcttgcagatgcgttcccagttagtgattttatcggcatggcagatgtgccactgggcgatgattacattggccttgcagacatcagccacctgccgctgcctatcacagatctgaagttcgacctcaatgcagaactcaactgggacgggttcgactttgcttcattggaacaagaactcaactgtctttgatggcttgaatcctgttctatgtgaaaacctcttgttgattgaattgagtgcaggaggtagattcaggtatccatctttcacattgctggcaggccgagtgtatgatctggagattttcatctccaattttgccggaaaattgtacagtccccctacggcaaacaaatgagtaccgcagtatttatgtatatgttcaccaatctcaaaaatgttaatgagattgtggtgacagaccgtccttgatctcagtttggttgtgtatttgttggacgccattattatatttgttaattttgatattgttcttgtgatcc

SEQ ID NO: 25134 - DNA, 2207 bp, Oryza sativa
  ref <308>: DATABASE ACCESSION NUMBER: AK100576
  ref <309>: DATABASE ENTRY DATE: 2002-08-28
ggaaagccgtaggagaagctgccattggcaagaagctcatcaagaagagagctaatcccgaaaaaaaatctgagagagaggcacaggcgctgagcatttcatcatcttggtgataggaacggaagagctgctcccaatcttggtttgattcgatcagagccattggacctcccaaaatagggtcaaaagaggagaggagagaggagcagaagacgtgcagggcctgccatttttagccgctgctcgtgctcccaatctgaggctgccggtgcttgctttgcttccgcctcctcctcgggttcttgcagcttccgggatcaatcttcccacagaggcggcagcaccggccaaatacggtcgtcttcttgattcttggtgcaacgaatcagctcacccgaggaaagatccgtgcgggttcttgcaatccaaggggtcaaggattagagagtaataaatcagtggttacaatatccttggaggagtaatccatcataagctttttttttttccaagaaaggttaggaagatagaaggaagaaaaccttcgaagcagcagagatttggggatttttagatcgatttttgtgaatattatttgttggcaagtagatttgtggataagaacatgtttggtacccaagtgaggggtgtggtggaagatgatttcaaccctaggaggaggaggacattgtggaacacgccagctgcatccatgcccactaccacccacaccatcaggtacagcacacccaggaagggccatgccaatgctcaccagctgttggccaaattcgaggacctctacggattcatggtggagggcaatgtcgacgacgtcaatgtgctgaacgatgtgagggagaggatgagggagcaagggagggtgtggtgggcgctcgaggccagcaagggcgcaaactggtatctccaaccaaggatctcctccaatggtggcagtgagggggtaatcagcgtcacgtcgctcaagctgtcggtgctcaccaacacgattacactaaggaggctgatcaggaagggtgtgccaccagtgctgaggccgaaggtgtggctgtcagtgtcgggggctgccaagaagcggtcaacggtgcctgagacgtactatgatgagttgatccgggctactgaggggaagaccacgccagccacgctacaaatcgaccatgatctccctcgcacatttccatgtcattcttggctgaacagtgaggaaggtcaggcatctcttcggcgtgtgcttgttggttactcatttcgtgactcagaagttggatattgccagggtttaaattatgtagttgcattgttgttgcttgttatgaagacagaggaagatgcattctggatgcttgctgtactactggaaaatgtacttgtcaatgattgctatactgataatctttctggatgccatgtcgagcagagagttttcaaagacctcctagctaaaaagtgccccaggattgctgctcatcttgaagcaatgggatttgatgtttctcttgttgccacagaatggttcttgtgcctcttctccaagaccttgccttcagagacaaccctccgggtatgggatgttctattcaatgaaggagcaaaagtattgttccatgttgctctggcaattttcaagatgagagaagatgatctactacgtattcaacatattggtgatgtaattgatattttgcagacaactgctcatcatctatacgaccctgatgaactcctcacgttcgcttttgataagattggttcgatgacaacaaacacaatcacaaaggaaaggaaaaagcaagagacggttgtaatggctgagcttgaccaaagaatcagacggttaagttcactcaagatggatggataatgtataagaaagggaaaaatgctctgcagtgttgtagcctttgtaggtttggaaacagtgaaatgggtagtcatttggtacttggcaccagttcagactgcggttcgatgagtgaaatcgtggaagaaccaagaatatgggggagttgcgaaaactgcaatgtgggtttctcatgaacaagtcatattgtgtgtttttgtgtgtgcatcacatcttcatatttgaaagagaattccatgatgccatatgagcagattgtgctaatggtggaaacttgtacaggtttggtgtttgttgaaattcatttggcaacccagcaagg

SEQ ID NO: 25135 - DNA, 2420 bp, Oryza sativa
  ref <308>: DATABASE ACCESSION NUMBER: AK100577
  ref <309>: DATABASE ENTRY DATE: 2002-08-28
ggaattcgataaaacgagcggccgctcgaagcggccactgcacagcgccctctcgcctcctcgcctcgccgccgccgccggcttaaggctctcctccccgcgccgtaccggcgggagtgtggaggtgttgtgctgcggcgtgggtgtgttgggagttggggggtgaagcatgatggatggatccaccgctgcggcggcggagctggaggcggcggagagggtggtgatgaggtgggactccacggcgtcggcgtcctacgggggcgggggcggggacgagcagatgctgttcgatggcggcggtgaccgggtggaggcggagcggttcctccgggctgtggatgacctacggcggctggcgccgccgtccccggccacggtcgggagcccgcgccgcacctcgtcggctagcggcggcggaggggcggcgtccaacgccgtccaggtcgcgatggcgcggctggaggacgagttccgccacgtgctgtcgtcgcgcgccctcgacctggagatcgaggcgctcgccgacctcacctcgctctccatgtgcagcgaacggaccaactccgcggacgtcgccgaggaagcggcggctgcggacgaagacgactccgtgtcgtcctccgtcggccgccgcagcagctaccgctcgctgcgcagcatccgagaaatcgatctcctccccgcggacgccatctccgacctccacgccatcgcctcccgcatagccgtcgccggctacggccgcgagtgcgtccaggtgtacgcctccgtccgcaagccggccgtcgactccgcgctccgccgcctcggcgttgagaagctcagcatcggcgacgtgcagcggctcgagtgggaagtcctcgaggccaagatccgccgctggatccgtgctgcccgcgccgccgtccgcggcgtcttcgccagcgagcgtcgactctgcttcctcatcttccacgaccttcccctctccagctctaccatcaccactgccacccacgacgctcccttcgcggaagccgtcaagggcgccgccctgcagctcttcggcttcgccgaggcgatcagcatcggccgccgctcaccggagaagctgttcaagatcattgacctgcacgacgcgatcgccgatctgttgcctgacgtctccgacatctttgctgcatccaaggccggggaatccatatacgtgcaggctgccgagatcaggtcgcgtctcgctgatgccgtgcgtggtatactgtcggaatttgagaacactgtgcttcgtgacccgtcgaagactccggtgcctggtggtaccatccatcctctcactcgctatgtcatgaattacagtagcctcatttctgactacaaaaccacactgtctgagctgattgtgtcgcggccattggcttgctcccgaattgctcctgagggcaatgagaatgccccatccttccctgatcttgaccttgccgaccctgacagtcagttaccccttgctgctcatcttatctggattattgtggttcttgagcacaatcttgagagcaaagcatcactctacaaggatgcggcactctctcatttgttcgtcatgaacaatgtacactatattgcacacaagataaaggattcaccggagctccgggggcttattggtgatgagtatttgaagcagctgacaggtaagttccggctcgcagccactcgctatcaacggacagcatggttgaagatcctgaattgtctgagagatgaaggtctgcatgtcagtgggggcttttcatcaggggtatccaaatcagcactccgggagcgtttcaagtctttcaatgctgcattcgaggaggcacatagggttcaatctgcttggtatgtgccagacacgcagctgagagaagagcttaggatatcaatagcagagaaacttcttccagcatatcgatccttccttggtcggttccggcatcacatagagaatggaaggcacccagagttgtacatcaaatactcagttgaggaccttgagacgtccgtcacaaatttctttgagggttgtccaccttcgctacataacaggagaagatcccatggatgagaggtggcttgaagactcaaaagatctctattgttgactgatgagtgtggttgcctagtattctacaatgcttcgggaaaagcaagacttaagggtatagttggtgatgatttcttctactagaggtaatctgaaacaggatcaggatcttattgaaactgtcaaattccttagtggttcttccttttatagccaaccttgttcgtttgttacactatcatcatatcttttatgattagattgttcatataggtctgttctttcagaatgtttcgcagttgtaagttgtaacatcatggtgtttgtttgacacttaactgagtgtcttgtcacc

SEQ ID NO: 25136 - DNA, 3594 bp, Oryza sativa
  ref <308>: DATABASE ACCESSION NUMBER: AK100578
  ref <309>: DATABASE ENTRY DATE: 2002-08-28
ggtttccactccatcccatggctccccccaaaccctaaccaccctcgtccgcagatcccccaccaccacaacccccgcccaaaccccccctcccttctccgccgctcgccggcgacgccgccgtcccgcacgcgcccctccctcggcgggaggagggagggacgacagcgccccctccctgaccaccaccaccaccgcacccccccgctccggcgcgaggtgcaaatctcaaaacgttattgaggatatatgaagtagtggatgttgaatgaccttctcaatggatttaaatgcctcaccattgcctgaggaagatgaacagccttatgaacaacaggtcgaggttgattttgcacaggaggagcatgttgagtctgctgttgctacaatgcgaagggagcgtgaagagagacgcaaaaaattaaagagagagcaacaagatgaaggctcaagattacattctcagcagattaggaacgattatgcaccttataacagagctggtagaggtcgaataaaagaggcacctgatggttggatgaattgtccagcatttggtgagccaatagacaaaatcataccttccaaggttcctcttgatgaaacattcaatgacttggtgcctcctgggaaaagatattcttccaaacaagtagttaataaacaaagaaaagctggtcgtgaaataggtttggtgattgatttgacaaatactactcgatattactcacctgcagaatggacaaggcaaggtattaagcatgtcaagattccatgcaagggaagagatgctgtacctgataatgaatctgttaattggtttgtctatgaggtgatgatgtttcttgaccgacagaagcagtcaaagaatcctaaatatattcttgttcactgtacccatggtcataatcgtactggtttcatgattatccattaccttatgcgaacacaagtatcctgcgtcgctgaggcgataaacatatttgcaaaaaggagaccgcctggtatatataagagggactacattgaagcactgtattcattttatcatgaggttcctgagcatatgataacatgcccttcaacaccagaatggaaaaggtcatccgatcttgatttaaatggtgaagccaagcaagatgatgatgatgagaatggtgatcttgcaccagtacatgtaagcattttcagatattcaaatctgaaattacttccaagtaatttggtagagaattaagtgcctgattccttgtaattctcgaaaggtttttcatttatggacataaaggtagagttttgagttcatacgacctactttattatttgattggatttttggactttactttggatgtaatttactatatctcctggctcatattgttttttttaattgtcatgaagcaaacttgcttggaatattcaaagctattttcttgcttttgagcccttgtatcttgcagaatgaggtggaagataaagttatcactaatgatgatgtgctaggagatgctgtaccatatgatcagcaagatgctctgcgtgtcgtatgttatcgcttgctggaaatgccccctgtgagagggcatgcacagtttcctggatcacatcctgtctctcttaacaggtggctaacagtaatctggacttcatgcattgtttgtaatactagtaacttattagtatctgtgttaagtccattatctcttacatgttatctgtgcgttttgatttctgatgttctttggggctttgcagaaagcaaaactgtagaaagtagtttatgaaaaatttaaatctctgcctctaatataaggttggtaggtaaaatttgtgcacttgatgggttggaaatatgcacccaaccccttctcttagaaagctccatttcacatatgaacaacagatttctgattgcagaaagcctttcttttatgtcattaatttcttcagatcttttcatgtaacttgtcccaaatttttttatgtacacatattaaaacttaaatgcgactctttttttatcagttaagccttgaaactatgagatcgcgcctgctatgctgaagaaaattattgttctttcaggggaggaaagaaatgcccggttttgatttagaggtttttttttgtagcgtcctttttctcgtatgaaactattttgtttcaaatggtccttatttagtattcatttgattcccactctaactatgttcttgttctaaattcctttttacgctccgcagtgagaatttgcaactactcagacagcgatactactttgctacatggaaagctgatggaacccgatatatgatgcttataatgagggatggctgtttcttgattgatcggaatttttgcttcagaagagttcaaatgcgctttccccataggaatcttaatgaaggactacatgagatgactttgattgatggagaaatgattatagacacagtaccagattcaggattgaagaggaggtatttagcatatgatctgatggcacttgatgccgtgtcaaaaaccaagttgccattttctgaaagatggaggctgcttgaagatgaaataattcgtccacgttattatgaaaaaaaacagtttgagagtggcgttaagagcaacccaatgtacaaatatgatatggaactattttcggtcaggagaaaggatttttggcttctttctacagtaacgaagctacttaaggagtttattccatcactttcacatgatgctgatggtcttatttttcagggctgggatgatccatatgtaactcgtacccatgaaggtcttctcaagtggaaatacccttcaatgaattctgttgactttttgtttgaggttgggggtgacaatcgtcagcttgttttcctttatgagagaggcaaaaagaaacttatggatggttcccgcatagcatttccaaatgaagatccatcctctatctcagggaggattgtagagtgctcttggaataaggaagagggctgctgggtctgcatgcgtattagatctgataaatcaactccaaatgatatcaacacataccgcaaggtaatgaggagcatcacagataatatcaccgaagagaagcttctagaagagatccatgagatcacgcgcctcccgatgtatgcggataggataaagcaggctcaggcaaagatggcccaacatcgacgaagatgaggatggatgccatcaacatcgtcagtatttggtagtgttagtcttgttgctatagtgctagagcgctgctaccgtctatggcaagcggcgggttcgcgtagattgtgtaaattagtaggggttgttgtaggatcttattataatgatggctggttaagccaactaattctttgtacctctcaagtctcaccaatcccctgtatagtcagtcagtcgtctgcagagtagcccttgtaaatcgtgtattgtgtttctgcattctctcctatggttttattttcatgggtgtagaatagcttttaacaagaggagggagggtttgtgttcaagtatgcccagtagcattattgtcttcctgtgctctagagtaataaatggcgcgtgaactgtgttggc

SEQ ID NO: 25137 - DNA, 3079 bp, Oryza sativa
  ref <308>: DATABASE ACCESSION NUMBER: AK100579
  ref <309>: DATABASE ENTRY DATE: 2002-08-28
gatagcggcgcggcgagagagagagactatttttgggcgtaatccagcgcggccgtccgcccgagatctccctctcccaccgcgcgtttcgccgccggaatccgcgccgcagagagcggggggtataaagaggtgagacggtggtctcccggattcggtgggtggtgggtcccgctgctgtgtgcgtgtgcgtgccgagggagggagggaggcctcgtcgccgccgatggagtcgtcggccggcggcggcggcggcgagtctccgcctccggcgaagcccgtgctgctccacggggacctcgacctgtgggtggtcgaggcgcgcctgctcccaaacatggacatgttctccgagcacgtacggcggtgcttcgccgcctgcaagccgcccacctcctgcgccaccgccaggcagccgcgccacgcccgcggccaccaccgccggaagatcatcaccagcgacccctacgtcacgctctccgtcgccggcgccgtggtggcgcgcacccgcgtcatccccaacgaccaggaccccgtctgggacgagcgcttcgccgtgcccctcgcccactacgccgccgcgctcgagttccacgtcaaggacaacgacacgttcggcgcgcagctcatcggcaccgtcaccatccccgccgacagggtcgcctcgtgccaggaggtggaggactggttccccatcatcggcaacaacggcaggccgtacaagcccgacacggcgctccgcctccgcctccgcttcaaccccgcggccgacaacccgctctaccgccgcggcatccccggcgaccccgaccaccaggggatcaaggactcctacttcccgctccgccacggcggccgcgtcacgctgtaccaggacgcccactacagggaaggggacctgccggagatcgagctcgacgaggggggcaaggtgttcgaccacaacgcgtgctgggaggacatctgccacgccatcctcgaggcgcaccacatgatatacatcgtcggctggtcggtgtacgacaaggtgcgcctcgtccgggagccgtcgccgtcgaggccgctgccggaaggcggcgacctcaatctcggggagctgctcaagttcaagtcgcaggagggcgtgagggtgtgcctgctcgtgtgggacgacaagacgtcgcacgacaagttgttcatcaaaacgggtggagtgatggcgacacatgatgaagaaactagaaaattcttcaagcattcctcagtcatttgtgttctttcacctcggtatgccagcagtaagctgagcattttcaaacaacaggttgttgggactttgtttacccatcatcaaaaatgcgtgctggttgatacacaagcttggggaaacaagcggaagattactgcttttatcggtggcctggatctttgtgatgggcgttatgatacacccgaacataggctttttaaggatcttgacacagtattcgataatgattatcataaccctacatttccgtcaggtgcaaagggggggcctagacaaccatggcatgaccttcactgtaggattgatggtccagctgcgtatgatgtcttgaaaaattttgagcaacgctggagaaaggcaacgaaatggcgtgaacgatttagaaaagtgtctcattggaaagatgatgccctgataaagttggaacgtatctcatggatacttagcccttcgcctactattccaaatgatgatattagtttgcgggtttcaaaagaagaagatcctgaaaattggcatgttcaggtattccggtcaatagactctggttcgcttaaagggtttcctagtgattgcaaagaagcttcaaagcagaatcttatttgccggaaggacctgataattgataagagcatccacactgcttatgtccgggcaatcagatccgcccagcatttcatttatattgaaaatcaatatttccttgggtcatcatatgcttggccgtcctatgttaattcaggtgctgacaatctggtacctattgaattggccctcaaaattgcaagcaagattagggctggtgaacggtttgcagtttatgtagtcataccgatgtggcctgaaggagtccctacagcagcttctgtacaagaaattcttttctttcagacaatggagatgatgtatcgtataattgcacaagagctcaaggccatgaatattaagaatgcacaccctcaagattacttgaacttctattgtctgggcaatcgagaagaatcatcatcatcaaatggcagccctgaatctaacgataaaagtgcagcggccttggctagaaaataccggcgttttatgatctatgttcatgcaaaggggatgattgtagatgatgaatatgttattctggggtcagcaaacatcaaccaaagatctttggctggttccagagatactgaaattgccatgggcgcataccagcctcaccacacatggtctacaaaggggggtcatcctcgcggtcaggtatacgggtatagaacttccctctgggcagagcatcttgggatggttgatgacctcttcaaggatccatcaagtttggagtgtgtaaattatgtcaatgaaatagcagaagagaactggagaaggttcaccgcagaacaacttataacgttacaagggcacctcctcaaatacccagtcaaggtagaggctgacggtaaggttggtccattgccagaacacgaatgctttcctgacgttggtggcaagattcttggagctccaacttcactccctgatacgctaacaatgtaacacggttcaagcaaaatattgacatgttttccagaattgaagcccttttttgttcatattttaaactttgtgattgcttgaagatggtatcggagaggaatttgtatcatgtctgtataatcatccagagagggggtatagggagagctcaagctgctaatggtgtctgtaaagtttgtggctatgtgagaaatttttcagccgttgtaaatgaaacacacgacagtacgatagactacagtgttgtctcatttccattgcaatcatacacgcacaactgttttaatt

SEQ ID NO: 25138 - DNA, 2210 bp, Oryza sativa
  ref <308>: DATABASE ACCESSION NUMBER: AK100580
  ref <309>: DATABASE ENTRY DATE: 2002-08-28
ccctttttccccttctcccctccttcctcgctaaggttcccttgcttcagcagaacccctgctgggcatcctcctctttcaaaacatcctttgctctccaaccacttcatcttgatgttcttaatctcctatagtctttccctgtgcgaattttttctttgagaaccaaagtttcttagggaaattctgttgaatttttcctttgagaaccaaggtttctcggggagactctgctaaaatttttatcaactagcaagttgaaaatacatcattgtacatatattttgtctgcacatttatatacagtagcaaaacctgtttgtagagggaattattatagtgtttctggctggttgatccatgatagattaaacaaggggaggttgtgacttggtagatgtcaccaatcctctccgaggtcatcctctccggatttatgatcagctcgacgctccggcgaggctctcatcttgtcctctctttctccgtcgtcttcctttactggttctatgtcttctcagtaacatcctagctactgttctcttttatttgatctatccaataccagagaatagaccaccatattctacaaaatacttctcattggaaattatagcttatagacaaaactgagggtgacaatactgtaaggtattttcctgagtgttgcactaaggagggtactcaggacttttattaggatgaccctgtcaggtgggaccctgtcaagcgggataacctctggctcaagccatgggacccggagctcagggtcagagggtgatatccagctgcaggtccaaatggacctgaagcggaaaagaaggaaggaatcaaaccgagagtcggcaaagaggtctaggttacggaaacaacagcacctcgatgaccttacctcacaggtatgtttgaattccttttttttccctatctatatacatatatatataatatggttgcatttgttatgtagattttaatatgtttgtagttcctagctttaattagtttgctttatggattgaagcttgcactcatgtgcaggtgaatttgatacacaaaagcaaaatcagatgaaaaaggacacttgagctgaaggacttgctcaaggaaactccaataatgcacacggtgcccttttttcaaggggccccaactaattgcttcgtacataatacttgaaaaacattaaactcgctatcacttccaaagaaaaaggtgataggcaactagttaccaacaattgctcccaactgtcaaatctggaaataagagcaagctcatcgaaatttcttgatgccgatcaagaccggatcaagcttatgttttgctccggaaatgtgaaggcaaatttctatgaactgtcagatatcgcaagaaaccttcatccagaatttcattcatttttccagattaatcgtaccaacaatagtaggaaaagatttcagaatgttgcttgaacaaattagcaaaataatacataccagtgtaacataaataaatagcacaattcaccagatgcacatggtagatagtaattacttgcacaatctaaaatctgttctgttcatcacagcttccttcagcaaatccaaaaaaaaaatgtttatgttaaaaaggaatgttatcttgattatataaaataggtgaaccagttgaagatggagaaccagcagctcaccacaacattgaacatggtcacccaaagctgtgccttcgcagagtctcagaactcagtgctgcgcactcagatgatggagctggatagcaggctatcagcgctccgtgagataatcttctacatgaacaatggaaaccaatcaccttctaatcctacaatagcagcgactacatacccatccaccactacaatgactgcagcaactactggccattacgattattatgatgttttcactgcaaatgcatggggctcagggatgcaaatgatgcagcagcccatagatcagtttctgtaccagtgctagctagcttctagccaggaagtcgatagagatagtggaccaaattaagaaacagggcattgagatattgggcgtggtgaatgttgtagctaggtccatattaattatattgtgtcaccagtggttgtttatcttttgctttgatttgtgatcggttgtgggggcaggaaaaaaatggtgttgtacctttctgctgttggtggtaagaggccaaatggctattgg

SEQ ID NO: 25139 - DNA, 618 bp, Oryza sativa
  ref <308>: DATABASE ACCESSION NUMBER: AK100581
  ref <309>: DATABASE ENTRY DATE: 2002-08-28
tcctctctctctgtaaacatctgcctctttcctctttcctcccctccccttcccttcccggcgacgccttcgagaggatggacggcgagacgctctcctgggcggagccggagtgcggcgacgagttcgcgcttttcttcctcgacaaggccgcctgcaccaccgtctccggcgccatctccacggtgacggcctcgcggacaggctcgccgggctgcgcgtggcgaggcaggagggtgcccccgccggaggtgacatcgccggccggcttgctgcgctcagcataggccggaggcgacgatgagcagcggctgcgcgacgacgggagcggcggcgacggcgaatgctggcggaggcggagcggcggctgcggcgacgcggctgttggcgacggcgacgacgacgacgacgggagcggcggcgcgacgacggcgacgacgaccatggagagtgtcagtgagagcttcgatggcatgaacaaggccagtgccatcgcccactgtttaatgatcagtgaaccacgtgatttctatctataatttcagtttttttagaattttccgttgtaatttgcgaaaatgaagggaccattaattatgccgatttgctgctgcatcc

SEQ ID NO: 25140 - DNA, 2598 bp, Oryza sativa
  ref <308>: DATABASE ACCESSION NUMBER: AK100582
  ref <309>: DATABASE ENTRY DATE: 2002-08-28
gatgggtcgcgacccaacccacgcattccgcccccggctccgatctgctaagccccctcggatcgggttgcgggtcccctcctcccccccgacccaccaccgctcgccgccggccgcctccgacgagtgggcgatcatatttagatacaagatagcatgctggagccaacagctatggaagtgccgattactagctcagtgaacactgcagtggtgcctgtgcctgtggtgcacaatccacgggcacggaaattgcggtctgcagtttggcaggacttcactaaggaacggcgtgctgatggaagctgtgttgctgtctgtaaccactgtaagaagcagctcacagctactagccggtcaggcaccacacacctacgcaaccacctcgcaatctgcaccaccacctccacgcgtcgtgctggtaagcgccggaagcttattgtgcgccgtattctccacaacaaaacctccactgatggacagtctggtgacggacatgcttcgggagaggaccatgacaacgatggcacgcattttgaccaagaactcagtcggcgagatcttgcccatatgattgtccagcatgggtaccggttttcaatagtggatgatgtgggcttccaaaagtttgtcaagaacctccagccacggtttaggatggtgtcatatgaaacagtgagggctgatagcatgacaatttatgaaagcgagaagctgaagctgcaggatgctctgctcaagatcccttgccgacttagtatctcagttgatatgtggcgatcgaatacacagatggacttcttgtgtttgacctgtcactatattgaccatgccaatgatgagtggaaagttaggaaaaaaattctgaactttgtgcatgtggaggcaccttttacagatgatcagattgctagtctcattctagagaagttgcgtgagtggggtattgacaggaagctagctgccattgtactggacaactgcgcctctggtgagattgttgctagagagcttctcgtagttctgcagcctaggagactcctcctattaaatgggaatttgttccaggtgcgctcttgtgcgcacattcttaacctcacagtccaagaaagcttagaacagacatctgatataattactagagtccgtgagatgattcagaatgtcaagttctcacaagaaaggttcgaaaagtttcaggatactgcaaaactgttgcagatggaccaaaaactgctagttcttgattctcctaataactggccgtctacatacttaatgtttgattctgcatgttactatcatgatgttctcatgcgccttgcagaacaggaagcacattatggtgcttttctcactgcgaaggagtgggccgatgtgaaagccctcactgaaatacttgatgcgctctatcataagatggagaagtttcctgtggaaaatccgactgcaaatctctattttaatgacatgtgtgaggtgcatgttcttttgaatacctggcgtaatagtccatctcctgttgttgcacaagtggctgaccgaatgctgacaaaatttgaggggtactgggatcttactagaccagtaatggcattcgcatctattctggatcctcgatataagatgaagtctgttgagtacttctgtagactcatttatgccgctgatcaatttagagcaaagacaacaatagatgacattcggcagagttttaccaatttgtgcagtgaatatgaacagtcaggaaattcattcaagaatccatctgctctcttctactctgcaaccagtaattcttgcatgagttcggtatacagcaatggtgatgattttaagaccttctcccgtatcacattatctgatgctcgaaggggacttgatcaatatatacaggagacgtcatcaggccaatcctttaagtctgacttagacatgtaccttgaggaaccggtctatcgccaaaaggaagggcatttagataattttgacatcctgggatggtggaagtcctttgcagcaaagtatcctgtcctttctcaaatggctcgtgatattttagctgtccctgtatctatcatcccattggacagtgatgctcggacattaaatgagtatctcagtaccatggacccttcaacagtgcagggattggtatgtgcgcaagattggttgcgggaagatacagaagttgctagttcagacggtcatgcagatgacaaagcggcacgtggtgatgaacttatcgtgttaccaaaatagttgagacttctgattgatggctcctgagtcctgaggagaccaaggaggcgaggacgcaagtaactgcattatttatgttcaacagtccaatttccaggcttccagctacacccctgtaaatgtatcgttctagttctagatctgtttgtacaatgaagtcgtaggtacctccaagaagatagtatcaatttaggcaattgactctgcattaatgacttaatgtgtattatgctgctaagctaagttatctccatcgtagctaagttatctccatcgtatttcttaagaatatgcagttatgcaggcaacactcctgaagtggataactttgaatcc

SEQ ID NO: 25141 - DNA, 2107 bp, Oryza sativa
  ref <308>: DATABASE ACCESSION NUMBER: AK100583
  ref <309>: DATABASE ENTRY DATE: 2002-08-28
ggtctgctagctctcatctcctgctctgggacacaccattgcaggccagagcaatgaagattaggtttgtccttctagatccggtctcttccccctcgctcctgtcactggatcgggagttggtcgtcgcggggctggggttgagaggaggggtgggggagggggcgggctggttgttgtagagatacggggggtgtcaccaatagcgccaagaaggttgaggggatggaggagatgtggcggtagcggccggcggtgatgaagaggtggcggatttcctccctgcacgcgtatctctgtcctctgagtacaaatttgtggtggcttcctttgccttctcctacagcgaccaccaccctcctcctcatttctcccacctcgagtgcgtcgctgctgtcacccatccagagcgatgatccaaccccgaggcctagacttttgtatggatacaatgtattatgtcgaaccacaacctttgtacagcgctgaggtaggcctgctgtgcggtgcttcgcgttgtgaatcgaggtgtagcttacgcgatggtggcggtcgtgagatgacattttattttcctcggtggatctgaatttttgggagtggattggaagttgattatatgttttaactgctggaaataggtaagctctacggactcttaagctactataagttgtttagataaccataacaaatacatgtttcagtacaatatatataaacaaaatatggtagtcaattatctatttctgatacattgaagcatgtctctgacaatttggggcatactgctctcacattcattctcttggtacgtcaacagctctactaaaaaatgcttccttagctcgtattcatcttgtacatgcatttatttatgcaagtgatcaaggttaccactgtatgtgtaaaaaaataatagcatttaaatgataaattctagtgtcatgatactttgcctttgtaattggtaactgcaattcttcatcattccatttgcacatgaagagggacacaagataaccagatagttcgctaagaagattgaattgttaattaattttgtgttaggaaataaaataactggtgctgcgcataccgctccctatctctttgtctttttcatacattgggatccaagagtggggatggtgatgcagacagtgtggcaccaacattaaacatgtgggatggagccggtaatcataaaaagaattatgtactccctctgggttgataatacttgtcgtttggacaagggcacggtctcaaaaaaacaaatttgaccattattttttattataatatgtataaaagtgttaacaaatatatgattttattaaagtactttttaagactaatctatacatgtagtcattatatttaaaagacaaatattttaaaaatgattcataatcaaagattctaaagtttgacttcacccttgtctaaaacgacaagtattatcagccaggagggagtagatgatttcgtacttccatctcaatattataaacatagtccatcttaaattccatcttttttttcatgattgagttagtctttagcactgaatcattaacattgttttgagcactgaaaataacttattttgctgcagcctagttgttaaagacatgtgcaccactgatgatttccgtacttccatctcaatattataaacataaagtccatcttcttaaattccatcttttttttcacgattgagtcagtctttgttgggagtttatgcagggtgcttagaatatttggtactatcctttagaatcattacacaaatgcaacagactattttctgtctttgctgatgattgctaatgcagctcgaacttatgggagtaaaaaagccctgagaatactttgcgtatgcatcttgtttgatcgggcatttttctttgatgcaacttgagtttatgtttgttgatgactgtcgttgatggagctgctcctgccaaggtggcctttttggcgatggagtagaactgtctgaatttttttatcacaccacaagaacggattttgtttgtggtaccattttttgtatatataaaacatattttggttgtatatatatagaataggatgg

SEQ ID NO: 25142 - DNA, 2111 bp, Oryza sativa
  ref <308>: DATABASE ACCESSION NUMBER: AK100584
  ref <309>: DATABASE ENTRY DATE: 2002-08-28
ggctcccatcaaacgcgccacgcgcggcgcgcgagcagaatgcgcgacccgacgagctctcacgccacgccatcccaatccgatccattccccgtgaaaatctatcgcttccagcgaatccaatccgttcctctcgccaggagagctctcgcttttcgccgccgacggcgacggcaacggcaacgaggaggtgaaaccgtaaagacggtcagagacggcgcgcgcaatgaaggccgccgccgccaccggcggcggcggcaaggagaccctcgcggccaccctcctccgctacctcatcatcttgattgttccgttcaccgtcctctacatcctgtacaccctccacgccattctctcctccacgccgtcctgcccacttgatcgccccatcgtcacctcctccgtttctctgtcccaactctccaccacccgcaaccacacgccgtcgtcgtcctccttgtctacgccgccacccgccccggtgtcgatggcggcgacgactctgcagcacgtggtgttcggcatcgcggcgtccgctcggctgtgggagaagcggaaggattatatcaagatctggtggcgccctaacgccggaatgcgcgggttcgtgtggatggatcagccggtgcgggagtccggcgtgccagacgggctgccaccaatcaagatctcgtcgaacacctccggcttcccttacaagaaccgccgcggccaccgctccgccatccgcatctcccgcattgtctccgagacgttccgcctcggcctctccggcgtgcgctggtacgtcatgggcgacgacgacaccgtcttcctgccagacaacctcgtcgcggtcctccagaagctggatcaccggcagccgtactacattggctacccttccgagagccacctgcagaacatcttcttctcgtacgggatggcgttcggcggcggcgggttcgccatcagccagccgctggcggcgaggctggagcggatgcaggacgcctgcatccaccggtacccgtcgctgtacgggagcgacgaccggatccacgcgtgcatggcggagctgggcgtgccgctcacgaggcacccggggttccaccagtacgacgtgtacggcgacctcctcggcctcctcgccgcccacccggtggcgccgctcgtgtcgctgcaccacctcgacgtggtgcggccgctcttccccaacgcgcggtcgcggccggcggctttgcggaggctgttcgaagggccggtggcgctggactcggcgggggccgtgcagcagtcgatatgctacgacgcgcgcaaccggtggacggtgtccgtgtcgtgggggttcgtggtgatggcgtcgaggggcatgatctcggcgcgggagatggagctgccggcgcggacatttttgaactggtacaagcgcgcggactacaaggcgcacgccttcaacacgaggcccctggcgcgccgcccctgcgagaaaccgtcgttctactacctctcgtcggcgcgccgcacggtggcgcgcgacggggagaccaccgtgacgacgtaccagcggtggcgccaccgcaatgacatgcgcccgccgtgccggtggaagatcgccgacccggacgcgctgctcgacaccgtggtcgtgctcaagaaacctgaccccggcttatgggaccggtctccaatgcgaaattgctgcagggtgctgtcgtctcccaaaggacaggaaggaaacaagacgatgaccatagacgtgggtgtatgcaaggattgggaattcagccaagtataatccattaggcggacagaacacagaagtgcataggtgattcatctttcatctccttttcttgtatccatgtaacagtaggatgacaaagggtcacttccttaaataggaaaggcatatggcacatgtgatcaaaacattagagtatgggacatgagaactctatttacagtcccatatacccataccaaactagaaaaagagtaaccactttaacctcttctcgcagtaaaatggagagggatagaacagaactgtaatgtgctcgcaagttcaagattcgtattgcttgacaatgctggcagctttcaaaagaatatcttgttccactgttgtc

SEQ ID NO: 25143 - DNA, 2977 bp, Oryza sativa
  ref <308>: DATABASE ACCESSION NUMBER: AK100585
  ref <309>: DATABASE ENTRY DATE: 2002-08-28
ggagagagagagagagaggggggagcggtcgcaggaggaggaggacggcggcgtctgctgcgaccgacggggagcggcgaggatgagcgcgtccaggttcataaagtgcgtcaccgtcggggacggcgccgtcggcaagacctgcatgctcatctcctacacctccaacaccttccccactgattatgttccgacggtgtttgacaacttcagtgccaacgtcgtggttgatggtaacaccgtcaacctcgggctatgggacactgcaggtcaggaggattacaacagactgagaccactgagttatcgtggagctgatgttttccttctggccttctcgctaatcagcaaggccagctatgagaatgtttcaaagaagtggatacctgagctgaagcattatgcacctggtgtgcctatcatccttgtgggaacaaagcttgatcttcgagatgacaagcagttttttgtggaccatcctggtgttgttcctatcaccactgctcagggagaggaactaagaaagcaaataggcgccccatactacatcgaatgcagctcaaagacccaactaaacgtcaagggcgttttcgatgcggcaataaaggtggtgctgcagccacccaaggcgaagaagaagaaaaaggcgcaaaggggggcgtgctccattttgtgatctaatcatcagtagacgacgaagaagaagaacgatgaagttgccaggctttattattgttgcgtcttgcttcagcgaaacagcattcatggtccggggatcctagtttactggcagctgcagcaaggcctctttgtcgaggcaatgagcgatccgtttgtttcattttctcctttctgccttgtgattatctcgtgtgactgacaagtcgtggcaattaggtaactttcctagatggtatttcctgtgtttgagaaaaaaattcttgttatccctgtttcataagtagacatgatgtaatcgcactcagtttattcttttccttcttatttcacttcaatggaaaattatgtttccccttcaaaaaaaaaaaaaaaaaaaaaatcagatcctccatcccgcggcggccgtgagcaccaacactcacgcattccttcctactccgcgagatctccggattcgtttcggtgttttgcgagtcgcgcccggagaagaggagaggaaatccggtcaatcgcggcgtcggcgtgccgtcgcttggggtggtgttggtggttctgaattttgattgcttcgtgcttttcgtttgggggagggcagtggtcgccatgggattggggaacgaggcgagctcgtcgtcgtcgcggctgctggatccggcgcctctgctgccgcaccacggtggagatggcgccgggaagctgtcgtcgcagcccaagaccttcgcgaacgtcttcatcgcggtggtcggcgccggcgtgctggggctgccgtacacgttctcgcggaccgggtgggcggcggggtccatcctcctgctctccgtcgcggcgctcaccttctactgcatgatgctgctcgtcgcctgccgccgccgcctcgccgacgagcacccgaagatcgcctcctttggggacttgggggacgccgtgttccgcggtccggggcgcctcgccgtggacaccatgctggtgctcagccaggccagcttctgcgtcgggtacctcatcttcatctcgaacaccatggcgcacctttaccccgtcttcgcgccctcctccaacgcgctcctctccccaaaggcgctcttcatctgggccatgctgccgttccagctcgggctcaactccatcaagacgctgacgctcctcgcgccgctcagcatcttcgccgatgtggttgacctcggcgccatgggcgtcgttctcggggaggacgtgtccgtctggctcgccaaaccaccacccgtcttcgccttcggcggcctgagcgcgatcctgtacggcatcggcgtgtccgtgtacgccttcgagggaatcggcatggtccttccgcttgaggcggaggccgccaacaagaagaagttcgggaccacgctcgggctatccatggggttcatcgccgtcatgtacggcctgttcggcgccatggggtacatcgctttcggcgacgccacgcgcgacatcatcaccaccaacctcgggaccgggtggctctcggccgccgtgcagctcgggctgtgcatcaacctcttcttcaccatgccggtgatgatgcaccccgtgtacgaggtcgccaagcggctgctccacggcaaacgctactgctggtggctgcggtggctgctcgtcctggccgtcggcctctcggccatgtacgtgcccaacttcaccgacttcctggcgctcgtcgggagcagcgtctgcgtcctgctcggcttcgtgctgccggcctcgttccacctcaaggtgttcggcgccgagatgtcctggtccggggtgctcagcgacgtcctgctcgtcctgctcggcctctcgctcgccgtcttcggcacctacacgtccctgctgcagatcttccattcctccagcgcttaatctctggagaatctttacggatagctgcgccgatgattgatttgctcatttgcttcgcgcgcgggtgtcagcctgtcaggtacgctggttgcattcttcgtgtacagagaaggtgatcggtcgatcagaggggcaatgcccaattcagcttgctgttgatttgggcatggacagcgtgcatcggccgcattctttcgattacaagtcagatggtttgtacaagttagcgtggatggcatggagaaatctgtatggttttgcaacgacagattcccatagctactcgtgtcagttaatatttatgtgtatgtcttggatgtttcagctgctgcattgcacggtggaatcgatgaaaggacatagtaagtttcagtctaagtttaagcctatttagttgataaataaagtgtctagttgaggttgc

SEQ ID NO: 25144 - DNA, 1404 bp, Oryza sativa
  ref <308>: DATABASE ACCESSION NUMBER: AK100586
  ref <309>: DATABASE ENTRY DATE: 2002-08-28
ggggtgcgtcttttcgcttctccttttctgcccatcttttccttcactgtctcctcgatagaaacgaagccgcgagccgcacagtgtagcgagccattcgtcgccatggtcgtccccatcgccaacctctcggccgtcgtcgccggcgcggcgcacgcggccaaggccttcgccgtggagatgctcccggcggccgtgacaagggaggccgtgggtgcctcaatggcgtggctgctgcgccacctctgggcctggctcgtcgccgcgagaggcgtggccgtggagaatctccccgtcgccgccgcggtggccaagggagcggcggggtccgcgatggaagcctccgcgccatggctgcaagtggcggcggagttcttgcacggcctatatgggtggatgctcgcggccgtcgccgtcgccgtcgagagccttcccggcgtggccaagagcacggtggaagcctcgcagccatggctggcagcggcggcggagctcctgcaggtgatttacgggtggctggttgcggcgattgcggtcgccgtcgagaatctccccggcgtggcgaagaacacggtggagtacacggtagaagcctcgcagccgtggctggcagtggcggcgaagctcctttggggactctacgggtggctggtcgcggtgagcgctgtggctgtcgagatgctcccggacgcggccaagaacgcggcggggtcggcggccgaggcgtcgcagccgtggctggcaatggcgtcgaagctcctgcaggcgcacgacctctgcggacggctggtcacggccggagacaaggtcgtcgagaatctcccggaagccgccgccgccgccatgggaggaggagcgcattgctcggcggatgccacgcccatgcctgcgcatggccacggcggcgtcgcggtgtatgcgctcctggcgatcgcgctcctcgccgtggcgttcctcggcggcgccgtgtgcgccctcacctgccggacgatgaagggcccagggctcggcggtgcgcgcgtcccccgcgccgtgttcagggccagcccgaggcgctactacgccgccgtccggacggcgcggaaggctcgccgcagcgcctcggggatcaggtggaagaacctggtcgccgccatgtcgctcgccgtcgctgcttgcattgtctatctgggtgccaagatgttgcactgaagcagcttgaaaccttagttcagagatgaccaaatcttatggagaattttgctgctgctactagttaagtgttaagtagttaatagttcagaatcggcgagccgtttagatgcagtatggtgctaataatggtacaatgttaattaagctgctcctgtgatgttcactgtgttggaactaatggtgaagctaatgaaactgttgattttgctc

SEQ ID NO: 25145 - DNA, 2862 bp, Oryza sativa
  ref <308>: DATABASE ACCESSION NUMBER: AK100587
  ref <309>: DATABASE ENTRY DATE: 2002-08-28
gtcctcggttccttcctcctcacacttcaccaaaaccccaaccaaaccaattttccgcagccgcaatggccggcaccgaagagctcctggtccaagaatccaccgtcccgatcgtctccgacggcgacccttcccgccccgccgtccgatcggcccacttcctcctcccccgcgcggccgccggtggccggcccccgcccctgccctcctccccgctctgcagtggcggccccgttcctgaccaccacggcctcctccgggtggtggagttcaagggctgggctggctcccctggcctgtggaggcagtgggtcgacaggctccgcccgcgccacgagcccctgtggcggagtgttggcatcttggatgccattctcgccacggcttaccgggtacgccgcgacgagggcacgctgctccagctcgccgcgttctggtccgcagacaccaacacgttcatgttcccgtggggcgaggccacggtgacgctggaggacatgaccgtgctcgccggcctgccgctctttggcaagcccgtgcgggcgcgcctgccggacgctcttgtcggggacgtggacgcgctcatggccgttcggagcgccctgcaccggagcaagtacaagaagccctcctatcctgggtgggtgcagtactttcttaagcgccaggaggaggaggacgacgagacggccgccagcgccggcgccgacctgatcgagcacggggcgtttctggccatgtggctgtcgctcttcgtcttcgcggcaccgccgttcgacgtggttgggcctcaggtgttccccatcgccgccctgctagcgcggggcatccgcgtggcgctcgcgcccgccgcgctcgccggcatctacggcgacctctccgcgctcaagcgcttcttggacttgcgcgacagggaggaggaggcgctccaggtgacggcgccgatgcacattctccacctctgggtctgggagcgcttccctcagctccgccctgccatggcgaccaccaccatccctgcaaccactgatgcttgccgtgtgccaatggctgctcggtggcacggcgtccacaaggcgctggacccccagtttgttcatggcgtgttcatgtcaccggacaagtttgagtggaggccatacgggagtcgcagcattgctctgccacccaaggaagctaaggctggcacttgggttgtccaggatgtaatgacaagtaatacgctgttatcctttacgcgatgtttgcgccaatgtgagctcgtcggcatgggctgcattgagcaatacatccgcatcgtgttgcaaggcagtttggctttgatcaggatgtgcctgggacgattgctcgcgctaactcaaactggaaggtggcatggagaacatatacgtttggctatcgaaagtttgcattggttgttccacactataagcttggggtgacactggagtatgcgcgatggtgggagccatattcgttggcttgctctactgatgtttctaactatgcaaacacaagagaaccccattccctttttattccaatgaaaagaaacactgaagagctttctggggctaattcttgcaaaaagcagcatgttgacaccagtgtgcctttacctggtaccatggaggatccactggatgagattcctctgattgagaggctaaacaatataattatggtacaatgtgctaggcaagagcaaatcgcagacgttgtgaagtattctgtcccagagttcatcagagggaaggataacagtatgattgtgcaacaagatgctgagcaatacttatctgattcaatgagagtcttggatagttcagctgatgaatcattttgtgggtcagtcaccaaaatggaacaacacatatctctcctacaaagtaaacagaaagcacaagaccatgccagtgcctatgaggcaaacaatttcaactctggacaagtaatgatacatcatggcgttgagagtgcagctagtactggcagtaatgaagccattgaagctgcaacaacagctggcatgctgccaacacctgaagacattctagtgacaagtgatgaagttatgatggaacgcaattgtggttatgagcttgatgctgtcctgctgggtgctgctccccaacagcaatcaactgaagatatgggaacatgcatgtttgcattagagagagataatagagccaagacagacaaggatgaattagcatctttgaaaggtactgaaaaagaaaatgaagatgattcaacatcaaatcaagcaacagcaggttctcttatagaagattgcatagaaatcagcagaaagaactcaggaaacaatggcatttcttctgatattcttgtaaatgcaagtactgaattggtcaggacaaaagtttctacaaaaacgctgtactatcttactaaaatttggttgctgaaaaatgctcatgaaagagatgcaagtgacatgaatagagatcatggagtttaccagccaaggagggaagttgggacgagggaaatgattgagaaatcgtttgcagctcgagaagcccaaaaggttgagttggaaagagtaatcaaacatctgaaggaacaattgagggataggaacccttcaaaacttgatgtataacttcagtgatggtcgtacttttgaactcctgatattatttgtacagttataataggctgtagcagtcttgctagtgaaaatgggatcataattaaatagcctgtggaaggccagtaatgaagaaactgcagctagcactcagtagtcagtcccagtaatatatttctttcctttctaatttttttagcaagacatgactgaacactatggataatggatccattttaattacc

SEQ ID NO: 25146 - DNA, 916 bp, Oryza sativa
  ref <308>: DATABASE ACCESSION NUMBER: AK100588
  ref <309>: DATABASE ENTRY DATE: 2002-08-28
ggtctgctggtgctgctcctctccctcgacaagttcctcctccactacctcaagaagcgctggctctccccgaggatctcgacttccccgtccaaatcgcggcgatccatggcggcggcggcggcgggcggcggtggcgccaagtggagcgagacggccatgctcgtcatcgacatgcagaaggatttcgttgacccggcgatgcggagcccgatgctggtggatggcggccaggcggtggtccccaccgtcgccgaggcggtcgccgtcgcgagggagcgcggcatctacgtcgtctgggtggtcagagagcatgacccttctggagcagatgttgaaatttttcggagacgctattattctggtgggaagggcccaacagtgaaaggtttgaaaggtgctgatctagctgatgggcttgttatcaaagaaggggaatacaagttggtgaagacaaggttcagtgctttctttgcgacaccccttgattctgtcctcaaaacctcaggaataaagaaattggttatcgttggggttcaaacaccaaattgcatccggcagacagtctttgatgctgtagcattggactatgagaaagtgacagtcattattgatgcaacagctgctgctaggccagagatccatctgtcaaatataagagatatgaagaatatcggagtggaaacaccaaccttggaagaatggcgacgataaaattgctgtttctagtgatatactacatgctcaactccaaagtattggagacatccctgttcctttccatctcagtgggtgtaattatattaaccttatgtcaggtagaccaacagcagatactgtttatatatatatatatattcaactgtacaactcctaaccattcctatataaaattgatcatattgggattactgct

SEQ ID NO: 25147 - DNA, 2063 bp, Oryza sativa
  ref <308>: DATABASE ACCESSION NUMBER: AK100589
  ref <309>: DATABASE ENTRY DATE: 2002-08-28
tagccgcaccgcacgctttcttgcataagaactcccccccctcctcgctccccgccgccgccgccgttttcttggagaggagaaatccgtaggctcagaggatttttggtagtcttgtttcgtgatattcgtgaagagggggggagctaaggggggattcgtaagatcagaattggatcacgcgggggcgcgctcgggatcgggggttccaaacacagcttcttcgttgaatttaagtggatgtactaatggagtcaaagggtggcaaaaagaagtctagcagtagtcgttccttgatgtatgaagctccccttggctacagcattgaggacgttcgacctgccggaggcgtgaagaagttccagtctgctgcttactccaactgcgcgaagaagccatcctgatagccctttcggcttctccatcctagtagtttaggatttcttgcaattccattttggcacttttcttctgacctatttctctggctgctgcttcctgataatcgaccagttctctagtcttgctccctgcactcctccctcctccatctccggcacagtgttctgaccaacctgctccaatgggtgtcttgtctgctgctgaccctcccccagtctcagcaattgggtttgagggctatgagaagcgccttgagatcactttctctgaggcacctgtctttgctgaccctgatggtcggggtttgcgcgccctctccagggcccagattgactctgttctggatcttgcacggtgcaccattgtgtccgagctgtccaacaaggactttgactcctatgtcctctctgagtccagcctgtttatctattctgataagattgtgattaagacctgtgggactacaaagctcctgctcacaattccaaggattcttgagcttgctgaagggctttctatgccacttgctgctgtgaagtactcccgcgggatgttcatcttccccagtgcacagcctgctccccacaggagcttctctgaggaagttgctgtcctcaaccgctactttggccatctgaaatctggtggtaatgcttatgtgattggagatccagcaaagcctggccagaagtggcatatctactatgctactcagcacccggagcaacctatggttacccttgaaatgtgcatgaccggactggacaaggagaaagcttcagtctttttcaagacttctgctgatggtcacacatcatgtgctaaggaaatgacaaaactctcgggcatctctgacattatcccagagatggagatctgtgactttgacttcgaaccctgcggctactccatgaatgcaatccatggctcagcgttttctaccattcatgtgacccctgaggatggcttcagctacgccagttatgaggtcgtgggcttcgacgcctctactcttgcttatggcgacctggtgaagagggtcctcaggtgctttggcccttcggagttctctgttgctgttaccatctttggtgggcatggtcatgctggaacatgggcaaaggagctcaatgctgatgcttacaaatgcaacaacatggtagagcaggagctgccctgtggtggcctcctcatctaccagagcttcgacgctactgaagacgtacctgttgctgttgggtcgcccaaatctgttctgcactgcttcgaggctgagaatatggtgaaccctgctcctgttaaggaaggtaaactgggcaatcttctcccctggggagaggatgcgttggaggagaatgatggagtgtttgatgagtaagatgggacttctggtgacgattcgctgctttgttttcattccgtggcatttttatctgttgaggttgtcgtttggttattctgtgaagcagccagccaggctattagtattttcgcttgtaagcatgtgttctgatcttgggacgtatgcttggtctaaataataatggtgaactaaaagctctaggtggtcagctgcgtctgccacaatgagcatgcgtcgggagaaatgttgtcaaaacatatgaataagtatttgcgggaaatttcctttgccttctgct

SEQ ID NO: 25148 - DNA, 3219 bp, Oryza sativa
  ref <308>: DATABASE ACCESSION NUMBER: AK100590
  ref <309>: DATABASE ENTRY DATE: 2002-08-28
gagacgttagagacatgctctgaactcaaacacccaattcttatccctccagtccctctaaccaaggcgactcgtgtccgccaaggcacacggcagttgccccaaactaacgatgccgtagcccgtagccgcctccacagtgaacagttcacaccctagcgaccacgggcggagccggccaaatgcaagctcttccaccgcgcgcatctgcagcacaaccatagtcgccgcgcaccgcccaggctctaccaccgtcaaatcgacggccataaaagaaaggcggaacaaaagagggacaggatctggatgagagcaattccttattagcaattccatatctatatgagcacttggcagttggcaagttacaaggatcctcttttcccttcttgctggaaaaaacgatccaaaagtccaaatcaaccagccaaagtttgcaggatttccagtttgatcaagcaacggagtgacaagagaatggcagagactgcaattcttctagccataaagaagataagtatagctgtggcaggagaaatgttaagcctgtcaagacccattattgcaaaaaaatctgaactagtcgtagcacttccgactaacatggaattggtgaaggatgaacttgagattataaatgcatttctcaagaaagttaaaactcgggattgccgtgataatgtcttggaaacttggataacccaagtcaggaggttggcatatgacattgaagatattgtggatcagttcatatatgttgttggtgaacaccagggtaagggattctggggtaatttaaagaaatttgtcaagaaaccagagtctttgttttcattggatagggttgctactgaggttgaaaaggtaaaactgaagctcaaggaactgtcaagtaggagagaccgctgggtacaatcaacgatttgcagacccgatgctgagataccaaactatgacgatgaacaaggagtgtaccaattcaggcatagccaagtaccagattatgacgacaatgagcttgtaggtgttgatgaatacagagaaaccctcacaaagctattgtactctgaacattgttctctgcgcattgttgctgtttgtggtatgggtggcttgggcaaaagttgtgttgtttacaatgtcttcaagagagagcggtctcattttgattgctcttcatggatttctgtatcacagtcatgcaaaatgggtgatatcttcagaaatatgttgaatcaactacttggcgacagcagcgaagtaaactacgacacatcaaggatgggcattgaggtattgaaagaagagttgaagagatttctggaggacaagagttacataattgcattagatgatatatggagagctccagttcttttggaaattagagataccctttttaatagtggcaagggaagtagattaatcattacaactagaatcgatgaagtagctgcaattgctgaagatgcctgcaagatcaaccttgagcctctaagcaagtatgatgcatggattttattttgcagaaaggtattctggaaaacagaaaatcatgcttgctccccggaattgcagaagtggggtgaaaagatagtcaataaatgtgaaggtttgccattagctattgttgcattggggagcttactatcactaagagataaaacagaggcagtttggaaatgtttccatagccaaataatttgggagttgcagaacaatccagacataagtcatgtggagtggatcttgaatttaagttacaggcatctgccaaatcatttgcagaactgtttcttatactgtgcgatgttcccggaagatcatctccttcggaggaagaagctgatcagattgtggatcgcagaaggatttgttgaacaaagaggatcaatcagcttagaggaggttgctgaaagttatctcatagaactcgtccatcggagcatgcttcaagtggtagagaggaacagttttggcaggattcgacgtttccggatgcatgatcttgtacgtgaactagccattaaaatgtccgaaaaagagagtttcagttcacttcatgatgatacttctggagttgtacaggtagtgtcagattctcgtcgtgtgtcgctgatccgatgcaagagtgaaatcacatcaaacctagcttcatcgaggcttcacacttttttggtttttgacacaaccatgcttcaatgttcatggtcttgttttgttccacccaaatctaaatatcttgcagtgctggacttgtcaggcttgcccattgaggctatcagcaattcgattggggaattgttcaatcttaaatatttgtgcctcaatgatactaacctgaagtcactcccaaaaactatcaccagacttcacaatttagggaccttaagtcttgaaaggactcaggtaacaagttttccagaggggtttgcaaaattgaagaaactgaggcatgtacttgtctggaaattactgtacaatgagcactcaagtttcagtaactccttgggtatgggaacaattgaaggtctttggaatttgaaggaattgcttactttggatgaaattcgggcaaataaaaaatttgtcagtaggctagggtatttggcccaactaaggagcctttacatttcggacgtaaggagtaactattgctcagaattgtgttcttcactataaaaaatgcaacacctcttgagattacatgtgaaagcaagcaatcaagatgaattgctcaggctggaatctttgcaattgccccctgaactccaaacacttcagttgacagggaagttgacaggaggagtgctgaaatctccattattgttctcagctaatgtaaattcccttgtcagactgagtttatgctggtgcgatcttacagaagacccaatcccatatctctccaagctatcaaatttaacaagtttaaatcttcggagaacaccggtgcaggggtcccacatgttggcaaagcttgtgcggtggtggagcatcggtgcgccagccgtgcctttgttggtctagtggcggtcggccacgcttagcggcggccgatccggtactagccttctcctgggcgtgtgtgttggcgatgtcgtcgtgtgggtggtggtatttttttcttttcctggttacgactctccagggttataatcttatactttttttcctgctctatcaatagaacttcgcaccgtctcgtgcgagtcgttc

SEQ ID NO: 25149 - DNA, 2213 bp, Oryza sativa
  ref <308>: DATABASE ACCESSION NUMBER: AK100591
  ref <309>: DATABASE ENTRY DATE: 2002-08-28
gaccaccgcctccgccgaccccgatccccatccatcccgccagcgaccgagcagggtcgccgtcgttcgccgtcgtcctgctgcttccgccgcatccatcccggtgagcagtcacatcctccgccaccgccgcctgcgccgatccccatccatccctccagcgagcagggcgggcgccgtcgttcctcctgctgcttccgcccgcatccatcctggtcactgtgaaaatggaaggaaatgctagaggcggtgggcattctgaggcactgaagaactacaatctaggaagaactttaggtattggttcatttggaaaagtgaagattgcagagcataagcttacagggcacagagttgctataaagatcctgaaccgtcgccaaatgagaaatatggaaatggaggagaaagcaaagagagaaatcaagatattgaggttgttcattcatccccatatcattcgcctttatgaggtcatatacactcctacggatatatatgttgtgatggagtactgcaagtttggagaactgtttgattacattgttgagaaaggcaggttgcaggaagatgaggctcgccgaatcttccagcagattatatctggggttgaatactgccacagaaacatggtggttcatcgtgatctgaagccagaaaacttgctactggattcaaagtataacgtaaagcttgctgactttggtttgagtaatgtcatgcatgatggccattttttaaagacaagctgcgggagtccgaattatgctgctccagaggtgatctctggtaaattatatgctggacccgaggttgatgtatggagctgtggagtgatcctttatgctctcctttgtggtactcttccatttgatgacgagaatatccccaacctattcaaaaagataaagggtggtatatatactctcccaagtcatttatctgctctggccagggatttgatcccaaggatgcttgttgttgatccaatgaagagaatcacaattcgtgaaattcgagagcatcaatggtttcagattcgccttcctcgttacttagcagtgcctccaccagacacagcacagcaagccaaaatgattgatgaagatacccttcaagacgttgtaaacttgggttatgaaaaggaccatgtgtgtgaatctctgcgcaatagactgcaaaatgaggcaactgttgcatattatttgctattggacaatcgattccgagctaccagtggctatctgggagcagactatcaagaatcattggagaggaatcttaatcgctttgcttcatcagaatcagcaagttcaaatacaaggcattatctcccaggaagcagtgatcctcatgccagtggtttgcgcccacattatcctgttgaaagaaaatgggctcttggacttcagtctcgagctcagcctcgcgagataatgattgaggtcctaaaggcacttgaagacttaaatgtctgctggaagaagaatggacagtacaacatgaagtgcagatggagcgttgggtatcctcaggccactgatatgttagatgtcaaccacagctttgttgatgactcaattataatggataatggcgatgtaaacgggaggttacctgctgtgatcaagtttgaaatccagctttacaagagcagagacgagaagtatctgctggatatgcagagagttacggggcctcagctccttttcctggacttctgtgcagccttccttaccaaactgagggttctatagtaccccgtgttggcttcagtgaataaccaaacctagggttttatcatgtgcggtttttcactgcaataatgaataaaggacaccatgtaaataggcagctgtgactttcttcccggcccttagatagagaaggttgttgtttgagtgactagtgttatgttgagcaccaaaatgttggttgttacaggcttacatagtatatagatcttgataagctatctgggtgggcgaatgcttgatatctaattttttgcaggctgcagctatactgctggtgatgctgcagtacaagcttttctttttgctcctgcacacggttattatgcgtgtgcatggaaattttgctactgctagaaagaagctaggtaagaatatcagccccttgctgccgggttgtggtataaatgtagatgacagcaaatttagtgaaatatcaacaaatgtagtcgtatgatc

SEQ ID NO: 25150 - DNA, 2255 bp, Oryza sativa
  ref <308>: DATABASE ACCESSION NUMBER: AK100592
  ref <309>: DATABASE ENTRY DATE: 2002-08-28
gtaagagcgtgcgggcttcttctcctagcatgagttgagcctcttaataattttctccgaaaaggcgtgctttaatttcctctgagattgagctcagcagtacatctccaggtttttcttctgccagcagccatgggttcaggactcttcaagcctcgtgttcatccggacctccgtgatgttttctctaagatgtctttctttgacaagattggctttctattcattcatgcatttgacaagagaaacctgtggcacaaggtgcctgttccgatcggtttgctctacctgaacacccgccggaccctgctcgaaaaatacaacctgctagctgttgggaggagttctcacggtgctctgtttgatcccaaggagttcctgtaccgcaccgaggatggcaagtacaacgacccccataatgctgaggctggtagccaaaacaccttttttgggagaaacatggagccggttgatcaacaggatgagttgatgagcccagatccatttgttgtggcgacaaagctgttagccaggagagaatacaaggacacagggaaacagttcaatatactagcagctgcatggatacagttcatggttcatgactggatggatcatatggaggataccggacagattggaatcacagctccaaaagaagtggccaatgagtgcccactcaaatcgttcaagttccaccccacaaaagaactgcctacgaattctgatggaataaagattggtcactacaatatccgcacagcttggtgggatgggagtgcagtatatggtaataatgaggaaagggcagaaaagctcaggacttatgttgatggaaaactagtgatcggagatgacggtcttcttttgcataaggagaacggtgtggcattatccggcgacattcgcaacagttgggctggtgtttcgatcttacaagctctttttgttaaggaacacaatgcagtttgtgatgcaataaaggaagaacatcccaacctatcagacgaagaattatatcggtatgccaaattggtcacttctgctgttattgcaaaggttcacactattgattggactgtcgagcttctcaagacaaaaaccatgagagctgcaatgcgcgcaaattggtatggattattgggtaagaaaataaaagacacatttggtcacataggaggaccgatattaggtgggcttgtgggactgaagaagccgaacaaccatggcgtaccttattctttgactgaagagtttaccagtgtttacagaatgcactccctaataccaagcactctcaagctcagggatccgacagggcaacccgatgcaaataattccccaccatgcctgggagacatcgatattggagagatgattggtctcaagggggaagaacagctatcaaaaatagggtttgaaaaacaagcattatcaatgggatatcaagcttgtggtgcacttgaactatggaactatccaagtttcttcaggaacctcattccacaaaatttggatggtaccaatcgatctgacagaatcgaccttgctgccctagaagtataccgagacagggagagaagtgtaccaaggtacaatgagttcaggaggagactatttctgattccaataaaaagctgggaggatctgacaagtgacaaggatgcaattgaaaccataagagcaatatacggagatgatgtagagaaattggatcttcttgttggtcttatggcagagaaaaaaatcaagggatttgccataagcgaaacagcattcaacattttcattttaatggcatcaaggaggctcgaagcagatcgattttttacaagcaatttcaatgaggaaacatacaccaagaaggggatgcaatgggtcaaaacaacagaaggcctacgagatgtgatcaaccggcactaccctgaaatcactgccaagtggatgaagtcctctagtgctttctctgtgtgggatgcagactactagtgcaaaaattaaaggccccctgccatattatttggcgagttctatgaaatattatttgtttacagaattatggtgtttgttcagtgtaaatatagttaaatatgtcagtgtaatatatgtaataggattcatcgcacgacacaagttgtatgctcatttgtttacaatttattgcacattattatttgttcattgtaattaaatatggctgggaaaataagtaggaggagaccatataacatcttcctacaatcttctgtttgatt

SEQ ID NO: 25151 - DNA, 2095 bp, Oryza sativa
  ref <308>: DATABASE ACCESSION NUMBER: AK100593
  ref <309>: DATABASE ENTRY DATE: 2002-08-28
ggattgggcaatcatccaatacatatcttggcttcttggctggactccagtaaccgaggtcgcgtgcctccgctcgctcgctcgctcatcgtcgtcgtcttcctcggggcctctctcgtcgtggagcggaggcgtgccgcgtagcaggggtgagcccatgtgggtggattgatttggggggatttcgtgctgttttggtggaagagctctcttctgtacggtttcttggttgcgctctcgcaccaagaacatctcctttttccttcttgctcctctctctctctctctctctctctctctctctctctctctctctctctctctctctctctctctctctctctctctctgggtctcggactctcggctcttgattcttggttcttggtgagtgtaggcgagaataaggcgggttcttggtgggtttataagggaattcaactgaggtgagaaatgggggcaaaggactccaagccctcatacagctattcttcttcatatgatcatgggaattcatcatcgggatataactcgagataccctgcataccctgcaaatgcatcttccagtcagaacacaaggtatgctccttctatggagaactatgtgcagccagaaacgcatgccaggttgcagaggaagtactcgaggattggtgatgactaccgctctctgaatcaagtgactgaagctttggcacaagcaggtcttgaatcatcaaatcttattgtaggcattgattttacaaagagcaatgaatggacaggtaaactttccttcaatcgccgatgtctgcatgatattggaaacactccaaatccatatgagcaagcaatatctattattggaaggacactttcagcttttgatgaagataatttgattccttgctttggatttggtgacgcatcaactcatgatcaggaggtattcagcttttatccagagaaccgcccatgcaacggatttgaagaggcattagaaagatacagagaaattgttccgactcttcgattagctggaccaacatcttttgccccgatgattgaaacagcaattggtattgtagacagcactggtggtcagtatcatgttcttctgataatagccgatggacaggttactcgaagtgttgatacacagtctgggcagttaagcccgcaggagcgtgatacgattgatgctatagtaaaagctagccagttccccttgtctattgttcttgttggggtgggtgatggaccatgggacatgatgcatcagtttgatgacaatatacctgctcgctcatttgacaatttccagtttgtgaatttcacggacatcatgtcaaagagcatagcagctgacaggaaggaggcagaatttgcactatccgccttgatggaaatcccaacacaatacaaggcaacacttgatctccaacttctaggccgtcgccaaagaatacagccaagaattcctctgccgccacctatgaggaatgcttattcgaggtctactagctttgaccaacattctggtgtttattcacgatctagtagcttcggcccacaaacaagtggctttcagcaatctgaaagcttcaaacagagacagcctgtggctaccactgcacctgacacttatacctcggaaagttctttagaaggaagacttttgtgcgctatctgtatggataaatcaaaggatcttgcatttggatgtggacatcagacctgttatgaatgcgggaagaatttggtgcgctgccctatgtgccagcagcatataaccacaaggatcaggctgtactgagaaaacaaaaatggatatcctgaagtttctgaagcctgcagaaacagaatctccaacatcagaagaaactcctgtgcaaaatttatgaaccagcctaaattgtactgttctttcgtcttgtaattggtggtttactattattattgcagtgagaaatgtttaggcagatagtgatccatataaaaagctaaggcacacactgtagtattaactacagtagttatgtgaagaagaggtacactaaataatgtacagtaattagcttctctattatacattctcctttctttcccttggt

SEQ ID NO: 25152 - DNA, 2699 bp, Oryza sativa
  ref <308>: DATABASE ACCESSION NUMBER: AK100594
  ref <309>: DATABASE ENTRY DATE: 2002-08-28
ggtggccggcctcgactctgtactggtcacccatgccgaagtgcgccatgagcagccacacgacggtgagcagctcgccgccctggctgagctgcttggcgtggaagttgcccctgcacttgccggcggcgtagcacagcatctccacccacacgccggccaccagccgccaccgcttccgccgctccagccgccgcagctgctccgccagcctgcacgcgtcgaacagcaccgacttgctccggtcccccttcacctcccgcgggttgatctccgtcttcaccttcgtcagcgcctccgccgccttcctcgctgccccgagctcgtccccccggaggaagaagttcttggtctccgcgcacgtgtccccgaaccggatctgcccgatgctcgccgtcagcatgaacggccgcatcaccagcaggaacagcatgtagttggagatctccctgctcgccgccggcaggtgcgacacgtcgttcaggtggctgtcgtccgccgtgggggcgtggtcggagcaggagcagaagcagcaagatgaccaccgcttcagcttcctctcgccggcgtcgcggccgtcgtcgtcgtcgtcgtcgtagaagcagaggtcggtggcgatgtgccagaggatgatgctctcgtcgaactccacctcgacgctggccccgagctcctggtagcaccccatccggtggaggaaccactggccgcggtggtcgccgaaccgccggtagctcatcgggtccgccgtgctgttggccttctccttgagctgcttgaagacgagctgcttgagcaccatggagacgccgatgtggtgggtgtaccagatactgtcccagatcgtcttcacgcggacattgtagtcccactcgagcttctcgagcgctccggtgagccatgtcggcttgtccttgaggcagtagtggatgaggttgtactgcgccatctggttcgaccaccgcggcctcgcctccggcaagaagtagctcaccgcccggaacaccccgctcgccacggggaggcacttgtccttcttccgcaggtcggcgaagctccatggcgagatggccatgaggaggatggcgtagatctccaagaagatggcgccgccgaggagcacgtaggagacggtgacgtcaaccggcttgtagggagccttgtcggtgccggagaagacgatgagggagaggacgggcgcggcgagggtgaagatgcggaggtagcggccggtcgggccatggatgacggaggatttggagtggagcgactcgtacatgagcaggagctcgatctcgaccaccttatacgcctgatctcgctggaggcggcggaagaaggcgaggctgtcggttcggtcctggaagctaaggatgaggtcgacgaagaggcggcggaaggtgtggaagaaccggtgcgccttgacgacgagctcgccgtactccatgtgctcatcctggacatggatgttgtcgtcgggggggcgctccgggacgatgacgatctcggcgtgcaggccggcctccttgctggagtggtactcctccatgaacttggcgtagttcgggccagggtcggggcgcgtcagcatggagctccggaggctgctcatgctcgccgacttgagcgcccatgtccgctcgccgtacttgacgacgccggagacgaacatgaggatggccgggacgaggaggcccgcggcggaggggcgcgacttccagtagacgtagagggcgagggcgatctgggagacgaggctgaggaggtggcggagccagagctcgttgtcctcgatggcgaatgcggtgatggtgtcctgcccgccgaggtggaggatgaggaagggcgcccagaagacgaggaggtgcatgtcgccgccgccgtgggggccgttgctgcagagcttctggttctgggagaggttgccgagggcgtagatggcgatggagtcggcgaggaggtaggcgagccagagcatgaaatggagccaggcggcgacgttgcgcttgcggaggccgccggtgaagaggaggaagacctgcagcgagaggctgctcagcagaagcacccggatctcccactccccccacagccgccgcaggcccgccatctggccgcctcttctctcgtcgtcggcggcggcagctgctgctctgctctgcccggagtcggaggcggaggcggaggcggagcttgactccagtggaggcaggtcgccgttgactcgttgacaagtcgtcggctcgtcgtcgccactcgccatggatgcggtgatcagatgggcccgatcagacgcgagcgccagtttgtacggcccactatgaaatgggccaacacatggatgtgatttcccactctcacctccccatctgctgcccgacccatgcagtggcaacgcaccgcagcggaacggatattgcggttggaaaaaagtacaatttggctcccttcaatataggtttgggctgtgtaaagttccaccggcaaaaaaaaaaaaaaaaaaaaaaacattgctacgtcatatcagatatatggacacacatttgaagtattaaacgtagattaataacaaaacaaattacataatccgtatgtaaactgcgagatgaatttattaagcctaattaatcagtcattagcaaatgtttactgtagcaccacattgtcagatcatgacataattaagcttaaaagattcg

SEQ ID NO: 25153 - DNA, 2556 bp, Oryza sativa
  ref <308>: DATABASE ACCESSION NUMBER: AK100595
  ref <309>: DATABASE ENTRY DATE: 2002-08-28
aggtggcggctggcggtgcgcttcggcttccgccgcttgcgagttggtggctcgccccctctcgctctcaactctctctctcccccgaaattccgaatccgatcgagacgaatagggagagagagaggcgccgcggatccgggtgaatgcttcagtgattaatctggccggcacaagatgtcattgcacattgggcggctcagttcacatgtgcgtcaaagatatcttgaacatcttttccagaggtttggaaattgcacagtgaggctgaaagatggatatggatttgcggtctttgattctaatgatgatgcagctcgagccatgcgggcactgcaggggaaatttgtttgtggggagcgcattactgttaattggtcaaaacagcagcccagattttctaaggatttcagaagttcaagaaacattgagtcatctcaccagagggcacccagagtcagagatggtaatattaggttcagggattctttagctcagaagaatcaccctgcaagtcatgatcagggtcacagtcctgatgttgcaccagaacagaaatcatctgatggtgcattggaaaagaaatctgatgaaaagaaatctgatggtgatgttgaggatttgaaggatgtgagggaaactgttggtcaagatccagtggagatgaagaggaatgaagatgttacaagtgatgcaaatgtaattgaacatgatagatgggaggaaactggaaaagggaatcctggtagagatgatgatgattttgaccgttatgaaccttatcatggctatgccaggcaagaagaaagagcagaggttgtcaaagcaagttctcaggagacttatcatcatagattttcttcacagaagtcgaaagagtatcctgctggccatactgctcatgattgcccccagaaaacagatggaggattcgaagcatggagagatgcattgagtaggcaagaaaggctgagaagatttgggtctccctcaaggaggcaaccagatactcgtgattgctctaagaaaacagatgacagattcgaagcatggagagatgcattgagtaggcaagaaaaaggtatggtgaggctgaaaagatttgggtctccctcgaggaagcggacagaagaatttcgtgttgataaggtggtagaaacacatcgtatggtacaagatggcaggaaacaattttctgataggactagccacgctcacagattgagtaatgtttctagggaggacaaaaggcatacccgttgcagtgaaagtataccacagacccccaaggagtcacgcaagagaagcagatctaaaagatcccgtgggtcatccctctcttctgacaggagtacctcacattcaacatctaaatgttctcgttcaagagcacattccccatctcattctgcacattctagttcaaaatcatttcagccaactcagcctgaaggtttaagatcaatggcagtatcaaatgtcagtccattgctggtgtctggttcaccacaacacaacttaccatccacagcggaaaacaagaactcagattttctggtgaattctcctttggagggcaatttagattccaaaacaacaactggactcaagcatacacgtggttaccagcaagatatcaaagattcaagattgagtggagagtctccagttattccactcaggttgaaaatccaaaggaatggtgaattgcctgtatctggtaaagatgcttatctggatggttacacagagaccaacttgaataataacttggtttatgatgacaatgttgctgatggtgtgcaagttcagaagaccaattctgaggacgcttcatcagtgaagtcaagcaaggatattctggtgaaaagtgagaggagcaactctttgaagctaacaacaaatgaagtggtctctgctcttaagcacaatggaatggaagcacgtggtacagatttattgaaccaacctgtagagaagtactttggtgctgcacgcctatggccatgggaagtcatttattatcggaagcttaaaaagggtccaatttctacagagaactacgctaagcgacttgagcagaacaaagaatatagtattgtagatcggtatgtcagaagcagcagtggttggtgggagtgccactagaatgccagactggtggtatagatagatgcagttgaggctttgcgtgtatgctgctgcaggtacattttgaggatgacaaggtttgccttctaatcagtccattcctagagctccatgagtgtaagcagacccttaactatgagaattattaagtattaggttctttcattagtataattttgttgagtaagggtttgcacaattgcacctaagtagcttattctgccaccaatattatgctgttgcatggtcagtatgttttaagttgtaatgtttcaacgactcgccccagtgaggtactttggatggccaacaggtaagcaaagatgcttattttatacatgattttttggggaaaagaaacaagcctcttgtttagcagttatatagaggaaaggttctctctgt

SEQ ID NO: 25154 - DNA, 2093 bp, Oryza sativa
  ref <308>: DATABASE ACCESSION NUMBER: AK100596
  ref <309>: DATABASE ENTRY DATE: 2002-08-28
ggtgatgttatggtggttgttgttgttgttgaaggtgccagtcgtccagcgtcgacgacaagcccaagtccaagcggggcctgctcgacaacgccagcaacctgctcaccaacctgctcagcggcgggagcctcggcgcgatgcccgtcgccgagggcgccgtcaccgacctcttcggccggccactcttcttctcgctctacgactggttcctcgagcatggctctgtgtacaaactcgcttttggacccaaggcatttgttgttgtctccgatccaattgttgctagacatatcctgcgagaaaatgctttctgttatgataagggagttcttgctgaaattttaaaaccaataatggggaagggtcttatacctgctgaccttgatacctggaagcaaaggagaaaagttataacccccgggttccatgccttattcatagatgctatggtgggagtatttactaagtgttcagagagaacaatatttaagcttgaagagcttattgaaaggggcgaacatggggaaaagtataccatagtggaccttgaagctgagttttctaatttggctctcgacataattggcttgggcgtgttcaattttgattttgattcggttaccaaagaatctcctgtgatcaaggcagtatacggaactctttttgaagctgagcacagatccactttttacattccctattggaatcttcctttaactagatggatagttccaaggcaacgcaagttccacagtgacctcaaggttattaatgattgccttgatagtctcataaaaaatgcaaaagagacaagacaggaagctgatgtcgaaaagctccagcaaagagattactcatcattgaaggttcgttttccatcatgcttgtaggatgccagcttgctgaggttccttgttgatatgcggggagctgatgttgacgatcgccagcttcgagatgaccttatgacaatgcttattgctgggcatgaaacaactgctgctgttttgacatggtctgtttttctactagcccagaatccctccaagatgagaaaagcacaggcagaggttgattctgtactcagcaatgagacaattaatgtggaccagctcaagaaattggagtacataagactgataattgttgaagctcttcgcttgtatccccagccaccattgttaatcaggcgtgctctgcggccagataaattgccaggtgggtacaatggtgcaaaagaaggatatgaaataccagctggaaccgatatatttctttcgatatacaacctccatagatctccatacttttgggatcggccagatgagtttgaaccagagagattttcagtaccaaaaaaggatgagagcatagaagggtgggctggttttgatcctgaccggagtcctggtgctatgtatcctaacgagattttagcagactttgctttccttccttttggcggaggaccccgcaaatgcgtgggagaccagtttgcactcctcgagtcgacagtagccctggccctgctattgcaaaagtttgatgtggagctgcgaggatcacccgatgaagtggagatggtgacaggcgcaacaattcacacgaagagcgggttatggtgcagagtgaggagaaggacctgatcatccaccagttggcaccaaaagctgtgcttgtgccgtgccgcagcgggatgcatgcagtgcaggaaacaagaagcacacaggaataaatgcatcgatgcagacaacaaccaatacaagggtaagtaaagccagctactcctactccttagttcttttttcgctcatgatgtgatggtgtatagaagtatatactattcgattatttgtacgatgcatacgcatctgtgcgtgcctctttgacggcgaaaaatcgttggggttgaactggaaattgtgctgagttgttacttcatctcaggctgaaacagcacgtttttgcgacctttttgtggtcagcaaattcgctgtcggccaagctgtatgaatagtatggataatccagtccattttaatcaaatctgcacagacaatgaaagctagttacttttacatgttttaagc

SEQ ID NO: 25155 - DNA, 2132 bp, Oryza sativa
  ref <308>: DATABASE ACCESSION NUMBER: AK100597
  ref <309>: DATABASE ENTRY DATE: 2002-08-28
gctcttcaactgctactactctctctctcctctcgtctcgtgctcttgcccccctcatctctctctctcgcttcctagggtttcgcgccctcggatcccgcggcggcggcgagaagcttccactcgcctcggcggcggcgccggccagaaagatggctggcggttttcgagtactgcatcttgtcaggccctttctggctttcttgccagaagtacagagcgctgataggaaaataccattcagagaaaaagtgatctataccgttatctctctcttcattttcctggtgtgcagtcagctaccactctatggaattcactcaactactggagcagatcctttctactggatgcgtgttattcttgcttcaaaccgtggtactgttatggagctgggtattaccccaattgtgacatctggaatggtaatgcaacttctagtgggatcaaagattattgaagttgacaacagtgtgagagaggaccgtgcacttctgaatggcgcacaaaaattgctgggcatcttgattgctattggggaagctgtggcatatgtgctgtctggaatgtatggcagtgtaagccaacttggaactgggaatgccattctcatcatcctccagcttttctttgctggcatcattgtcatctgtcttgatgaacttctccagaaaggctatggtttgggttctggcatttcattgtttattgctaccaatatctgtgagaatatcatctggaaggcgtttagccccacaaccatcaacagtgggcgtggtgctgaatttgaaggagctgtcattgcattgttccatttgttgattactagaactgacaaagtccgtgccttgcgtgaagctttctaccgtcagaaccttccgaatgtgacaaatttacttgcaactgtattggtcttcctcatagtcatctacttccaaggcttccgtgttgtgcttccagtgagatcaaagaatgctagggggcagcaaggctcatatccaattaagttgttctacacttcaaacatgcccatcattctgcactctgcactgattaccaacctctacttcatatcacagcttctctacaggaggtacagtggaaattttctggttaaccttcttgggaaatggaaggaatctgagtactctggccattcggttcctgttggtggtctcgcttactatgtaactgctccatcaagtttggctgatgttcttgcgaatccgttccatgcgctgttctatgtggtattcatgctgtcagcttgtgctctcttctcaaagacatggattgaagtatctggctcatctgcaaaggatgttgctaaacagttgaaggaacaacaaatggtgatgcctggccatcgtgagtcaaacttgcagaaggaattgaacagatacatccccactgctgctgcatttggtggagtgtgcattggtgcattgactgttctagctgatttcatgggtgcgattggttcaggaactggtattctgcttgctgttaccatcatttaccagtacttcgagacattcgagaaagagagggcaaccgagcttggtttctttggtttttgataccgttgcttgaggacattgttataccaatagttggatcttctttcaaatgaaagtacttcttggccggctgtttatggatgtaattggagagcttaaagtcagtttaggttgcccgacttatttgaaaatgaggtactcgtttaaggttctgcgtgtgatttcaggcctgtatggtggtatatgccctgtttcaagtacagccatggccatcatcgatccgtcttccgcagccttctgtttttcgactatgtagtaaccataatttgggatcagttttagtcatttggaactgaatatattatcccttttttttgcgacaatcatctctactaatccctctttctgattcctagaaattatggagtaatgcactaattcctcttttgttctttgctttagaattttgaaatttggcagtctaatatcttgcattgtatttgtatgtgcgaagagcaccatgtttttttttttcacaatgttaattgttatattcgtgttcccttgaatacattgtattaaccatttaagctatggcaagaggtttaaccc

SEQ ID NO: 25156 - DNA, 1838 bp, Oryza sativa
  ref <308>: DATABASE ACCESSION NUMBER: AK100598
  ref <309>: DATABASE ENTRY DATE: 2002-08-28
gagcagagcagcgcatctgcatccaaaaccaaacccaaactcgtcttctccaccggagcagagcagcggcggcggcaatggacgccctcctcgtggagaaggtcctcctgggcctgttcgtggcggcggtgctggccctagtggtggccaagctcaccgggaagaggctccgcctcccgcccggccccgccggcgcgcccatcgtcggcaactggctccaggtcggcgacgacctcaaccaccgcaacctgatggcgctggcgcggcggttcggcgacatcctcctcctccgcatgggcgtccgcaacctggtggtggtgtccagcccggacctcgccaaggaggtgctccacacccagggcgtcgagttcggctcccgcacccgcaacgtggtgttcgacatcttcaccgggaaggggcaggacatggtgttcaccgtgtacggcgaccactggcgcaagatgcggcggatcatgacggtgcccttcttcaccaacaaggtggtggcccagaaccgcgcgggttgggaggaggaggcgaggctggtggtggaggacgtccgccgcgaccccgccgcggcgacctccggcgtggtgatccggcgaaggttgcagctgatgatgtacaacgacatgttccgcatcatgttcgaccgccgtttcgacagcgtggacgacccgctcttcaacaagctcaaggccttcaacgcggagcgcagccgcctctcgcagagcttcgagtacaactacggtgacttcatccccgtcctccgccccttcctccgccgctacctcgcacgctgccaccagctcaagtcccagcgcatgaagctcttcgaggaccacttcgtccaggaacgcaagagagtgatggaacagactggtgagatccggtgcgccatggaccacatcctcgaggccgagaggaagggcgagatcaaccacgacaacgtcctctacatcgtcgagaacatcaacgttgctgctatcgagacgacgctgtggtcgatcgaatggggaatcgcggagctggtgaaccacccgagcatccagtcgaaggtgcgggaggagatggcgtcggtgctgggcggcgcggcggtgacggagccggacctggagcggctgccgtacctgcaggcggtggtgaaggagacgctgcggttgcgcatggcgatcccgctgctggtgccgcacatgaacctcgccgacggcaagctcgccggctacgacatccccgccgagtccaagatcctggtgaacgcgtggttcctcgccaacgaccccaagcggtgggtgcgccccgacgagtttaggccggagaggttcctggaggaggagaaggccgtggaggcgcacggcaacgacttccgcttcgtgcccttcggcgtcggccgccgcagctgccccgggatcatcctcgcgctgcccatcatcgggatcacgctcggccgcctcgtccagagcttcgacctgctgccgccgcccgggatggacaaggtggacaccaccgagaagcccggccagttcagcaaccagatcctcaagcacgccaccgtcgtctgcaagcccatcgacgcctaggtcgatcgatcgacctactcaaatcaatcatgtgctgcgttatcctattgcactaaaaaaaggttgtatttttgtttggggggggggggggggtagttatgtgtgtgttctgtgaggcaggcacctgttgttgtaggtttacttaacttttttttttcttatacttgttggttcaaacttaattattggtaatctatactgcccaaacattgcaaatatatcatttctggctatttacacttcatcaagacaaattcc

SEQ ID NO: 25157 - DNA, 918 bp, Oryza sativa
  ref <308>: DATABASE ACCESSION NUMBER: AK100599
  ref <309>: DATABASE ENTRY DATE: 2002-08-28
ggaaggagaacgaagcagaggccaaccggagagggcggagacgaatcgccggcccctcctctcgccggcgggcggccgccaggccgggaggtcggccggcgacgcgccacggcgaccaacctggccgtgagactggttactactggagattactacttcatatttgctcattggcatattattagtagatggggactgtttacttcacattgattttgcttgctccatacagaggcagagaatcattatggagagaggggggaagaaagacgacatcgaagctgaaacagtggactattgtgctcgagatccgataaatattatcctgcatactcagggtgtccctgctttggctacatcctcagagggagctgagagctgtgatgaagatgctgctcgctgctggggagttggagacgagaggcgagagaggtcgagcggcgacaccagaggaggcagggtgggcagcgagtgtgaagtgatgcgagaggctgggctactactacctaagctacgagaccggtcgctgtggggcaaggcagcgagaggcaaaaggtgagtaaggaacaacgagaaggagcacgcagtcctgcacctcctgctggtatgtgcgtgcttctcctcctgccttcctgtgcgtgctgtgcttgctagctcgtttctgtggtggggcttatttataggcgcagaaaagcctcccttcccgtccgtccggctcgtcgccgttcgttggtggatacgaagctctttccccctcgctgacgcgcgggccacctaagaattgggcgttgcacgtacgagttagagcaagttcaatagtatagcccactactagctctaattcatctatagccaatttaatagccaattcatacaatagttgtttacaatattttaatatatgatctcacctgtcat

SEQ ID NO: 25158 - DNA, 1350 bp, Oryza sativa
  ref <308>: DATABASE ACCESSION NUMBER: AK100600
  ref <309>: DATABASE ENTRY DATE: 2002-08-28
tggcgcctccaagctccgacctctctcccctcctccgcgccctaaccctaggccctccgcgtcgccggcgatgagcggcctccgagccatctccaccctactccacacctgcgccgccgccgccgcgggaggctccagtcggcgggtcgctctcgcgccgccgctcggtcggagcttccgcgtcccgtggagggcgccctccgcgttcgtcttcgacgaggtcgcgagggccgcggggggcgagcggaggagggtgtctacgcgcgcagcgagctgggattcggagaaatcaccgtacgagacgctcgagctggacagggatgcagatgaggagacaataaagacggcatacaggcgattggccaagttctatcaccctgatgtttatgatggtaagggaacccttgaggaaggggaagctgccgaagcccgcttcatcaaaatccaagcagcatatgagctactgattgatgaccaaaggagaaagtcatatgacagagagcatcatgtgaatccaatgaaggcttctcaggcatggatggagtgggtgatgaaaaagcgaaaagcttttgatcaacgtggtgacatggcagtagctgcttgggctgagcaacagcatcgggaaatgacattacgtgctcgccgtctctcacgatcaaagattgatcctgaggaggagaggaaactgtttgccaaggaaaagaaggcatccatggaattctacagcaccactctaaagaggcatacccttgtcctgcggaagagggatattatgcgcaagaaggcagaggaagacaagaagaaagagatcagtagacttctagctcttgaggggcttgagctagatacagatgaagacgacaacataaatttcctaaagtaactacgcaaatgttctttcacaaattccatccacctctcccagcatatactagaaggtttcgccaaagttgcatttagtgaatatatattgacgcaagaaaaaatgagctcaagggaaacattggatcataactgttggaaatccagaattctcccatggagcagaaagatgtggccaacggcgaaatccatctgggccaactgctgcaacctgcagcccagtgattcaatcaaagttctttatgcagatcctctattcattgtttccagcagatggactgtattgcaagggatatgactatcagatatgtatacttgttacatgcgaaattgtaattatgctagggtaattttgtaaccttcttgtttgtccgagcaaaacaaagtgcattctctgtgtggtgcctctagctctgacactttgtaaatactacagaaaacatccaaagctattgtttactgggcatg

SEQ ID NO: 25159 - DNA, 2722 bp, Oryza sativa
  ref <308>: DATABASE ACCESSION NUMBER: AK100601
  ref <309>: DATABASE ENTRY DATE: 2002-08-28
ggcgggtgtagtatggccaccatggcggcatatggccccctttcacacgcacatcctcctctcctttatttatgaaaggggggttgggttagctgggaagaggaaggaagccgctgctgacatgtgacaccgtgtttggcatcacaccacttcactccactggctcagtggctgcctcactcactcaccaattcaccattgctagtgcaagagctcgcataaataggcagagctgctgctcctctcctctccctctcagcctctggaggaggaagagaagaggaggggtctctgcttcatctttcttcctgagctggcttctttactacagcagccatggctaaagagtatcctgcctcccccaaagctcagcagctgcaagaatccaagaagcagcggctcacctacatcctcgtggtgagcgcgctctgcgtcgccttctacgtcctcggtgcgtggcagaacaccacagtgcccaagccggcggcgagctcggcgatcaccaaggttggctgcgacccggcggcggcggggcagtcctccgccgtgccgtcgttcgggtcggcctcgcaggagtcactcgacttcgaggcgcaccaccagctcagcctcgacgacacgggcgccgaggcggcggtgcagccgttcccggcgtgcccgctcaacttcagcgagtacacgccgtgcgaagacaggaagcgcggccggcggttcgagcgcgcgatgctggtgtaccgggagcggcattgccccggcaaggacgaggagatccggtgcctcatcccggcaccgcccaagtacaggacgccgttcaagtggccgcagagcagggacttcgcctggttcaacaacatcccccacaaggagctcagcatcgagaaggccgtgcagaactggatccaggtggacggccagaggttccggttccccggtggcggcaccatgttcccgcgaggcgccgacgcctacattgacgacattggcaagctcatctcgttgacggacgggaagatcaggacggcgatcgacacaggttgcggggttgctagctggggtgcttacttgctgaagaggaacatccttgcaatgtcgtttgcaccgagggacacccatgaagctcaggtgcaattcgcgctggagcggggtgtgccggccatcatcggcgtgatgggaaagcaacggctgccttacccatctaggtcatttgatatggcacattgttcacgctgcttgattccttggcatgagtttgatggaatatacctagctgaagtcgacagaattctaaggcccgggggatactggattctctcgggtcctccgatcaattggaagacacactacaaggggtgggagaggactaaggaagacctcaaggaagagcaagacaatattgaggatgtcgcgaggagcctttgctggaacaaggtggttgagaagggggatctctccatctggcaaaagcctaagaaccaccttgaatgtgccaacatcaagaagaagtataagacaccccatatatgcaagagtgacaatcctgatgctgcctggtacaagcagatggaagcatgtgttactccattgcctgaagtaagcaaccagggtgagatcgcaggtggagctttggagagatggccacagagggcattcgcggtccctccaagggtgaagaggggtatgattccagggatagatgcgagtaaatttgaggaggacaagaagttgtgggaaaagagggtggcgtactacaagcgcaccctacccatagccgatgggagatacaaaaatgtcatggacatgatcgcaaacttgggcggatttgctgcttctttagtgaagtaccctgtgtgggtgatgaacgtcgttcccgtaaattcagaccgggacacgcttggagcaatttatgagcgaggattcattggcacgtaccaggactggtgtgaagctttctcgacgtatcccagaacctacgacctgttgcatgctgataatttgtttagcatctatcaggacaggtgtgacataaccaacatcctcttggagatggacaggatcctgaggcccgagggcacggcgatcatccgcgacacggtcgacgtcctcaccaaggtccaggcgatagcgaagcggatgcggtgggagagccgcatcttggaccatgaggacgggcccttcaacccggagaaggtccttgtggcggtcaagacatactggactgctgatgaatcagagcagcactagcacactgcacacagcacagaacacaggctcggctacctctctgaagactgaagaagtctgaacccccgattgttttcagagctgtgatgatggcatcggagttttgccatttcggtgtaacataacagaagatatcatctggtcacttgttttcttcctcctttcgctaattctttctatatcaaaggaaaagttatggatggtttttggggtgagattgggcatggttggatgatacatgagtttgttagcaaggggaagaaatgcaaatcttgcataggttcctgccccagtttcacgcatggagcagacagcagaggataggttttttagcttgtaatatgatggcgtccaagtatccaacagacactgttaatctatattgaggttaactaagataggtatttatctagtttatctgtgttagctcttggaattatcagtttattagttaattaagttcttgatgctccttaaaacg

SEQ ID NO: 25160 - DNA, 1985 bp, Oryza sativa
  ref <308>: DATABASE ACCESSION NUMBER: AK100602
  ref <309>: DATABASE ENTRY DATE: 2002-08-28
gactcttccgcccccaaatcctcctgctcacctcaccttatcctcagctctcagcacctcttcctccctcccccaagcttccctctaatggcgtccgccaacgccatctccaccgcctccctcctccgctctttctcctcccaggggagggtgaggagggccaagaatgggcgggcgcagcggctagtggtgcgggcggacgccaaggacatcgccttcgaccagaaatcccgggcggcgctccaggccggcgtcgagaagctcgccaacgccgttggcgtcaccctcggcccacgagggagaaacgtagtgcttgatgagtacggcagtcccaaagtggtaaatgatggagtcaccattgcccgggctattgagctatatgatccgatggaaaatgctggtgcagcattgatccgtgaggttgctagcaagaccaatgattctgctggtgatgggactacaaccgcctctgtccttgctcgtgaaatcatcaagctgggccttttgagtgtaacttggtgcaaaccctgtatcacttaagaaaggaatagacaaaacagtgcatggtcttattgaagagctggagaagaaggctagaccagtcaagggcagtggtgatatcaaagctgttgcctctatctctgctggcaacgatgaacttattggatctatgattgctgatgctattgacaaagtgggtcctgatggtgtcctttcaattgagtcttcatcatctttcgagactactgttgatgttgaagaaggaatggagattgaccgtggatacatttcccctcaatttgtgacaaacctcgagaaatcgatcgtagagtttgagaatgctaaggttcttattactgatcagaagatcaccagcataaaggagattcttccaatcttggagaagacaacacagttgagagctccactgtttattattgctgaggacattactggcgaagctttggcaacccttgttgttaataagctccgaggaattctcaatgttgcagcaatcaaagccccaagttttggtgagcgacgcaaggctgtccttcaggatattgccattgtgacaggcgctgaatttctagcaaaagacctgggtttgctggttgagaatgcaactgaagagcaacttgggacagcgagaaaagtcacaatacatcagactacaacaaccctcatagcggatgcagctagcaaagatgagattcaggcaagggttgcacagctaaagaaggaactctccgaaactgattcgatatatgatacagagaaattggctgagaggattgcaaagctttctggtggtgtggctgtcatcaaggttggggctgcaactgagactgagcttgaggaccgccaactacgtatcgaggatgcgaagaatgcaactttcgcagctattgaggagggcattgttcctggaggtggtacagcgtatgtgcatctttcaactaccgtccctgcgatcaaagaaacaatcgaagaccatgatgagcgccttggtgcagacattattcaaaaggcgttggtagctcccgcttcactgattgcccacaatgctggagtggaaggggaagtggtagttgagaagatcaaggacggcgagtgggaagtcgggtacaatgcgatgaacgacaagtatgagaacttgattgaggcgggtgttattgacccagctaaggtgacgagatgcgcgctccagaatgccgcctcggtggctggaatggtccttaccacacaggccattgttgtcgagaagccgaagcccaaggctcctgttgctgagccggcagagggaacccttaccgtttaaacagtggtgaattttttcagggtggctttgtttagatggttcataccaactgaaatggtagaatttttgtctgggagtttttggttcagatcaaccgaaaggtttagtgtaggattggtttccatttttgagattgaaggtgcaacctgcctgatctgaactc

SEQ ID NO: 25161 - DNA, 991 bp, Oryza sativa
  ref <308>: DATABASE ACCESSION NUMBER: AK100603
  ref <309>: DATABASE ENTRY DATE: 2002-08-28
ggtgtgagcgcgggagcacctctcccgacgagccttcccttctcctcctcgccttcgcgtcagcccggcatggggttcccggtctgctgctactccgagctgctgctccccaagcagctgctccacctcctcctgctgctcggctacatccgccgcttcctcctctgggcgttccacgccgtcggcctcggggacctgctggatctcggggacgagcagcaggcggtgctgcaggaccacgcgcgcgagcaccgcgcgccggcgcaggcgctgccgccacagcagcagcaccgccgcgccgagttccggacggtgccggcgatggtcatcgaggaggttctgccggtggtgcggttcgacgagctggtggccgcggccccggcggtttgcggcggcggggactgcgcggtgtgcctcagcggcatcggcggcggcgacgaggtgcgcatgctcagcaattgccgccacgtgttccaccggtgctggctggaccgctggatggagcacgacgaccagcgcacctgcccgctctgccgcgcgctgttcatccgcgacgagatggccagcgcgctctgggccgccgccggcgtgcccgacgcctccgacttcgacttgtcctacttcggcgcgcccctcacgccgatgcccacgccgactctgctacggccgcacgagctgctgctcactggccttggcggctaccagtaaccagtgaaccgccgctgttggttcacggagttggcaatatccacctactgcacagcagggcaccggcgacccggaatgcgcagtttttacaacgactgaattggtcgtcgtgttcggggaagaccaagaacaggaggcgccttcaactgtacataggcaaaaatgagtaaagcaaaccccccgaaaaaggctagatgattagtagatttttatttttgtttttgtttttgtacagaagattccatcttccaggtttgagaagtagtgaatctttgtgctgatt

SEQ ID NO: 25162 - DNA, 1423 bp, Oryza sativa
  ref <308>: DATABASE ACCESSION NUMBER: AK100604
  ref <309>: DATABASE ENTRY DATE: 2002-08-28
gagattgagtccaggaagagagacacgcgggtttgcacgggcgagctcgccgtctctctcgccgccaccgtcgcctgcttcgctcgcgagagaggagccatggctggagcctcgccgtcggcgcgcgccgaggtggtcgtcccgccggaatgggcggcggctaccgccaccgccgccgccgcctcctccgagcccgcgccaccggtcgtcgtcgtctgcgggcccaagaacgccggcaagtccaccttctcccgcctcctcctcaactcgctgctccccaggtatgggagggtggggtatctggacacggatgtcgggcagccggagttctcgccgccgggatgcctctcgttccacgtcgtcgacgaagctctcacagatttgctcaacccaactctgcgtgagtgtgaaaggtgttgcttcttcggtgatatttcttcaaagcgagatccagaaacatatctgaattgtctatttcatttgtatgactattttgttgaaaaatatcgatctggtgccagtgaacctctacctttaattgtcaacactcctggatgggtgaaaggtgctggttttgatatgctggtagagatgctaaggtatatctgccccacaattgttgttcagatacgcatctctgcgcagagcaagaatctccctgatggaatgttttggttagattgtgggcaaacaggaccaaacatgatcaatattgatgctccatttcatgatgctttgaatagatcgttgttaatccagaaagattcttatggaatgcgtgagcgccggcttatagagtacttcaagcaatgttttccaagtgacatatcactgacaacaaataaggagcttgcctatggcctaacttcacttccaccctatgaagtatcaatttcagatgttatggttatacatcttcattgccaggtacctcctagtgaggtatggcatagtctaaatgctaccatagttggtttggccattagctgtggcacgatcgaggcaggccgttcaatcccttggtgtgctggtcttggtattatcagaggcatcgatgtgcaaagaggcattttatatgtaataactcctgttcctctagagcatcttcaaagagttgatctcttgcttcagggactcattgagatcccaaagtctcttctgcaggtccgaggatgcgtctcaccatacatgccaacgaatgtgctgcacaggatttcggagagggacataaacacctgagttgacgtcgaacgcccttctcctttgccaccaccgttcggggagatgatcctgaacctgttcagaacagagcagagcagttctgacccacagatggagacttgtaacctgtgcagtactgccatgcttgtttgtagcccttgctggtggaaacgatgatatatcattatctgcaattcgttgg

SEQ ID NO: 25163 - DNA, 2462 bp, Oryza sativa
  ref <308>: DATABASE ACCESSION NUMBER: AK100605
  ref <309>: DATABASE ENTRY DATE: 2002-08-28
ggcaaaaacaccgaaggtccccgtatgaggaggcagctcgtgctcgggcggcgagactgagacgagacgcgagaccaaaccctcccctccccgaccgcgccccgcccagatctcgccgccgacgagatgcatcgccgcggcggccaccacctccacctcctcctcgccgccgccgtcgtcctcctcctcaccgtcgcggggctgcccctcgcttccgcctccgagtccgaccacaagtacaaagctgaagaaacggttaaactctgggtaaacaaggttggcccgtacaataacccgcaagaaacttacaactattacagcctcccattttgtcagccatctgaaaaccccgcacacaaatggggtggtctcggagaggtccttggcggcaatgagctgatcgatagtcaggttgatataaagtttttaaaaaatgtggagaagggtcccatttgcacaattgaacttgatgacaacaagattcaacaatttactgatgccattgaaaggtcatattggtttgaactcttcatagatgatcttccattatggggttttgttggtgagactgacaaaaacaacgaaaataagcactacctctacacacacaagaacattgttgttaaatacaatggtaacaggataattcatgtcaatcttactcaagagtcacctaagcttcttgaagctggcaaaaaattggacatgacctattcagtgaagtgggtgcaaacaaacgttgcagtttgcacgacgttttgaagtttacttggactacccgttctttgaacatcagatccattggttctccatcttcaattcgttcatgatggttattttcttgactggattggtatcaatgatattgatgaggacgctgagaaatgattatgcgaaatatgctcgtgaagatgatgatctggagtcgcttgaaagagatgttagtgaggaatctggttggaagcttgtccatggagatgttttccggcctcctcgtagcttggtgtttctttctgcttttgttggtattggcactcagctggcggctcttattctgctcgtgattgtattggccattgttggcatgttatatgttggacgaggagctatcatcacgaccttcatcgtgtgctacgcccttacatctttcatttctggatatgttagtggtggtctctactcaaggaatggcggcaaaaactggataaagtctatgatccttactgcatccctttttccgttcttgtgcttttcgattggattggtgttgaacaccattgctatcttctaccgttcactggcagccataccatttggcacaatggttgtcatatttgtcctgtgggctttcatctcttttcctttggttctattgggaactgtagttggtagaaattggagtggtgctcccaacaatccctgtcgtgttaagacaattccacgtcctattcctgagaagaagtggtatcttacaccctctgttatctcattgatgggtggactactccccttcggcagcatcttcatcgagatgtactttgtgtttacttcattctggaactacaaggtttattatgtatatggtttcatgctgctggtttttgttatcctcataatagtcaccatatgtgtcactattgtgggtacttatttcttgttgaatgctgagaattaccattggcaatggacatcattcttctccgctgcatctactgccttgtatgtctacctatactcaatatactattatcacgtgaagacaaagatgtctggcttcttccagacaagcttctactttggctacaccttgatgttctgcctcggactaggaattctttgcggtgctgttggctatctaggatctactctctttgtgaggagaatctacagaaacatcaaatgcgactaaattgctactctgaacatcaaatgtgaccaaagggctactccgttgccgatagatcctatcagcgaagtgtgtgttgctggcgcaggtccattgtggagtaatgctcataagattctgatcaacttttggaagctatacaggagattgttctccctttgttttaccttttctttttatgtttttcttttacttcatttttcttcttggagctggcctcataaatgtatacctcattagttcaggaattagtctcagtaccgggaagtacatttagattctcattttgtggtggcctcttttggccagtagtaggatatcattgatgaatattggtgcagtgtggatccaatccagtggctagaattgcccctcttatgaatcgctatacatccaattttggcatagccttgtagtatatgcaaactaatacattcaagttagatatatatggcctgaatgggtgaagttctatttcttcccctgcaggtactgttgaaacatgaattcgacatgattattatttagcctttggtctgagttttcatccttgccg

SEQ ID NO: 25164 - DNA, 2420 bp, Oryza sativa
  ref <308>: DATABASE ACCESSION NUMBER: AK100606
  ref <309>: DATABASE ENTRY DATE: 2002-08-28
gacccaaaccaaaagcagcgcgcagacgcagagctacacaagaaaccttgagccaatagagcaacgaagcggccatgtcacgcctctgccaccacggcggccgcgtgctgctccccctcctcctcgtcgccgccgcttgcctcggcgatcctaccggtgacacctacgacaccgccatgtgcggcgcgcaagcttccatcacctgcggcggcgtcatcgtccggtacccgttctacctctccaacgcaaccagggcgctccccaagtacgccaactcgtccacgttctgcgggtacccggggctggagatcatctgcgacggcggcggcggcggcaaggccgtcatgatgctgggcaacgacagctacacggtgtcgcgcattgactacgccagcctcaccgtctccctcgccgacgccgacgtcgccaacggcacctgccccgtagtcagccataacgtgaccatcccaccggcaccctcgtcgctgcacctggccgacaccgtcggcatgctcatcttcttcttccgctgcgccttcgggccggcagccaatgccccacccaagccgccgagcatccacccgctcacctgcggcgagaactccgaggacgcgcccacgcagtcgttcctgctcccggcgagccccctgcctcccggcgacctctggcaccgcgggtgctcggcggtgtacggcgtgcccgtgctcggcggctccctcccgtccgacgcgaacgatcccgcgtggaggaaagacggctacatcgcgtcgctccgcaaggggttccagatgagctgggaccggagcgaccggtgctcccggtgcgagctaaccagcggcaagtgcggctacaaccagaacggcaagttcttgggctgcctctgcgccaatggcctcgtggacagcgacgcctgcagcaagatatccgactccaccctgcgcttggccggatcgaacttgaagacaaaaattatagcaggtgtggttggcgggggattatctgcggtgttcgctcttggattaatagccaccgtcttcttcgttcgcaagagaaagcacaagaaggtgaactcgtcttccaagctcctcaagtacagcggctccggcgggacacctcgctccatgggcggcgacatggagtccggcagtgtcaaggacctgcagactcacctcttcagctacgaggagctcgaggaggccaccgattccttcaacgagaacagagagctcggtgatggcggcttcggcaccgtctacaaagggatacttcgagacgggcgcgtggctggcggtgaagcggctgtacaacaacagctaccggcgggtggagcagttcgtgaacgaggcggcgatcctgtcgcggctgcggcacccgaacctggtgatgttctacgggtgcacgtcgagccagagcagggagctgctcctggtgtacgagttcgtggccaacggcacggtggccgaccacctgcacggccaccgcgcgcaggagcgcgcgctctcgtggccgctccgcctcaacatcgccgtcgagtcggccgccgcgctcacgtacctccacgccatcgagccacccatcgtgcaccgcgacgtcaagaccaccaacatcctcctcgacgccgacttccacgtcaaggtcgctgactttggcctctcccgcctcttccccctcgacgtcacgcacgtctccaccgctccccagggcaccccaggatacgtggatccggagtatcaccaatgctaccagcttaccgacaagagcgatgtgtacagcttcggcgttgtcctggtggagctcatctcgtcgaagccggcggtggacatcacccggcagcggaacgagatcaacctggccggcatggccatcaacaggatccagaagagccagctcgaggagctcgtggacctcgagctcggctacgagtccgacccggcgacgaagaagatgatgaccatggtcgccgagctggctttccggtgcctgcagcagaacggcgagatgaggccgccgatcaaggaggtgctcgaggggctcaagggggtacaggacctatgcgtgatggagaaagatggaggcaaagacaagaagggacctgacccgccattatctcccgacacggtgcatgctcagtgggatagcaggcagacgactcctaacactagccagtgaccagcgggttattagattagaccagtatatttgccaccgaggcttaatatgtgtgttactgctattacgctgaggcgtgtgcttgttgtatgagaggtgcgagaccttttttcccccactttccaggcttccctggtgatgtgtgcatatgtgtttgttgggctaccagaacagagggaatgtacataagatgtttagagtggtgatgaccgatgatacatatggatatgtacttagtggatgttacagtt

SEQ ID NO: 25165 - DNA, 1315 bp, Oryza sativa
  ref <308>: DATABASE ACCESSION NUMBER: AK100607
  ref <309>: DATABASE ENTRY DATE: 2002-08-28
gtgaaacagcccgtccgtctcaaaccctaactctgcaagacgcgcgtccgccgccgcaactagcaatgcccaagcggcgtcgcggggttcgcccccctcctcccgatccttccccggctccggcgacaatcgactataaccttacttataaggagatagccgccagtggggctccaggtgctgtggactttgtgaagaatcatggcttgtacttgctgctgcttgagacaccctctggcttctcaattttctctctttgtggggtctacatccacttaccagatgcgatacaaaatatttgggcgatgttcggtacttacaggtcttcacatgacgttatctggctgaaggaatttcagaaatttgatgacaagtctagcgccattaatgttgatactggtgttaacaaacagcttactgagatgatcatgaagtggcgtcgccctaggcagaaattggttgttggaaagccggagtataaatcaatcattgaaaataccttaggaataccctgcctgtgtgatgaagttgtgatggacgtaatgtgggccatgaagcgtctcattcgctattttgtgcccactgaaacacccgagctggctgaagaggacagcctcactatgagtcaaggactacggatgtttttaagtcgttatggctttgaaatcaaaccagagatggtctacaacgatattgttcgtgctgcatccatcgtgtttaggtgtgatgctgttgaggacctttacgagcacttgcaacatcttggtcgccacccaagaatgtgtctggcattgactatgagaattggggcactgtgaaactcgcgacagcttttaagatcatatgcagccgcaaaattgataaatctgatgagatgttttcagacgacgtgcgatcgaagttgctggatgatgcagataaatacaaagatcttgttttttcgacaggttgcattgcaaactataaaaaaattttaggtctcaatatactcaggaatgataaaatggatcaattggctgagttggttaaggtagctaggattaaagctgaacacgtgagggtgcctgagaatgtgcctgagaactaagatcactacaagcttgctcaatatctcgctgaacctcttgcaggctaaataatttggtttgccagttaggaagcgtttggtatgcatgtggcttaatccagattcttctgagtgtcgaggttgtgatctcggttggcttaaacattattgtgcatcttttgtaaatctagtctggtatttgagaagctaaggtccgtgctatccaaaactttgcatcgtttagctgtc

SEQ ID NO: 25166 - DNA, 3209 bp, Oryza sativa
  ref <308>: DATABASE ACCESSION NUMBER: AK100608
  ref <309>: DATABASE ENTRY DATE: 2002-08-28
ttgggggtaaaaaagtaaaaaccgatgtgagcgtcgtctcgtgtcgctccaggaagacaaccaccaaaggctcctccgtccgcggcgatcctacttcgccgccggtatgcgatcgccggagtcgccgtgctcggccccgaccctggcgccaccctctccatcatctgcttccgccgccttgcccgtcgcttcgcgcttgcgtagcggcggcggcggccgcggcggcgatggtgatgtgccgacgacgtcgtcggcgtgccatggccgccgcacctgcgaggaggagtcgatcccactgaggagcgtggaggcggcacggtttcgtgctccgcagccggcgaatctggcgaccccgagtcgatcgatggtttacacccatgtgagcccccccccccccccccacaaacccccatttcagatccattttattgatagcagttgtgcatcggagtcattccaatctattttgcacagtcggatccattttaggcctagttatccatccccatgaggaagggattggaggggattagttaggaaattaatccccttcgaatccttttcaatccccttgggtgagggattaaatgaacaaggccttactgaaagcaattaagcattgttttgtttagtctgttagcgtgaagtttcaccgtatgcatgattgtaaaaatttgactactggcagggacctggggttagttctgacttggtgccgaaggaggggatggtgttcgaatcgtttgatcacgcgtacgatttctatgagaaatacgcatgccatgcaggttttgatgtcaggaaaagcagattgaagcggacgatacgggagatatgctgcgcaagggaggggaggcacaaatacaggggcgatgaggcgaacagggagaggaaacggacatcgaagaggactggctgcaaagcatatgttaaaatcaagaatgtcacaactgacggcaaattgtcatctgtagtttttgacgtcgtcgttatagggcacaaccacccgttgacgccatcgccatcgccatcagctgtcaaacaaatgaggtcgcataggaacagagctgacacggtgcaagagtgtcgtgttacccaaaacatgcatgaaggtcaggaaaatgtcccattcacatcaccggacgtggaaatcaggtattatatggtgctgttgaagtgcataggaacagagctgacacggtgcaagagtgtcgtgttacccaaaacatgcatgaaggtcaggaaaatgtcccattcacatcaccggacgtggaaatcaggagggctgctaacaaacgcgcggagatggcggatgatatcaacaaactgttcgctttcttcagtgaatgcaagatgcagaactctaaattttactgggacatgcagctcgatgaggatggtgtggtgaagaacattttttggagccatgctagcagtcaggccgagtatgcggactttggtgatgcagtcactctggacacgacatacaagacgaacatatatgggatgtccttggcgatgttcgttggagcaagccaccatatacaagacactctgtttggttgtgcactactgcgagacaagaagatagaatcattcgaatggctattcaaaacgttcaaaaactgtatggaggattgcccctcgcctagatgcgtgctaacagaccaggacaatgtgatcgcggtggccataacaaatgtctttccgaagacaatacataggctgtgcaggtggctcatactgaagaatcactctgaggcactcaacattctatatgcaagggacgatcgcattgaatcggaattgttgttgtgcgtgaaccagacatacaccccacaggagtttgaaaatgcgtggtcgtggttcattgatgagtttgatttgcaggatagtgtgaccctgcaaaacttgtacgaaataaggcacagatggatcccagcgctcttcaagaaggactactgtggcaggatgacatctactcagcagagtgagagtgtgaacaaactagctaagagaaatttcgtcgatcaccaaaccaatctgcacagttttgcgcgtaggatgcttgatatcataatttcacgggaagcgaaggaggctgctgagaccagggcttgtttgggcatgccgataacaaagacaaggtggtcattcgtggtgcagatgtcaagggtgtacacaagagctgtgttcaagttgttcgaggaggcattggatgattgcacagctttcaggatcgacatggacattggcaacacaaacaggtggattgtgttggacatggagcattctgagaagcatgattggtgccaactacaatttaaagtgttagcggacgttcagaaaggtcgttatgaatgtgagtgcaagcagtgggaacatactggtttattatgcacgcaccttcttcggacattcatccatgctcaggtcgagaagataccacctcagtatgtgctctgacgctacacgatgaaagccagaagtgacatgtcatttgacaggcgtgaccgtgttacagctggacctgacagtgtggaagaaagttaccgacaaaagacactgctagctgaggcaatggctattgtacggttaggtagtaagtcaagggttgcatttgaaatagccatggccgcccttaaagtgctgcgaaaggaaaagagatgcttccagacagcgtggcatgtagggatgatatcgttgcacgcaacaatggtgcgggcacatcagctgaagtcataagccaagaaccaccacccaaaccaaagactaaagagcggacagtaggtccagaagagaatgtatcacttggtgcaagggggaagaagctctgtactagggtgtgcagctggtgtggactgagggatggccattacacaactacctgcccaaaaaatcccgcaaacttcgaaaaggtaaggaaggcaatgagcaggggtagagggaggagagggagaccacgtggaagtggaaggggtggcggtcgcggcatggcctgtgtaggtaggagccttatggatgaattggagagggagggcattactgaacaggacagcaacgacgacatggtagaatctgatgcggaatgagctgcaatgcagtgatatgtcgtagtggaataggtttcaaggctgaatacagccgatgtctatagccaaaactgtttggatcaatttcagtaacgtgtgtttgaaaatttggatgtt

SEQ ID NO: 25167 - DNA, 1299 bp, Oryza sativa
  ref <308>: DATABASE ACCESSION NUMBER: AK100609
  ref <309>: DATABASE ENTRY DATE: 2002-08-28
gatcagttcatcagtactgtcattaccagccatggccaccgtgataatctcctacctgctcgtgctcgtactcgccggagcggtggcggtggaggccattctgggagcgccgccggctccggggacgtcggcggcgaaggtgccggcggtgctggcgttcggcgactcgatcgtggacacgggcaacaacaactacctcccgaccatcgtccgctccaacttccctccctacggccgagacttccccggcggcaaggccaccggcaggttctccgacggcaagatcagcatcgacctcctcgcgtcagcgctgggggtgaaggagatggtgccgccgtacctgaacaagagcctgagcacggaggagctgaagaccggcgtgagcttcgcgtcggcggggagcggctacgacaacgccacctgccggaccatgatgacgccgctcacggtggagcggcagctgcagctgttcgacgagtacaaggcccgcctcgccggcgccgccgtccccgaccgggcgctctacctcctctgctggggcaccaacgacgtcatccagcacttcaccgtctccgacggcatgacggagccggagtacgccgacttcatggcggcgcgggcggtcgccgccgtccgcgggctcgtcgcccgcggggcgcgcctgctcgtcgtcgtcggcgcgccgcccgtcgggtgcgtcccggcgcagcggatcatcgccggcggcgtgcggcggcagtgcgccaccccccgcaaccaggtggcgctgctgtacaaccgcaagctcgggcaggagatcggccggctcaacgcgaagctcgccggcgtcaagatcgtcctcgtcgacctctacaacatcctagccgacgtcatgcaccgataccaagccctagggttcaagaacgggaaggatgcgtgctgtggatacatcgggttggcagccagcgtgctctgcaacttcgcgagcccgctgtgcaacgacccaccgcagtacgtgttcttcgacagctaccaccccacggagagggcctacaagctcatggtcgatgaagtcatcaaacgttacctccgatttctatagctagccacctacctactggccggctctcgatcgatcatctagctagctttttttcctttatttttccctttttcagctcgcaataattatttatttgtacacaattttgtatgctatatattctagctctcatcactccatctatctattgagggaacaagggtatactaattaagtaggaactaataaacaagatatgcatatggaatgtttaaacc

SEQ ID NO: 25168 - DNA, 3198 bp, Oryza sativa
  ref <308>: DATABASE ACCESSION NUMBER: AK100610
  ref <309>: DATABASE ENTRY DATE: 2002-08-28
ggatggtcccacagaaacaagccaccattcctgatgaaaaatcagggtcgtctgtcatccatgagaagatgatttctctagttcatgaggagataacacaggtagttgacatcaatactggttgcctatcttcattggatatgacagttccttccaccatgaactctagcagaccagttctaatcgaccaaaattctaagcttgatgatcagtttggttcactacagagctcttcacccacaatgattatgtcgcagcagtttccagtttctaggtcaagttctgtcctttccagtgactttagtcctagattactttcagcctgcccaagatttcacagtgcaccttctgcccttggaattacggctctgttggaagaccatgctgcatttggagacactaagaattctgtcaaagtttcaagtgccgtggtcaaaattccatcaaaacagtcatcacaacagcatccaataacagttactcctgttgtaacgaagtgtacaccatcaccaccaccactgcttcctccactggctccggtggtgccagtaccatctgatgatcaaatgatatcccaggaaaaagacatgtctcaacaggctcaaaagcatccagacctttcatcatttccatccctatctcctactcaacaaaaacaatccacatcaaaattatgtcaaactattctgcccacaaatcatcaactgtcctcaagtaacattacgaaagagccactacaaatttctcctgctcccactccacctccattgcctactccatcaacttccagttctagtagttgtcattgtctccctccagattccatgctttccaccacaacagctttgttcagacctccagcaccgccgccaccaccacttcaatctccatccactcctagatgctctcctgttagaactcttgcatcacctccacctcctcctgcccctacttcatcgcctgttagaatgtcagggcctcctcccccacctcctccacctgcaccaaactcgtgtcccagtagacctgcaccacctccacctccacctccaccacttgcttcaacttcatctcctccccgacctgccgcaccatcaccgtgtcaactacatacttcaacttcatctcctgcacgaccagttccaccacctccaccaacattatctacaattagatcttcagcgccaacaccacctctactgcctggagctacttctgcaccatccccaccaccaccaccacccccctgtagttcatcaaatcaactgtctgctccgccaccgcctcctccaagcttctcaaagaacaatggcagtattgcgcctccgccagcacctcctggtggtaatgctaaattgcctggtatgagggggcgtggacctgcacctccttcaggtccaatgcctaggagccttcaatctggtcaggctgcatccagaaggtccaacttgaagcccctacactgggttaaagtaacaagagcaatgcagggaagtctctgggaggagtcacagaaaactgacgaagcttcaaaacctccagtgtttgacatgtcagaactagaacatcttttctcagctgtcctgccaagttcagatgggaagcgttcagataagtcaggaagtcgtgcatctggatcaaaaccagaaaagattcaccttattgaccttcgccgagctaataattgcggaatcatgctaacaaaagtcaaaatgcccttgcctgacctaatgagcgcaattcttactttggatgatactatcctagatgctgatcaggtggaaaaccttattaagttcactccaactaaagaggaagcagaacttctgaagggttacaaaggagataagcaagtacttggagaatgtgagcagttcttcatggagcttatgaaattaccccgtgtggattctaagctgagagttttcttatttaagattcaattcccttctcaggtttctgaccttaagaggagcctgaacattgtcaactcttccgcggaagagataaggggttcagctaagctgaaaaggattatgcagacaattctttcactgggaaatgcgttaaaccaaggaactgctagaggttctgctgttgggttcaggttggatagcttactcaaactaagtgacactcgtgcacgtaacaataagatgactttaatgcattatttatccaaggtgctttctgagaaacttccagaacttcttgattttcctaaagatctcgctagcttggagttggcagcaaaggtacaattgaagtcattagcagaggaaatgcaggccataaacaaaggactcgaaaaagtcgagcaagaactaactacatcagaaaatgatggccctgtgtcagagatattccgcaagacactgaaggattttctaagtggtgctgaagctgaagttagatccttgacctcactatattctaatgtgggaagaaatgctgatgcattagcactttattttggagaagacccagcacgttgtccatttgagcaagtggtcattacactccaaaactttgtgagattgttcgtacgttcccatgatgagaactgcaaacaattggatctagaaaagaagaaagcactgaaggaagcagaagcagagaaaaccaagaaggagccagaaaacgcacagaaaactaaggaaccaggaaatgacaaagctaagcacaacaattcaatcaaagagttggatatctcactccaatcaccagcgcaaactgccagtgccaaatgatataacttctcttgacagatgagccaaacaacactagctttgccaataaaggaaacctgttcatggtgcctgctcctatcagtcaccctctctagctgatgtcagctggatatgttgcgctggatgatggattgaagtgaaccagctgtggcaaggaagtcgcaaagtgaatggcccattcagcattctgtcctctgcagttattcatctaacagagcgattgatacttaagaaatgttcctggagacaagctgtacagttctaacaaaataatagaaatgatcagaagcacatttacaattttgtttatttgttccaatcatatgtaggtaatgttcgttctaacagaagaataaaatttatcagtagaatcgtgtttagggggactagcctgtaggttttgttgtaaaaggaaaaaacaaataatggctgattgtattgtatttct

SEQ ID NO: 25169 - DNA, 3080 bp, Oryza sativa
  ref <308>: DATABASE ACCESSION NUMBER: AK100611
  ref <309>: DATABASE ENTRY DATE: 2002-08-28
ggaagtcctatcgcatacgcaaaaccctagccgcctccgcccgcatggccgcatcccctcctccctcgtctcgccctctccctctctcgccgccgccgccgcctccgcttcgcgccgtcgctatcgtcgtccgcatcgcctcgcgcctcagcctccgcctccgtcttcccctagcgccgccgcctccacctccgccgccgtcgacgtcgccgttgccgtctctgagcgcctccacctccttctccctcgcgtcgccgtcgtcgccgagcgcggacttcgaggcagacgcggagaaagcgacgaggcgaacgctcctctcctcttccactctcgtctctcctttgcctacgaggagctgtgcctcgccgccatcgtcatcgtcgtcaacctgccgccgtcgtcgtcaactggccggcctagccgctcgccgccatcgcagtggccagatctgatggcacgaactcaaggccgcctgatctgatggcggtgagctcgtggctgccgatggttaggcggttggtggagcaaccattgtcctcccaccaaccggcttcaccctttccgccgccatcgacaccttgtcgctgtgttggacgaggggctccgcctcttcacgcgcagccagccgctgcgtccgatagaatcctcctcacgcgccgcgaaccatcgatggaccagctgaaggagctcgggtgggccaagcggtggagctcgcagccatacgtgtcgtgccgcacgacatctctgcaagagctcaccaggcttgggataaagcacgtggagaacctggtgattccgagtgtcagaaatgatgctgtggtccagtatatgaatgatttgaatgctgtaagaggaacaaaccagaagaaaacagatcggggaagcttctggacctggctcttctcgctgtttggttgttgcaaaaaggaccaagagctgggattgccagtatagctgaagcatttcatctgtatgtatgttgtgaattactcaggtctgcaaagaaaggaaacgtgggtaatttggttcctcttctttttttggcttccttttttttgtgtgtatatatgtaattttgtcatgaacctgttcccgctgcttcccgaggcgttcaagggcaataagcaaatcggagtgatcggatggggctctcaggggcccgcacaagccgacctgagggattcaatagctcaagtgaagtccgacattgttgttaagatgcagcaaagcccacactcaaaagagagatagttggtgatggatcaggagctctgagcttggcggtggagcgtgatgctttgctccaggaggactccatcgtttttgcgctcatcaagcagcagcctacactcccgctgccgaagctaccggtggccggtcccttgcggaaatgttctttcacatgacaacttgtggttaatcaaagctctggacatctacagaagaacaaggaatatgccacggcagtgaaaccaacgggcgaacgcgttgaccaccgaagtcgccaccatgcgatttccaccaagatcaccataagccggtcttcgcccaataacgttgccataaaaccccaggaacctggcaaacaacaaccttgaaggacaaatccctgataatataagctcatgcataaatctcattagcttcaatgcttatggcaataaattaaatgggactgttccacgttcattgcacaaacttgagagtataacttatttcttctacgaatctgtcatcaaactatcttagtggagccattcccattgaactagcaaaaatgaaaaacttggacacatcgcaggggcaagattattggcaaaatgaggacatagttgaagtgatgccatgctgccgtcagatgttcaacatttttcatccctttgatcctgtagcatacaggatcgaaccacttgtatgtgaagattacataagcaagtgccctgtaattgtaccctaccatagagggggaaagaggatacatgtaggagtgcaggaattcactatttcactgaagatattgctgcacggtctcaagctgttgctcgccagttcaagtcactgaagaggatgttgacagcaataatgagaaagagaagtcatatggttacatgctgatggaaaggctgacaggttcaccagatggtcggattgaccatgtacttcaggagaaaacatttcaacacctatacttatctgcccttggatctcatacgtttattcttgtagcaattattggcgagatcatgatactgctctcttcattctcagacatctgtaccgtgatatacctaaagagcctccaactgatgatcctgaaaggatgcctattcgactgttttatgtgagggatccaattgctgagagactcccttgatgttttcagataattcattagttaaggaattctcaagaaaagtgatgacttattcaagaaatcagagaacgattcaagctgtgaatcttcctgatggctgctggaatagtggaagctgtggagggtctactcagatgttgatcgaaatggtgctggatttgggagctgttgttctcaattgccgtgacctatcagtgtcagaccatgggtctgttgttgcagtcaacatcttcctagcgctggggctgatcactggaggtgtgattctgcttgtcagttgagggaagaattcacacacttgtgttcactgaggacatcttctcaacctattgcttccaccgatcatctttaatgctagataatcaagaaccatgatgccaatagtccactactatgctttactactttcagattaatgaagatatcagttgcagagagggctattgcggttccttagccatggcaatgttcgtgctaccaccgtgttttttttttttgttatgccattacttgccctgcaaaaagatatgcaagagtataatggaatagatatttttgtattccgaaagatatgcgattaggtttgaggttttttattcctcatctttcctacgctgtgattatgtacaagttcagggaaatgctgaccctaaggtgggaattgttgatttgagatcgatgtgattatatctgtcagatcagcttt

SEQ ID NO: 25170 - DNA, 1818 bp, Oryza sativa
  ref <308>: DATABASE ACCESSION NUMBER: AK100612
  ref <309>: DATABASE ENTRY DATE: 2002-08-28
gacccgatcttctcttgatatgggcagcggtggaggaggagggcgcatgcggctagtgaccgcggcatcaagcgatccctagccaccatcgatccagcagcaagcttgaagaaggaggtcaaggtggagttggaaattctcatatccgattttagttggattagagtccgattcatttagtcatttagtttcttttttccagatggaaatttggatatggtcttctcctatgtatccttgtgctgattttttattgggtggattagagtttgattcctttcagtttcgtgtttaactcgggaaatttagaatttggaaactacctagatacgggctacatgcgcgaggctgagatgacgcaccgtgatggatggagttgggaagcgcgttttgtgcaaccggttgcaaacccaactcatatctacaccgttcaatgttcattgagattcgtgcggagaatcttaatcttaactaattaaaagattattagtaattttaccagatagttaaatgcccgtgcttcggtacggtgtattaaaactaaaaatatttaagttcaaaaaaaaactaaaaatatttgtttttaaccaaagttatttttaaccgaagtctccaatgacagagagtaatatagtagctcataataaattattatttaatagtgcgttgcaatggaaaaaaaatactgttatgataatgattacagttattttatagttccatgggagttataagatatagttctagacataaacaataccccttctctcccaacgtaagcgacagtagctgcgccttttcccaccgcaggtcgtaaaataatatgatatggttggatttaatttttattaaattaaccatgattaataacgctctttgaaacttttttggaattttcggagcttcattgctaattttgacaatacaaacatcatttcagcatttatttaaataaaaatgtaaataaaaaccccaatttctctatgggccatttttagtctttttactgtctcatcccgtaaataaagtctaatttacctcctttaactccttctctgattgcgcaaacttgcaggtctatttggaggcccaatagtccgacggcccgagcgggagaacccggaaccatccgatcgaatggacggttcagattgatccaaacctacataaatatctgtagccaaaccctaaccctagattttatttccctccccacctccccactcgccccgatcccctctctccctcgaatcgaaaagcgatggcggccttacccccgtagtagcggcgacctcccccaccgagcagcgttggcggcgccctccccccacgagcggctactgtggcgcccttccccctctccccgcgagcggcggcggcggccgctccctccacgctgtctcgcctccctcgccggcagccgctccctctacactgtctcgccactctcgcccccttctcctctccctcggtggatacggcggcggttgcggcgggttgatggtggccgcgggcggatcggcggcggcttcctccacccccgtttgccttcctcccacggcaaaggcggcggcggccgcggtcggatccggcaacggcgactccctccgacggctgtggtggcgtcggcggcggttgcgacggccgaggacggctatggcaacggcggagggtggctgtggcgatggctggtggcggatccggcggcttcttcttttttatgtatatttttgtgaagttttgtgacgtattttgtgatttggtgattattgtggttgttttttttgggcaaagagtggttgagttttggttgtgttg

SEQ ID NO: 25171 - DNA, 2112 bp, Oryza sativa
  ref <308>: DATABASE ACCESSION NUMBER: AK100613
  ref <309>: DATABASE ENTRY DATE: 2002-08-28
ggcgcagacagtaaggaacacaggcgccgcggccacaacccacacgcgaaccggcgaacacgagcgagagtgcgagagcgagacgcatcctgccaccaccggcgaccaaggcccgcagcgagccggtcgcacggtggcacctcgcgtcctcggcccctcctcctcgccatccgcccatccctcgtcggtcgcggcctccccgaacgagctggctccgagccgagccagctcggtacactaacgagctggagcgagccgagccgagccaagatatccacccctagtgtggccacaaacaacaagagagagcagacaccaccacaccatccaaccaaccaaattcctctctcctccgccgcgcccgcgccgcagcaagcaggagggcctccgcccgtgcgatgccggcggcggctaggctacgggcggcccggtgatggcgaccttcttccgcagcgccaacctcgcctccagggtcttcgaccgccagttcctctccccacgccccggcgctactgttaacactgttagacagttctatgagaacttggttccgagttacactatatgtgacatagattgcccagattattcatttcgtaaattcactgatgatggcaactatcttgtggcttttagccggaaccaccaagatttaatcgtgtaccgtcccatctggccaacattttcatgcaatgagccatgcgactctcatgatcttccacccaaagcaaagaaattcgacagcttctttaagcagctctactcaatttcacttgcatctagcaatgaatacatctgcaaggactttttcctttacatggagtgccatcagtttggcttatttgccacatcaactgcacaaagcaacgattcaagtgccactgagggtgctattcatggggtaccatcaattgagaaaattactttctatcttgtcaggctagacgatggcgcaatactagatgagaaagctttccgcaatgattttatcaatctggctcatagtattggagcttacttgtatgaggacctgctatgcattgtctctcttcgatatcaaacaattcatgtcctacagatacgagattcaggcaaccttgttgaagtacgcaaaattggtgcattttgccaggaagatgatgagctatttctccattcacatggtcaggctgcacgaggtgtttcttttcttcctggcatcaagcaacggttgttgtcatttatttttcgcaagacatggaatgaggaatctgatcagaccttgagagtccagcatctgaagaagaagttctattttcactttcaagactatgttgatcttatcatatggaaggtgcagtttttggatcgtcatcacctatttatcaagtttggtagtgtggatggaggggtttctcgcagcactgaacagaattcagcattctttgctgtgtacaacatggagacgacagatattgtttcactctatcagaattcttcggaggagctctattcattgtttgaatatttttatgaccattttcacacaaatccacaaaattcatcgcatggaaattttatctcgtcacattccaataatgttcatgctctcgatcaacttcggacaattaaaaataaagcaaacagcacctcacagtttgtgaaaaagatgatggcgtcactaccttacacttgtcaatcacaaagtccttcgccatactttgacctatcattgtttcggtatgatgagaagctgatttcagcgattgatcggcacagacactgtacagagcatccaataaaatttatatcagtgaaacagccaaatgttgtcaaattcaagataaaaccaggttcagattctggtgcttctgacagcagggcaaaaagaatatcttccttcttgtttcacccatttttccctctcgcactttctattcagcagacatatatgcagccaactgttgtcaatttacatttcaggagatagaacgatattgccgttccctcaattgtatttgtaacagttgtgagcggtgcacagctcagtaaaaattttggccgcttgtagtaggatgttttatcggcaaagatcttattataggcaaaggaaaaatgtgggtttaggttctc

SEQ ID NO: 25172 - DNA, 1816 bp, Oryza sativa
  ref <308>: DATABASE ACCESSION NUMBER: AK100614
  ref <309>: DATABASE ENTRY DATE: 2002-08-28
tattcatgaagctcagaaaacatttgctgtccttgcaaatccacttgattgttgttccaattcgacatcaaagctaacaaattatattgctatagcacaacgtggagaatgcgctttcactgctaaagcaaagattgcacagactggaggtgcagttggtttactagttatcaatgataatgaagaactttacaagatggtttgcagtgacaacgatacttccattaatgttacaatacctgttgtaatgataccacagtcagctggaaaaaagatgaagggcctcttggatcagggagcaaggctggaggtgcagctatattcaccaaatcgaccagttgtagacctttcagcatgcttcttgtggataatggctataggaaccatagtttgtgcttcactctggactgaatttgttgcatgcgagcaagttgatgagcgttataatcagttgacacggaaggatgggcctaattctggaacaaccaacagagaagataaagaaatcttcgagatcagtgccaagggggctattgtttttattttagtagcttcagttttcctcctcctcctcttctacttcatgtcttcttggttcgtctggctgctaattgtattattctgcattggtggtattgagggtatgcatgtttgcttggtcacacttctcactaggatttgcaaggattgtggacagaagactgtacaactccccttttttggggaggtgttgaccctttctgttctgattgtaccattttgcactatctttgcaattctttgggctgtctatcggcatgcttcttttgcttggataggccaagacatccttggaatctgcctgatgataactgtgcttcaaatggcacgcttaccaaatatcagggttgcatcagctcttcttagtgctgcatttgtgtatgatgttttctgggtgttcatttcacctcttatattccatgaaagtgtcatgattgcagttgctcgtggtgataactctggggaagcaattccgatgctcttaagaatacctcgtttctttgatccatggggtggctatgacatgataggctttggtgacattattttccctggattgctagttgcattcagctacagatttgatagagcaagcaaaaggggcctcttcaatgggtattttctatggctgacggtgggatatgctgttggccttttccttacctatcttgcgctcttcctgatggacgggcatggtcaacctgcgctgctgtaccttgttccatgtacattagggcttattgttatacttggttggtttagaggtgaacttcatgatctatggaattatggtagaagtcaaacagaaaatttagtcgacgaaccatagaagaatctgcggacaattgagatactaattgcccagtggatctcctggaacaatatcagaaatacaaggagcagctggaagttattttttatatattatgggcatgtttgacatggctccaaccgctatcttgtccgaggagctggagcctggagccggagtgggtggatctgccctataaaatacatactctctgtcctaaaatatagcaacctagtatgtccacattcgttatactaggatatgtcccatccagtactaggttgctatattttgggacggagggagtacctttttccagcttcacaagtttagcttcatatcaggtttggagcctgtgataatttgaaaataaaccagtgtaataatgtctttagttttgaaccttgtgatgataccacactgacatgccggtataatactgccaaatagagtgaccgggcttgc

SEQ ID NO: 25173 - DNA, 4637 bp, Oryza sativa
  ref <308>: DATABASE ACCESSION NUMBER: AK100615
  ref <309>: DATABASE ENTRY DATE: 2002-08-28
gaattaattgactgggctttggcattgggaccgacgtgcgcgttgcgtcgcgtcgcgtgcgtctcccctctctttgcgttactaccttttccttttccttctttcttcgtttctttcccctctcttttgagatgatcctcccttccttttcctttattttcttgagagatgagatgtgttcgatttcagctttgattatgccaagaagaactccgattatatactactccaccgtactagtagtatagtagttgtaaagaaagcaagttgggtcaaagaaatcgaaggcgatctcgatctatctatctatccgtgtagcactagcagtagcagtagcaggcagccatagatcgatcctcgtcggcgtcgcgctgtggttgcggcggatgctgcagcgggcggcaagcaatgcctactcgtggtggtgggcgagccacatccgcaccacgcagtccaaatggctcggcgccaatctccaagagatggaaaccagagtcaagatcatgctcaagctcctgggagaggaagccgatacgttcggcaagagagccgagatgtactaccgcaggaggccagaggtgattaaccatgtggaagaggtttacagggcctacagagctctcgttgaacgctacgaccacttatccaaggagctgcataaggccaaccacaccattgctactgcatgcccacaacacgacgtctccttgttacaagaacaagacgatgctgaattcacacccatcagaatacaggaatccactactactgtacaggaggttttgaacccaaaaggacatgcgcgcccctgtgctcctcacttcaccaaacagaatgcgcaacaagagatcgacacacttcaaaaggctatacttgtcctgcaaaccgagaaagaattcgttaagagctcttacgagactgggattaccaagtatcgggagatcgagaagcagattgcagatatgcaggaccaggtatgccacatccaaaatgagtttgatgcacatgcgtccatcgaggatgatgaagcccgtgccctgatgaccattacagctcttagatcttgtcaaggcacagtagctaatcttgtgaaaatatttgaagagttagtcagggttgcagcaggggagtccgaaaaagtaaattatctccgacaaaaactgtatgctatgaactacatcattgacccgtctaagggagaagttggcacaacaaacgtcgcagtgaaaaatagagtttatcctaatactcaggaaatactggagctgcaacctatatatgaaaaaatcgaaaagttttttgagctcaactctgaatctgttgtgcaggagatggcagagagagttgatgagcttgttgataaggtcatgaacttggagctcaaattcccaaagcagtccgctcaaatcaagcagctgaaggaagataatgatagcctcaaagataggttggatgatctacaagatgagatagcacttcgagatgatccaagtgacttaagtgaacagctcaagttagcagaagatgagttgaacagagtcaaggctcttgaaagatctgttattgaggaagaagttcttgttagcacagtcttttctgaagttgttagttgcatcactaatatctcaaaggcctttggatctattgatccagaggacatgactagtttatcagctgcagttgaaaatgatggggaaataacatcagatgatatcagcacctcactgccagaagaagaattcaggggtacagaggaagcaactacagatgataatttgggcagagacaggtgtagaaaagaagatgcctcaggagttgagggtcatgattcactagatggtactgatggcattgatgactgtaagaatggcaacgaggaaaactttcaaagtgaaaatcgcttaatccaagaagacttgatggataaaaggtcaatacaagctagcaataacattgatcgaattgttattccaggcaaagaaaatggttttaacaacgcatgtgaaggcaaaatagattgcagcccatcaggtaatacgaagaaatatagagacataggaaatgatgttattgacaactctgttcaaggggaaagtttgaaaggtgaacatccaccaacggtaataagtcagactcacctcccacactcagaatgtttagatactttaaccaataaaagtgactccgatgagaaagggtcatcagtggttgttactgtgaattcattcggaggcagcaagagaatacaaggcttaaggattggtggcgatgaaaattctatgtctgggaacagcttgatccaggaagaactcagagatgacaaatcactaaaaacacctggatatgttaatttggttggttctacaaaccaacatagtttgagtgatggaagcaccactgaagaaatctcattacccaaagtttctaatagttgtttcagtgatgcagatatgagactggaattatgtcatactgaagaagcaatatctgttgaagaatggccaaaacaagatggtcagctgattgccccagaaactatgaaaagtttgaacggaggcagcaaagttgactcatctgagaaaggtggccgcacttcattagagcatatgaacagcatacaggatttgaagactagtgaacttgtggatgcacattcgtcaagagtgtatcagcaagtacccaaagtaacaacaaaatcaaacaatattgctagttgcattcctcatggtgagctagagatgagaagttcggatggcagagaacatacaagacaagcaagtaccttgagcaagcctggaagcatgagcttgcgcgtcaattctagtttggttgcagaaagagatgcacctagctggcaggagtttctccttgatggcattgaaggtagagaagcattattgctagacgactacactttaattctccggaactataaagaaacaaagagaaggcttgctgaattggaaaagaaaaatgagcaacatcccaaagagacaaagacagtaataagggagttgaggaatgcaaattccatgaaatatgttgagatccagtccctaagagatctcctggatccttcagaagatatatcatccacacatagtaaaatgggttttaacagatcaaatcatcctttggacacagaaatttctgtgctggagggaatcgatgtaagacacactggtgtacggaagaatacttcacctttcgaagtgaagttcagatctgagattgatgctctggttgaggaaaacttgcagttcttggtaaggtttagcatggcttgccaccgcatgcaggactttgacagcaaatatcaggagctacaaaagggaatgggggattttgaagttaagaagacaggagaacctgatgctgcagccgagtctgatcctgctgaaaagaagttgagagagctaagaactgaactggatgtatggtttgaacagaatgcacttcttgatcaagacctgcagctcaaaaccatgtctctttgcagattgcaggaggagatagctgaagccttgcgtgctagcgcagagactgatggtggtaggtttacaccatacgaagcagccaagtttcaaggggaggtactgaacatgcaacagtctagtggtaagatcgagagggagttacagtcagcactgaagcgcatgagagaacttgaaggcaaggtcaatgacggcttgcagaagctgcgtgagagctttgatctttcatgcaggaggtcatctttggtggaggaagaaagcagcagcaccagctaccacagccaattcaaacacttcccgactagaacaagagtgccattgcggaacttcctattcggcacaaagccgaagaagaaatcaatatttgcctgcataaatcctacgttgcagaaacagttcagcgatctgtgaggtgcgcatacttctttttttttttttcttcttttttggcggtgagcacttgtgttaatatatatcctgggctcatttcagtagctaacttgtctgtctttgcttgcagttggcagacactgtagaatacatgtactccctctgttccaaaaaaagacaaaccctggttccgtacccgtttgaccgtccgtcttatttgaaaaaattatgaaaaaaaaaataaaaagacaagtcgcgcataaaatattaatcatgttttatcatctaacaacaatgaaaatacgaattataaaaaaaatttatataagacagatagtcaaaattggacacggaaacccagggtttgtcttttttttgggacggagggagtaactagtaaccattcatatacttgggttcgcttggagctggaccacaggcggtcgaatctcgtggtgtcacccagcttattagatgggaacacatgcttgttaccatagatttgctattattttggaggcaaaacttattggcatttgatatgttgtacacaagggtagtctctagtgttaaaattatggtttctgagagtagaacatgagttttaattttgagggagttccatggagagctagctccggccatctgatgcacgcatcacgcttgtcattttagcgatctgtatgcaacctagctatttcattaatttgttcattacattgactactcaaaaagaggccctgtatattaatt

SEQ ID NO: 25174 - DNA, 2441 bp, Oryza sativa
  ref <308>: DATABASE ACCESSION NUMBER: AK100616
  ref <309>: DATABASE ENTRY DATE: 2002-08-28
aagaacttcttcttctcggtgtctacatccaccggcatcacgctgctaaagaatttcagcgtgtacatcaccgccaaagcgctcagccaggcgtacatcatcagggagttcacactcccaccatcaacaactggctccttgtcgctgatcttcacacccacggcgatgaacaatgcgtcctacgcctttgtcaatggcattgagatcatctcgatgcccaacatcttcagccaagcagcagcgagtgttgatatcgccggcaacgaggtgagcaccactgacagcagcctgcagactatataccgcctcaacgtcggtggttcatacgtggctccgacaaatgattctgggctgtcacgtgactggtacgacgacacgccatatatctatggtgccgcagtgggtgtgacctaccaggctaatgacactgtccagatcaagtaccctaaaaatgaccctgatgcagagtacgctgcaccggcaagcgtatacctcaccagccgatcaatggggcctgacccgaaggtgaacaagaactacaaattgacgtgggtgttcgaggtggatggcaacttcacctacatcgtcaggctccacttttgtgagctactgctctccaagccgaaccagcgggtgttcgacatcctgatcaataacaaaaccgcccagtccggggccgatgtcatcgggtggggaggtcaatttgttccagtctataaggactacgccacaatcatgcctggtggtgctggtgacaaggtcctgtgggtacagctgatgcctaacgttgggagtgggtcagagttcttcgattctcttctcaatggactggagatcttcaagatgagcgactcttctggcaacctggccggtccgaatcccgacccttccaagttgcttgaggaagctgagtcctcagctcaagggaagttcaagtccaagcctagcaacctcaaggccaccgtgatcggcggtgctgcaggtggcgctgccgcgtttgggattgttgcggccatctgcatcgtggtgtatcaatcaaagaagaggaaggtgctaaataacagtgcatcccactcatctggatggctgccagtgtatggtggtaactcgcacacaagcaccagcaaatcgtctggtggcagaagcgccgccctgatcaacccaaacatcacggccatgtgccggcacttctcatttggagagatcaagtcagcaacgaagaactttgatgaatcactggtgattggagttggtgggtttgggaaggtgtatcggggtgtggttgacggtgacaccaaggtggctatcaagcggagcaacccgtcgtcggagcagggcgtgctggagttccagactgagatcgagatgctgtccaagctgcgacacaccaccttgtctcgctcatcggctgctgcgaggacgagggcgagatgatcctcgtgtatgactacatggcgcacggcacgctccgtgagcacctgtacaagggtggtaagccggctctgtcatggaagcaacggctccagatcacaattggcgccgctcgtggacttcactaccttcacaccggtgccaagtacaccatcatccatcgtgacgtcaagacgaccaatatcctcgtcgacgagaagtgggtcgccaaggtctctgattttggcctgtccaagactggcccgacggccatgaaccagacccatgtcagcaccatggtcaaaggaagcttcggatacctcgacccagagtacttccggcggcagcagctcacggagaagtccgacgtctactcgttcggtgtcgtgttgttcgaggttctgtgtgcacggcctgctttgaacccgagccttccacgggagcaggtcagcctcgccgaccacgccatgagctgccagaggaaaggaacccttcatgacatcatcgacccgttgctaaacggcaagatcgcacctgactgcctgaagaagttcgccgaaacggcagagaagtgcctggccgaccatggcgtggaccgcccgtccatgggcgacgtcctttggaaccttgagttcgcgttgcagatgcaggagacatttgagaacggcgggaagacggagggagcagacagcacgagcgacagcaccaccacttctgtggcggacagcatggctgccaacgccgcagcgctgtcgctgatcagcgaggatatggacgaggaggacatcgctaacagcgtggtgttctcgcagctcgtccgcccaactggcaggtgagatggatcgatcgatgggcatgggaacgagttgtattattcggcggggatggtaggtggaacaggccatgcgtgcataccgtttgtttgggactgggatcgatttactggtgttgaactgttcgtatgtacgtaacatgggagatcaggatatgtgtacatgtgttgcattattcttgatttattatttgattcc

SEQ ID NO: 25175 - DNA, 2945 bp, Oryza sativa
  ref <308>: DATABASE ACCESSION NUMBER: AK100617
  ref <309>: DATABASE ENTRY DATE: 2002-08-28
gaatggaatggaatgtaatacggtattaattggaattttgcatttgcagctgagcgtgtacggtcccgggcgcgtggatccgtcgagtcttcaggtcctccgccctgccctgcaatactccgtccacgtcaccatcccgccggagttgctctatggccgcctcattctcgtcatggccaagggcttctgcaccgatgctgccggccaccacttcatcagaaccgccaactctaccttcaccctgcgcttcgacagacggagcgactcgatgaacatcggcagcagcatccctgagaagctgcttcagatcgagggcgccaccagggtggtggaagccaccaacgacgacaaggacctcagggtatacctctccttcgctgaacccgtcatgaattcttcctcccaaatactcgccgctctcaccgccaccgatgccattctcacgccaaccaaccgaagcacgctcgggaatcgccgctttggatacctcgttaagaggacatccaacaccgccgttgtcactgtttcctgtgacgggaattccataatcagcagacaaggaactcctgtttcttcttcagagccatacacttttctttacgataatcaaaggccttctgttaagctggcgacatccactgtcagaacaagttcacgcaacatcccggttttgataaagtttgcaaagcctgtcttcaacttcacttcctctgcggtgcaggtttccgggggcaatctcctcagcttccatgaagctagtaagagcatatacacagcgcagatacaggcggttgataatctggtttcggtccacgtcgccgagaactctgctcaggacgttgcaggaaataccaacttaccgtcagatcgtctggaagtgaggcattattctgttcctgcatcatcatcatcgatcgcgatcgtgacgacggtaatttttacagcaaccgcagcattcgccacgctgctgactgtttcaacatcgtcgctactggcatcaggtgtcatccagaggccgccttcttacctcgtatccgagccatcacgaaatctcttgagaatggcgtgccacattcaggtattcgcgctgtcgcgatggctgtcgataaatctgccggtggagtactacgagctgagcaaggggctggagtggagcatcccttacatgcgcctcccatgggaaggcccctctgccgatcctttcgtcggctactccaccatgcccgccatcgcctactccgagatgctcgaccgcaccgctctcgccgccgacgtcctccgccgccctcctgcagctccaggagttgcaatggccatgccgtcgacgtcgccattggacggcaagcctctcaccgccatggagtaccggtatctgttcgagaaccaggacatgaagcccgaggcgcagatcatcatgaagctgcaggatctggacggatggaagtacttcttcaggaacatcttctggctggccgtcatcgctgccgccttcctgctgctgcacgccaccctcctcctctacctcaagctgcgccacaggcacagccacacacacgtcggtgcgctcgtgttccccaggctggagctgatgctcgtcatcctcgccatgccctgcgtgtcccaggcgtcggcggcgctgatccgaggcggcacaacggcggggctggccgtcgggatcgtgctgacgggggtgctaacggcgttcctggtagcgctgctgctgttcctgtcgctgggcgtcaccacggggaggctgctgcagtacaaggaggtgcaccaggaggggcgggagtaccactggtaccaggagattgttcgccggacgctgggacccggcaagcgtggacagtggacgtggaaggaccccgcccgcaccgcctgcctcgtcaagctcggcccgctcttcgaggacctgcgcggcccgcccaagtacatgctctcgcagatcgccggcggcagcggcggcaagcgcgcggcggagcggatcatcgtgtccgacgacgagaacgaggacgccgaggcgccgttcctgcagaagctgttcggcatactgcggatctactacacgttcctggagtcggtgaagcgggtggcgctggggatcgtggcgggcgcgcacgcgtcgtcggaccactcgtcgcgggcgcacgccgtggtggtgctcgccatcgcctccttccagctcttcttcatggtgctcaagaagcccttcatcaagaagcgggtgcagctggtggagatcgtggcggtggcaagcgaggtgttggtgttcgccgcatgccttcggctggtggacagcgggggcagcgccgtggcggaggggagcggggtagggctggccatgctgacggtgttcgcggtggcgttggcggcgcaggtgtgcaacgagtggaacgcgctgtaccggcaggtgcggctgctgagctcggacaggaggtcgttcgtggagggcgcgaaggcggcgtgggtggggctgctgctgctggtgctgccgtcgtcggcgcttggagagcagctggagaagatgaagaagcagcaggagcagccggaggcagtggcactgggtggtggtggtggtggcacggagaggtcgtggctggggcagctgagggagatggccaaggcgagcttcagcaaggagggacagggaggggaggcggaggcgtcggggagcagagcaaagggtgggagccggagcatgtcgtcggtggcgtcgtcgtcggactccaaggcgaagggacccgagaactcgcattcgcagtggagctccaagtccaagggactctacaaggatcttgaggccatcttctccaacaggtagcagatgggtacggcagcagctacaatatatactatgttcttcgtgtatgtatatgtactagtatagcaatcaatcattcaatgtatgcaagacgatcaatccagcgatgaagctggtgatgttc

SEQ ID NO: 25176 - DNA, 1673 bp, Oryza sativa
  ref <308>: DATABASE ACCESSION NUMBER: AK100618
  ref <309>: DATABASE ENTRY DATE: 2002-08-28
gggcgtgggtcccgcccccccctctctctcaccctctccccatccctccccgcccaacgccgccgtcgacccgtcgtcgtactcccgcccacccagcgccgccgccgccgccgccgtcctcccaggccgcccgcccagcaccgccgtccatcgtcgccttccccgtcctccccatccccccgctcgagttgcgggtgaagaggggctcgaagcggctgctccgccaagcccctcctctcgccctcctcccctctcgccgagcttgccgtcgccgccgtcatcctgttgcatcctgctggacccgcccctggaagaagaagaagtagcttagtgttgatttgagcataatatgggtgccccgaagcagaaatggaccgcggaggaggagtccgccctcaaggccgggatcgcaaagcacggggctgggaaatggcgcaccatactcaaagacccagacttcagcaacgtcctgcgctaccgctccaatgttgacctcaaggacaaatggcggaacatgaacgtaaccgtgaacgcgtccggtgcccgcgacagggtgaaagcgcccgtcgttaagaagccaagatccgctcctaagcatgaaggccactctacctctacagctattgccgcggtaacttcagatggtgatgatgatgttgcggagcctgtgcctcttgcaacgtctacttcatccaagagatccctctcgaggctagacaatatcatagtagaggcagtaaggagcttgaatgagcctacagggtcatacaagacagccatagctaattacatagaggagcaatactggcctcctgctgattttgatcatgtcctgtcttcaaaactgaatgatctgacagcatctgggaaattgataaaggtgaatcgaaagtacaggatagcccctagttcatctttgtcagaagggcgaagctccaaagtagtgctgctcgaagatataaaaaaagaaccaacaaagttagatagggaagatgttgcagtcctcactaaatctcaaatcgatgctgaattagctcggatgagaaccatgactgcagaagaggctgctgctgctgctgctcgtgcagttgcagaggcagaagctatcatggctgaagccgaagctgcagtaagagaagcagaggctgcagaagctgatgctgtagctgcgcaagctttcgcggaggcagcaatggcaacatttaaaaacagaagttcagcaaaattgatcattcgagcttgaagctacctgtgggagctggtgcagcatcagtttcctccgaccttgttaaccaaattgcccaaagccccaaactggaattgcaccgcatctgctgaatttgccaacaattttgttacgcctggatctgcacaggcattgcggctacggcatcttttgactcgctcatggtagtaacccacatatgctgggataatcagggagtgaccagtagaagtacatcatggttatccccattcctccttgggtgattgtaattcaccttgtaatcggttttggcatcaaataatcagagtattgcgttgttgttgcatgtacagatgtaacagtgtgtgtctggttgactggttcacttcattgtgtatatcaactggcttttttttttaagctctttctcatggataatatggtaatgctgcagcgtgatgtattc

SEQ ID NO: 25177 - DNA, 2101 bp, Oryza sativa
  ref <308>: DATABASE ACCESSION NUMBER: AK100619
  ref <309>: DATABASE ENTRY DATE: 2002-08-28
gggcgttctctcttccttccttctcagcttctccaagctcgcgcgcaagcaagccgccgccgccgccgccgccggagagatggactcccgcggcttcgattccgaaggccgggaattctccagcgccaccgagatgtgggcgcacgaaatcggcgccgcggcggatgccccggtctccgccgcggtagccgaacccgctccggcccccgccgccggaagcaacggggtcgccggcgaggaggaggcaggcggcggcgggaagcgggaggagtggtactccaaggcaatcgcctactggcaaggcgtggaggcgtcgaccgagggtgtccttggagggtacggatgcgtgaacgacgtggacgtcaagggcagcgacgcgttcctccgtcctctcctcgccgagcgattcggcgccgcgaggcgccatctcgtcgccctcgattgtggctcgggcatcgggagggttacaaagaattttcttcttaggcatttcaacgaggttgatcttgttgagccagtgtcccattttctagaagcggcacaggaaaatcttactgaatgtatggaagtaggggaagatacacataaggctgctaatttttattgtgtacctcttcaggatttcactcctgatgaaggaagatatgatgtaatatggatccagtggtgcatagggcaacttcctgatgatgactttatttcattttttaaccgtgcaaagattgggctcaaacccaatggattttttgtactgaaggagaatattgcaagaaacggatttgttttggacaaggaggataacagtatcactagatctgatgcgtacttcaaggagctatttaaaaaatgtggtttatatatccatagcattaaggaccagagcgaccttccaaaggaattatttgctgttaaaatgtatgcattggtgactgaaaagccgaaaattcaaaaaaatgggaagagaaggcgccctaaaaattcaccccccgttgagaaatccgtctccgacaacaattcgttgtcagtccctcgctttgtcccggcggatttcgagacccgcttggagctcatcccctttgtcagaggggtgagtcaacttgtttcgccggctagcgggcctagcccatttaccgagctaaacgagtttgatgagggatgcacagcggttactcgttcgggcacttttagcccactgcaacatggagcagtccgttcgggcccgcctcgacgggtacaaggaccgtctacgtcggctcgagggagaccttggtcgaaaaaaccaggagcgagaggtggtggccgaatccctaaggcaggctaaggccgaaaacaaaaaactaaaggaggaactggagaaggcgaagcaccagaacgctaccctcttggactactacaattcgtccgaggggaagatgaacagccttcgccaggagctggactaggcaaaggccgcagccgaaaccacggcgaaagagtctgcccgctccgttgctgggattacagattcggccaagtcggccagctatactctccggcttgcccttcatgagttgggcgcccaggccaaaggcgttccaggcaaaaatgcttccgcgctggacttctcggaatggacacaacaagccggaggtgccgtggctgagaccgccagcaattatggtgattgttgtgctcgggtttcggcggctttcgtgcttggggtgctccaggaaaatgggtgcgaacatgtcgcccaattcccggagtttcgtcaagggagattggccggagaagtcgtaccccatctctactactcttcgcgcttggcgaaaagagtactggcagaaggaggggtgaaccatcggctaagggctatctccgcgaccaactggagaagagcgcgaaggctcaacgcgaagcggaagaagccgcggaggagcccaaagctggcgacggtgaagctgacgcagctggcccagatcacccagaggtgtgaggcccttcgccttttagcctccttgtatctagggcagctttcgtagtgtgggcttcgcccttttgcaatgtagccaaatgcgggacacttgtgtttatatattaatgaaaattgggaagtttcgcc

SEQ ID NO: 25178 - DNA, 2280 bp, Oryza sativa
  ref <308>: DATABASE ACCESSION NUMBER: AK100620
  ref <309>: DATABASE ENTRY DATE: 2002-08-28
gacccgccacgtccatcgatcacgccgcctctctttgcgcgagagaaagagagcgagacggaggggggaaggatgggggagggggtgaaggcgatgctggcgaagccgatccagctcgcggaccaggtagcgaagcaggccgggtggcagtgcttccgggcggagtgcatggacctgcggtcgcgcgccgagaagctggcggcgctgctgcggcaggcggcgcgggcggagctgtacgagcgccccgccgcgcgcatcatggccgacaccgtgcgggcgctcaacaaggccgccgggatggcggccaggtgcttccagagccactcccgcctccgccgcttcttcacgctcaacccggtctccggcctcccccgcaccctcgccatgctcgacaccgcgctcgaggacgtcgcctggctgctccgcatctcgtccccgcacgccgacgctggcggcggcggcgacgacgacgactacgacctccacggcctccccaacatcgcgcagaacgagcccatactgttcctcatctgggatcacatcgcccggctccacaccggcaacctcgccgcgcgcgcggacgcggcccacaacctcgcgtccctcgcccgcgacaacccccacttcgccaagctcatcatcgaggaggacggcgtcgcgcccctcgtcaagcttctcaaggacggcaccgacgacggccaggaggccgccgccacggcgctcgggctcctcgcccgcgacgaggagagcgtggataagcttctccttgccggtgtctgctccgtgttcgcggccgccttgaaagtgccgccgatgcgcgtgcaggccgccgtcgcggagtccgtcgcggctctcgcgcatcacaaccagaaatgccaggacctgctcgcgcagaccaacgccgtgcgtcacctcgtcggccacctcgccgccggaaccatccaggagcacagtagatactatgttgcctggaccggctcgaggaacatgaacatgacatcccttcactccgttgtgcttgccaagacgctcagcgtgcatcaaggtggctctggttcccctgccaatgaaccgccgagctcgtcggaatatccgggtagccagcagcaagcaggaaagaaccagatgcaatcggtggtgcaatctgccatggctgccaagaccacggcgaacggagccacggttccacccggctgcaggcaccagccgacccccaacggctcgagcggtcgtggatcgcgcgaggccgaggacccggccaccaaggctcacatgaaggccatggcggcgaaggctctctggaagcttgcccgcggccatgtcggggtctgcaaaagcatcaccgagtctcgcgcgcttctctgcttcgccaagctcctcgagcaaggcgacggcggcgccggcacggacctgcagttctactccgcaatggcgatcatggagatcacccgcgtcgccgagcacaacctcgcgctgcggcagtcggcattcaagcccagctcccctgcggccaaggccgtcgtggagcagctcctccgcatcgtgtgcaagggcgacgtcgacgacctgctgcgcccgtgcatcacctccctcggctgcctgtcgcgcacgttcacggcgagcgagacccgcgtggtccgcccgctggtggagctgctcgacgagcgcgagctgccggtcaccaaggaggccgtggtcgcgctcaccaagttcgcgtgcaccgagaaccacctgcacgtgagccactgcaaggccatcgtcgacggcggcggcgcgcggcacctcgtccagctcgtctacctgggtgaccaggtgcagatcgaggcgctcatactgctctgctacattgcgctgcacgtcccggagaacgaggagctcgcgcaggccggagttctcgccgtgctcctctgggcgtccaagcagccacacatggtgcaggacctgcgcgtcgacgcgctgctcccggatgccaagggtcggctcgagctcttccagtccagagcatctcggtgatcaactggtgacggcattggcggcgatcaccggagttcaagaagatgagttagccctcgatttactgcaaaatcgaagtagatctatgtcgattgttcattagtagttccaaattcttgttgttttgttgttagaatgtatatatcacaccttcaatttgttgctttgtctcaaagaaattgctcggtgtattgattagtatggaggcgcttttcatgtatataacatttttgtatctgcaaaattggaaatggcgtgttcatatgc

SEQ ID NO: 25179 - DNA, 2637 bp, Oryza sativa
  ref <308>: DATABASE ACCESSION NUMBER: AK100621
  ref <309>: DATABASE ENTRY DATE: 2002-08-28
ggccagctgctgctccgctacttcccactgcgcgattcaagaacacggaggaaggttgaaactctgaaagcagcagcagatacaggaggagataagataagtaaattaattggaagaaagaaatcagtggggaggaggctatagaagggatctttcatgcgaggaaagcgcctttctttgcgtttttagtggggagagcgtgtgagcattggtgtggggggagaagaagaagatgggaagagcggatgcgccatggctgccgcttctgctcctgtgctcctcctgctgcttctgcatttggccccagaagcaaatcttggtcgctgcagacaccgaccctaatgatgttactgtcctcaatacgctcttcactagcctgaattctccggggcagctcaaaggttggcaggcaagtggtggagacccttgtggccaatcatggcagggtatcacgtgctcaggatcatcagttactgcaatcaaattaccaagcttggggctctccggtaatttggcgtacaatatgaataccatgggttcattgattgagatcgatatgagccaaaacaaccttggtggtggccaacagatacagtacaatcttcccactaataagcttgagaggctcaatctcgcaggaaaccagttcactggaaatttaccctactcgattttctcgatgtctaatcttaagtatttaaatctaaatcataaccaattgcaaggaaatataactgatgtattttccagcctctatagcttgacaacactggatctttcctttaattctcttgctggtgacctaccacaagggttcacatcattgtcaagcctgaagaaattatatctgcagaacaatcaatttactggttatatcaatgtccttgctaatctcccccttgatgatctgaatgttgcaaacaatcatttcactggctggattcctagtcaacttaagaagataaacaatctacaaactgacggaaattcttggagtaatggaccagcaccaccacctccaccgtattcagctccacctccaccaaaccgtccaaacagcccaggtcaaaacaatggtggttcaagttctggtggaagctctgggataggtggtggaggtgtagcaggcattatcatatcattgctggtagttggagcagtcgttgcattctttgtgataagaagaagaaaacgcagagcggcattggaagaacattttgaacagcaccagccattcacttcgttcccttcaaacgaagttaaagacatgaagcctattgaagagtctactacaatagatgtagagtctttgccatcccctgcttcatttagtctgaagccaccccccaagattgaacgccacaagtctttcgatgatgatgatttatcaaacaagcctgtcttgaagaaaaccaatgtggcacctataaaggcaactgtttattcagttgcagatctacagatggcaacagaaagctttagcatggacaaccttgttggggaaggtacttttggacgtgtatacagggcacagtttactggtggaaaggttctggccgtgaagaaacttgatagtaccgtgatgccattccattcatctgatgattttgctgaactggtctcagacatttcaaaactgcatcatccgaatctcaatgagcttgtgggctattgcatggaacatgggcaacacttgcttgtttacgatttccacaggaatgggtcactccatgatctactccatctttcagacgaatacagcaagccacttagctggaactctcgtgtcaagatcgcactaggctctgcccgtgcactggaatatcttcatgaaatttgttctccatccatcatccataagaatttcaagtcatccaaccttctactggattcagaattcaatccacacctttcagatgctggacttgcaagctttatttctgatgcagaattccaggcagcgcaacagagtgctgggtgcactgccccagaggtggacatgactggtcagtacacactgaagagcgatgtctacagctttggagtagtcatgctagagcttttgacgggacgcagacctttcgatagcactagaccgaggtcagagcagtcacttgtgcggtgggcgactccacagctccatgacatcgatgcattggacagaatggtcgatcctgcgctgaagggtctgtaccctgccaagtctctctcccggtttgccgacgtgctcgctttgtgtgtccagcctgaaccagaattcaggccaccaatgtcagaggtggtgcaagcattggttcgtcttgtccagagggccaacatgacgaagagaatgctcgacggagatacttcgtcgcgccgaacagacgaccaagaacaagatttcatatgacaaaaactacacccctagcttttcctgttacatctcaaattgtatttattttgttcgcctatcgcctattggagagaagaatggaaggagaaatagaaaagaaagtcagtttcatcagtacataatcacaggtgttgcttgatatattgtaggaccaggtgtgccattgtatcctgtctacagaacagtattctgaattcctgattgttcattaatgccatcatggtagtagattatttggttatatc

SEQ ID NO: 25180 - DNA, 2535 bp, Oryza sativa
  ref <308>: DATABASE ACCESSION NUMBER: AK100622
  ref <309>: DATABASE ENTRY DATE: 2002-08-28
gtcggatcatcgtcccctactccgaccagccatggcgccgcgcgaggttgccgcagccgcgcgcggcttctcggccatggcgcgaatcgtcggcccggtcagtcccctgcctccccaccaccaccaccaccaccatcacctcatctatccgcgtaagctgttctcccgagttctctcgctgaacgccacgctgctctccgctcttcctccaggaccccaaggccgtcaagatgcggcggcacgccttccacctccaccagtcggggtcaaccacgctctccgcgtcggcgctactcctgccgccgggatcactggcggagccgccgccacttctcgatcgcatctgcgcggctcacggccacgcagggggcgtcgcgcttacctccgcgtcgctcgtcgagccgttcttggtcgaggagcagcgcaatagccccagccaggaattgcaaccgaggttggtaccagaggctcatcttgatgtgctcgttgagcatgaggaatcaaggaacattggaggcgggaagactggagctccacggtggctttcagctcgattacttgccatagttgatgtccaagcatctgctgattctgtattatccttactgcaacatgaaggttcattgattcgaagttcatcgtgggatgtctgctggtcattggctgatgtcaaccagaagcaggttgataatgatgccagatattcccttgagtgtaacaggaaaaatgcttatgctgagtcaacagagccaccaatgttggccaagtctgccacaagaattgctattctaggagtttcaaacttaaattcaagtaatacaagatgtatcaatgtttcactgatgcaacaacgaggggactccttgctgataatgggatctccatttggcatattatcacctgtccatttcttcaatagtatatcagttggtgttgttgcaaattgcctccctccaggcactgccaggagctcattgctgatggctgatgtccactgtcttcctggtatggaaggtgctccagtgtttgacaaaaactcttgccttgtggggatgctgatgaagccattaagacagagaggcagcagcacagaagttcagcttgtaattacctgggatgcaatctgcaatgcatggaacagtgacaaggctggaaagaattggccatcccccaagtgaattagttgatgacaaaagttcagattgtaaatataaggaatcatgcgttgcagataagcataggaggtttgtccctaattcagccaacaatcttaatcagtatgacgtttcaccttcactcacagaagctatatcctcagttgttcttgtcacggttagtgagacatcttgggcttcagggattatcctcaataaaaatggcttaattatgacaaatgcacatcttttggaaccttggaggtttggaagaacttcgccgttaggcttgcaaaacaaaattgcctcatttagtgaacacatctgtggaggagaaaacaatctgctgcagccacaacaatgcaaagtttcaaatgaagatgctgtaaaacatgaactttcattgtttaattttggattaaaaaaggacagggcaatatcggttcgtttggatcatggagagaggaagacatggtgcaatgctagtgtagtttttatctcaaaaggtccacttgatgttgccttgcttcaaatggaaaaaactccaattgaattatgtgccattagaccagaatttgtttgtccaacagcaggctcatctgtatatgtggttggacatggccttcttggacctcgatcaggactatcctcctccctttcctctggagtggtatcaaagattgtcaaaatcccatcaactcaacattcccaactgtctagcgttgtggaggttaacaatatggacataccggtaatgctgcagacaacagcagcagttcacccaggggcaagtggcggtgttcttcttgattcgcttggccgaatggtggggctaataacaagcaatgctaagcatggtggtgggagcacaatacctcatctgaatttcagcatcccctgtaaatctttggaaatggtcttcaagtactcagcaaaaggagacttcaaaattttggagcagttggacaaacccaatgaagtgctctcatccgtatgggcactggcaccaacatcatccccttttttcagtacctccccagaaaatggtagagggggaaaagttctggagttctcaaagtttcttgctgataaacaagaaggtttgaaatctataaaagatatagaggcattccttagagacaggattcccagcaaaatttagatgggaatgtttcgcaaagcacaggtatagaggtccggtggttacttcattgggtatatgctgaaaacctggttcagattaccccttccaaactgttagctgcatacaccattttgaaacatataaattgacaaattgtaacgttgaagccatctccaggaatgtagttaaatttacaggcatgtacagtttgtactaattgaaaagaaatctttgtgc

SEQ ID NO: 25181 - DNA, 1534 bp, Oryza sativa
  ref <308>: DATABASE ACCESSION NUMBER: AK100623
  ref <309>: DATABASE ENTRY DATE: 2002-08-28
ggcggagaggcgcaggcgagggcgcgcgttccccgcaatggcggccacctagtccctcaaggaatcctcgcgcttcttcttcttcttctcggatgcgagagcttgctgtgattgctggctagctagcttgccggaatggagggcttctcgagggacttgctgtgcggcatcggcaagggaggagacgggccccgcggcgaggtgaggccgcgcgtggacatggaggctgaggaggtggagctcaacctcgggctgtcgctcggcggccggttcgggctggacaggagaggggagaagctcgccaggtcgtcgtcggtcgcggccatcttggcggcgccgacggagccgtcggcgccgccgtccgggctcttcaggacgagctcgctgccgaccgtggccgccgcggaggcggcgaaaaagcagggtgtggatgaattgaactgtcgccgcccgagcggcggcgcggaggcggagcccgcggcggcgaggctgccggcgagcgggagcccgtcatcgggctcgtcggacggcgaagggcgcaggcttgaagtgaatatgacagacactctcatgagaacaagttcactccctgccggcatcgaggatgaatggaggaagcgaaaggaggctcagagtctgaagcgactcgaagtgaagaggaagagaattgagaggaggaactctctcacttccaacatttccaaagaggctgttgggcagatattagaggagatgaatgcaggagctgagaaagtagaaagttgcgatgatgttgctacaggcaataagaagacgggaggaaatgtgaaccatagcagtgatagaaaccgctgcactggacttcctccagtccaccgtgccacgtatactcaacaacgtggcagtctgtccggaataccaacaaagcatattccagctatgaaaggatctgctgatgccgaagagcacaacgttccatcggccgctactgagcaccgaaatggagcagccatagcaacaccgccattttcggcactggcggtgagggcagtagctcttgcttccaggggagagcagctgcgtgctacaggaagagttgcggcaagagccaagagcatgggagatgtggagaggatcatgatgcaggagatgccatgcgtgtgcaccaaggggctccccaatggcaagagggttgaaggcttcctgtacaagtacaggaaaggcgaggaggtgaggattgtctgtgtttgccatggcagcttcctgacccctgctgagtttgtgaagcacgccggaggtggagatgtcgcgaacccgcttcggcatatcgtcgtcaaccctatcccgccatccttatactgaacctctctgtcagctcactgctgctcttgcaagtgttactatagcttcagacagcccttcaccttagcttcagaattcagttcagagtagaatctgattgtgagacttgtcttaatgttacaagtgtttattatgctaaggagacagcgggagatttgctcctgctgacataaaaagtggttaacatggctcc

SEQ ID NO: 25182 - DNA, 3669 bp, Oryza sativa
  ref <308>: DATABASE ACCESSION NUMBER: AK100624
  ref <309>: DATABASE ENTRY DATE: 2002-08-28
ggcagaaagaatccgccgccgccgccttctcctcttcctcctgctgctgctggctcccaacttgctctccgggctgaggctgcggctgctgctcccccgcctgcgcgccgccgccgccgccgccgccgtcgtcaggaaaatgtcatcaaatcctgatggaggcagaagttttgctcggagagatattttactcaagatccagtcagatgctcaaaaatggtgggaggagagcaaggtttttgaggctgaacctgggaataaacctccgggccctggggaaaagttctttggcaactttccatatccttacatgaatggcttgctacatttgggccatgcgttctccttgtctaaacttgagtttggtgctgcatatcagaggcttcgtggttcaaatgttcttttgccatttgctttccactgtacgggaatgcccatcaaggcctcagcagataaactctctagggaggcgcaacaatatggatatcctccagcgtttcctgaagtagaggatgattcaagtgcagaagttgctgatagtagccaggctgacaatgcggcttctgttgtcccagataaatttaagagcaagaaatctaaggctgcttcgaaggttggcatgcagaagtttcagtgggagatcatgagaggctttggcttatcagatgaagaaatcgccaaatttcaggatccttaccactggttaacttacttccctccattggcgaaggaggacctcaaggcctttggtctgggctgtgattggaggaggtcattcataactactgacatgaaccccttctatgatgcatttgtccggtggcaaatgagaaagctgaagaaaatgggcaaggttgtcaaagatatgaggtacacaatctactctccattggatggtcaaccttgtgctgaccatgatcgagcatctggtgaaggtgtacagccacaagaatatgtgttaattaaaatggaagttgttccaccttttcctcccaagttgaagaccatggaaggaagaaatgtttatttggcagcagccacattgagacctgagacaatgtatgggcagacaaactgttgggtattgcctgatggaaaatatggggcctttgagatcaatgacactgatgtcttcattgttacatcaagggctgctcttaatcttgcatatcagaatctatcaagggtcccagaaaaaccaacttgcttaatggagttatctggttgtgatctgattggtttaccactgaaatcccctcttgccttcaatgagatcatatatgcacttcccatgcttactatcttaacagataaaggtactggcattgtgactagtgtcccaagtgattctccagatgatttcatggcactacaggatttagtcgcaaagccagctttgagacagaagtatggtgtcaaagatgaatgggttcttccctttaaggttgtaccaataatcaacattcctgaatttggagacaagtctgctgagaaggtgtgcctcgatcttaagattaagagtcagaatgacaaggagaagcttgctgaagcaaaaaggatgacatatctgaaaggttttactgatgggacaatgattgtaggggagttcaatggcagaaaagttcaagaagcgaagccactgataaagaacaagcttttggaagaaggcacagcagtgttgtatagcgagcctgagaagaaagttatgtcgagatctggtgatgagtgtgttgttgctctcacagatcaatggtacattacttatggtgagactgaatggaagcagaaggcagttcaatgcttggagaagatgaatacattctcagctgaaactcgtaatggttttgaacacacgttaggctggctgaaccagtgggcctgctctcgttcttttggcctaggtactcgcattccatgggatgagcagttccttgtagaatctctttctgattccaccctctacatggcatattacacaatcgctcaccttttgcaaaatggcaacatgtatggcaaggaaatatcttctatcagaccagaacaaatgacagatgaagtctgggattatgtgttctgtgatggtccagcacccaatagtgacatccctcctgccctcttgagcaaaatgaagctggaatttgagtactggtatccatttgatattcgtgtctctggtaaggatcttatccaaaaccatctgactttcagcatttacaatcatacagcacttcttccagagcatcattggcctcgtggtttccgctgcaatggacatcttatgcttaattctgagaagatgtccaagtccacagggaatttccgaactcttcgacaggccattgaagaattctcttctgatgccactagatttgcccttgctgatgccggtgatggtatggatgatgcaaactttgtctttgaaacagcaaatgctgctattttgaggcttacaaaagaaattgcatggatggaagaggttatagccgctgaatcttctctgagagctgggcctccctctacctatgctgaccatgtgtttgccaacgagataaacattgcggtgatagaaactgagaagagctacaatgccttcatgttcagagatgcccttaagttggggttctatgacctacagttggctagagatgagtacagactctcttgtggagcagcaggcatgaatcgtgaattattatggcggttcatggaggtgcagactaggctcattacccccatttgtccacactatgctgagcatgtgtggcgaaacatcctgaggaaggaaggatttgcaataaaggcaggctggccaattgctggaaccccagatcccacactaagaattgctaacaaatatttacaggactccatagttaaattcaggaagctgctccagaagcaagaatctggttccaagaaacccaagaagggaactgcacctcctccatctgagcaaaacaagctgactgttggtctggtctacgtcaatgagaactattatggatggaaagagcaatgtttgagggttctccagtctaaatttgatagccaagcacgtttgtttgctactgatgaggagattaatgaagcattgaagaactgctccatcggacaggaaactaacttcaaacgagtccagaagctctgcatgcctttcatcaagtcgaaaaaagatgaggcgaggagtgttgggccccacgctttgaatttgaagcttccttttggtgaaatgagtgttctcgaggagaacttggagctgatcaagaggcaggtaggccttgaacatgcagaggtcctgtctgcttctgatgaggctgctcgtgctaaagctggcgtgcatgcttctatgctggacaagaccccgccttctcctggtgagccagtagcaatcttcatgagcaaactagacctcgaagcgcggtgctgagcttaactgtcacaatgaaattgcaaagtgaatagttaggaggagttcactgagatttccttattttcatgcacaagttaaagttatgttagcttgcagcttctacagtatcatagtattttgtggaaaagaacagtttggttattccctgtaacagtgatggtataagaaacccattttgaagaataattgagtgtattgaatgagttttatttgcatcaggtttgaatttgatgcttctg

SEQ ID NO: 25183 - DNA, 2701 bp, Oryza sativa
  ref <308>: DATABASE ACCESSION NUMBER: AK100625
  ref <309>: DATABASE ENTRY DATE: 2002-08-28
ggccctctctcttcctcggcaccggccggccggagcgagacgccgccagccgccggcaatgcctacgctggtcgccgccggcgggatgagagctaccgagcgcgcccgccacccgcgatcgagccacggtccccgtccgcacctggaccacatcatggctagggcgatgtgcgcccacgccatggaggagtcgacggacaccatggagggcatcatgcgcgtcgtcctcacctgcctccccaccccggcgcccttctccacatcccacggctccctctcttcctcggcgggcggtggcggcggcagcggcggcggcggcgatgaccgcatcagccgccttccgggcgcgctgctctctaacatcgtgtcccgcctcccggccagggacgcggcgcgcaccgccgtgctctccacgcgctggcgccgcgtctgggcgtccacgccgctggtcctcgacgacgtcgacctcctcgacatccccgacgaggacctccggcgcggccactcccaccgcgtcgacctggccgccgccgcctcccgcgtgacccgcgtcctcacctcccaccggggcccctacctctgcgtccacctcacctgctgcaacatggccacccactggccgatgctctcctactggctcagcctcctcgccgccaatggcgtccaggacctcgtcttcgccaaccgcccctacccgctcgacctgcccctccccgtcgatatcctccgcatcccttccctccgcagcctctacctcgcgttctggaccttcccgggcatccccggcggcgcgcgcggcccccacgtcttcccgcacctccgggagctcggcctctgcttcatcagcatcgacgcccaggacctcgacggcttgctccagtgcagccccgtcctggagacgctcgcgctcgtctccaactcctactcccccgctcacatccgcgtgcgcagccgcaccctccgctgcgtgctcttctggatgtcgctggcgcaggagatcgccttggtcgtcgccccgcgcctcgaccgcctcatcctgtggaagacgttcatgggtttccccggcgaaatcttttgccgcacaagggtcaagattggttacgccacagagctgcgagtcctgggctacttggaaccaagaatgcacgagctggagatcggcaataccaccatcgaggctggaacaaagatgagttcagataaaacggtaccaagtgtcaaaatcttggccttgaaggtgcgatttgggatccgcaatgaagccaagttgctgcccgtctttctcagatgctttcccaatgttgagacattacatgtcatgtcagatgatgctcatgatcctaccggcaagctcaatctcaagttctggcatgacgtcggcccaatcgagtgcctgcactcacacgtcaataaggtggtgtttcacatgttcagaggggagcggagcgagctcgcgttcctcaagttcatcctggagagggccgaggcattgcagaagattgtggttgtgttggccaacagagaccaggcctgggtggacgagatgcgcgccaagctgaggcccctggccatggcgaaaagggccagcaagaaccctacgctcttgatcgttgcgcttgaaggtggtagtgcttggtccttccacagagcatccgatctctctgtgaatgacccttttgactactgctgaagctcaagatgatcaggtttcagtatgacagtacctacatgacagccagttagccattttcagatgcttgacaaattttgcacgacctatatcagctctgacaaggataagcagaatttgctgtcacaactagtaagtcttaacaaatactattttattcttggagaatgggaagcttcatgcttcagtaactacataatgccagatattctttcagatgatacagtagataataggcatgtcttatgttttactagcacagacaatgtcagctcccacaagcatgagcacatatttggctgtaacaagcatgagtacaactcttaacttgtggtctgtggaagtgagatttttgttgccacacatgccgggtataggtgaaagtttgcagaaactactcatatcaacacatatatttgcaagagctactttcgatcgtcgtgtcatgtatgctcacaaactgaattgaagcattgttgatgcaactttggttatctgcaaggtttaactagctgtttgctgctatagatgtgtggtccaatggttcatctttgatcagagtgcattgtgtatggctgtgtgctgtgcatggaatcatattgtcatagctgttaacatggtacaaattactcctagcatgtgaatagaaaccatgtgtgtggtcacttggattggttgtccacattggactatcaggctgccctggtgttcgtgaagttgtaaccaaacgtaggcacaagcagctgcagggctcctgagcaatttggctggattatctgatagcagatcaggttttctcaatgttttgtttccggggtgacatgtgcatatatcacttttggttccggggtgatagcagagcaggatgcacacaatcatgaagacttatatggcacttggtaacaaatgtacaataatagacgctcagaagcttcctttgctcatctgtatctaaattatctgtcagttctggagaacaatcagaaaaaaaaaaggtgaagcttccttttg

SEQ ID NO: 25184 - DNA, 2584 bp, Oryza sativa
  ref <308>: DATABASE ACCESSION NUMBER: AK100626
  ref <309>: DATABASE ENTRY DATE: 2002-08-28
gaatccccatacctaaacagagaaaagttcgcacttctccccctctcgcacgcgcctcgccgccgccgcatcgcatcccctcgtcgtcgcagccgctacctcctccgcttagtcgcctcccccccaccccggcacccccacctctcctctccgcctcgctgttgcctcttccatgatgtccctagtgagagcacggcgagggcatctcctcagacctcacacatgccggcgagccgccatctgctcctcgtcgttgctggatggggaggaagaactcggtgacctcctcggcgcccacgccgtcgccgaacgccgatgaggtccagcaggagatggccgtgggccgctcggcgtcggccaggatccgcgaccgggcgtctcgttcgctgctggggcaggagccatacatgacaatgtaacttattcttctcatgattttgctgggtgaatagcaaatgattttgcttttttgctccagtaaatgggaaaattgctctggttactgagcaattagggagttgatctggttgattttgttttggtggaacatagaagaagctgtcggtggaagagaagtgcttttcactgcatagtagctgatttatgctagatttatgagcgcgcagctgttcttgagttttggccctcttgttcagctattcattcagaagctgtcaccgaagaaagttgttgagcttagactcactgatttataagcacattgctctgggaaaatttataagcacatagcgcctcctctgctcctcacattgctctggtaaaatttataaacataaaatttataagcttcctgtttagcaagcagactcatcggtgtgtcacattcagaagataccagcacattccaactggaacctagatctgttggcctattgcatcatgtacaggcaagtctgaaaactaaataagggtaaaaccgtcttttctcctctagttaacaccatcaagtgtaaaaactaatggaagtgctacatagggaagggaaattttgagggtgcatagatagagaacttttgaagtttgggtggtagagatagaagaacaactttttttttatactacatagggaattttctctacaatatatcagtttgcgaggggtacggcgacggagatagtggcaggcctgctcattggaggacagcacctcaccgtcgtcagagctcatcgttgctgcccagctcctcctactctctaggtcagcccaaacggatgattatcggctctgggttctctattcggaggcaaatgctggccaacattcaaagattcatctgctcggtaggcatttattttccatgtaaataaatcttcaaactctcttcatcgttgattgttaattgctttactgctttgaatgacacaaccagatttggagtacgaaaccacctcgccatcacaggcatactgcctgccatgtggacttcgattataaatctacctcgccatcgcgcccatactgttcggtgtggtgtcgatgctcctgttgagaagtagcgcaattggttggttgcttacttaggcttaatattgggttaatgtagatatgaccctatggccttttattgtctttattttaaaatatatatatatattctgaaatacaggaagtatattttgtcccaaactaaatacatcacagtaacagcatggttgccttttttcttagattattttttcttcaactcaacattagggaactacctgttggtattaaaattttacactaataattaaataagtcaacttataaagcgattcatataaggatgtaatctaactcaatttatttaaagattgttttgtgttgctcaaacctacaattatgatgcattaataattttgtacaagatcatcggcttcatgatatacacttatgtaagacttgtacatatcaatgtagtttttaagacatttatgaactgtgttttgaaacaatcatgttttcaaattatcaccttgcaataaataactattgctacctagcaaggtgagaatgtatagccacctcctcaaggatggttaaaaaaaagatcctttttacggttcttgtagagctacacatctggtttaaatttgtggtatctgctatcatccaggaggtatgatactatgtacatcttcgaggcctgtaaaaaggctttttgtttgtaaataatcaccttttctctatagaaatgtgatacatgccttaatttgtgtttacttgtactgatgatatctggtctttgtctaccaggattttatagtaataatggttaattatttgatgatttcatgtaatgatggacttagtcaattgcgagctataataagatgccaaaaaatccctatttttgaaaattcatgaggaaagcactttctaatttctgactcttaacacggtatttgtgaaatttcagctttgatctgtttgagaccaattaaactctactagcaaatttcatgcctgatgtcgacatcaagcttccatctgcttttggagtaactggtggtcttttctgagcacgactgaacccaccatttgataattttgaaatcttccctatacatccgtttgtgg

SEQ ID NO: 25185 - DNA, 2283 bp, Oryza sativa
  misc_feature (1561)..(1561): "n"=any one base of a, t, c, or g
  ref <308>: DATABASE ACCESSION NUMBER: AK100627
  ref <309>: DATABASE ENTRY DATE: 2002-08-28
ggtcgttgtttatcagcagcgagacgcggcgaagcaaaccaaactgaagaggaatttatgcacttcaccccctggtaaaattctccgagaaacaaatcgctcccacccctcgccgccgccgccgcgttgggtgggcgggggatcgatccggcggtgcccgcccgccatggggacggcgacgatggcgacggcggtgggggcggcggtggtgctgtatttcgtgctgagccggcggctggcccaggaggatgggggtggtggggtgggggttgggggtggaggggggaagcggcggagggtgcgcgcggcgaggcggcccgcgcagccgccggcgacgtggatcgaggcggtgggcacgctggcggagacgctgcggttcacctactcggagacgctcgggaaatggcccatcggggacctcgcgttcgggatcaagtacctcatgcgccgccagggaaatttacatgtcgctagtgtatatgctggaaacaattgcattgaactgaaagggcctgaaataatggaagagcttattgttctgagacgattaatcgatctttgctttcttttttctaagaaaccatttccggtcttcctggaattagctggattttccccagaggatgttcttattgaggaacctaaagcggggattttaaagcctgcccatacaatcctgcgtgatgaatgcaccaaatccttccttgtgttgattcgtgggacacatagtatgaaagacacattgactgcagctactggtgctgtagtaccatttcaccactcacttttagatgaaggtggtgtcagcaagttagtgctgggatatgcacactgtgggatggttgcagcagcccgctggattgcaagaagtataacaccatgtctctgtcaagcagtcagtcaatgcccagactaccaaatcagggttgttggccattcattgggtggtggtactgctgcattactgacctacatcctgagagaacaccaggagttgtcttcaacaacttgtgttgcctttgctccagcttcatgcatgacatgggagttagcagaatcaggcaagcattttgtgaggactattgtaaacggtgctgatctggttcctacagtatcaacttcatctatagatgatctccgttcagaggtaacggcatcttcatggttaaatgatttgagggatcagatacagcagacacgcttcctaaatgttgtttaccggtctgctactgctttaggaactcgcctgcaatcattttctggtgccagagatagggttgcaggtgctggtgcactgctacgacctgtttcaagcaaaactcaggttgtgatgaaacaggcacagaatgttgcgcaggctgttgctagaagtagatcagcattttcttcatggtcatgcatgggtgcacgccgtcgaggtgttggtgtagttgctgcaagcgctaaagaggaaataacagtggaaacccacgtcacatctaccactaattcagagtcctatgttgtagaacaacgtggcaccaagaccatggaggagctgcagtacactgcagatagtgtntcagttcatgaggaaacagaagaagaggcccttctgagtgagcatgaatcctctagggagcatgcagaagaagaaataactgaaggtgagatgtggtttcagtacgagaaggacctggatcggcaggctgaagtggaggctcagaccaggcaggaagaagcagctgctgccaaggaaataatggaggaggaaagtgctgttctaaaaaatgttgaggataggcaatccttttcatctgatagtttggagaggcagcagttctaccctcctggtagaatcatgcacatggttgccatgcctcctgcagattcttgccctgatgatccggttgctgctgatgagtgcagtgtgggaatatacgagaccccaagggatctttacagtaaaatccgtctatccaacaccatgatcaatgaccattacatgccgatgtataagaaaacaatggaaatattgattgagaagtttgcgaacaatgatgaaaatttctgtacagactcgacagtagaataatatggatgacttgtaacatcgaagtgtatagtagttctttctgtttagctttaaccacctgatatgctcctgatatgcaatatagaaaagagatgctgtcctgaattacaatatagaagagatgctgtcctgaattagttaagagagttgtggatgatatgatatgtaaaatgtaaatgaaaaatagaattaatggatgtttattaacg

SEQ ID NO: 25186 - DNA, 2159 bp, Oryza sativa
  ref <308>: DATABASE ACCESSION NUMBER: AK100628
  ref <309>: DATABASE ENTRY DATE: 2002-08-28
gttttgggagccggacagcactgggctgttgttggcctgcagctgccttctcactcccactcactgaatgattgatttctggcgagggattgattctccgttccttttgctgaggggaaaatcttggattttaggggctgttctagccttctgctgaggcctcttagttttcctgttttgttctggggcaggtggatttctgttttctggggattattgggggaaatattgttccttgtttatttcagaagtatttgcaggggtaatacgacattttttggggagtaaaataatgctttatatactctcagaaatatactgcctaaagtttttgtggacagaaccagtccaaatttttaagtagagattacttgatccctattacagaggtaaatggttccaattgaacgaattacacaagaatatagtatcccatcgaggtttggagttcaatattggtgcaaggattggttatataatgtgtcttcctgctgcagctgtgtatggactactcatgatttgttttgttttgtcacatgccttcttgcagcagcagccgcaacttatggagaacgtggcggtggccaagcggagcaggctggagcaacaccgcacgctcagtgacaactccttccgtgtggaggatctccctgaggaaattcaatctcttctattatctctgctgtcactgaaagaggctgctagtacaagcatcgtgtcgagaaactggagaaaactttggacacggtatcctaatctatgctttgatggcagcaaggacgggcctgctgatatggatagtgtgaaaatagaaagaatgaagttcattgatacagtaaattctattattcagcaacacagtggaatagggctcaataaattcagtatcaggtgcaaccttctgaaggacgactcagacattcttgataggtggattcgctttgccactgcatcaaaggctaagattatagatatgaacctgtgcacaaatagaaataataaaggaccaaccaaacatttgtatgacttccctcttgaggctttcggtgatcaagatatcccttttatccagtgcttgtttctcaacaatgtttctataaagccacactcggatattggctttacgaaactcaggagccttcatttgcactgtgttcaaataattggagatctttcaggcttgctatttaattgctccagtcttgaggacttggaggtctttgcgtgcttgggtgtgactgctctgaatattccacaccaactcaataaacttaggcatttgctaatttgtaatatgcgtatccagatgctggagtttcatgttcctggtctttctcattttgaatacaaaggtactatgattcctataatgcttcatggttgctcaaaattacagaaggcaaccctgaattttcaccagacatggcttgaagaagataataataaagtattgggccatgtattccatggaattcccagtgtttcggcagttgaggtgctcaatttacttgttgatatttgcacaaagcaatcggtctggtcctcacaggtgcatacgttgacagcaagaccaacaatcatgtttatgaatttgaagcatctgacttatgagatacttatttttactaaagatccaaacagccacagtggagttcttcagctggctcagtatttagcttttgcaccgcagctggagactctagaattgcatatgttgtatcattcgactcactgccgctgctggcatgagggtgcgggagtctcctacggacatatgccccatcatcacctcaagatggtctacatgagtgggttcaggtgctaccgggctcaggtcgagctgctgtttgccattcttgaaatgggtgatgagcttgagcatgtgaccattgatccaatgacgagagtaccgtatagccctgatttgatgaatttaggcatacctgaggacgagatatgtcaatgggcgaaccgtacctcacaacggtttggtaaagcaatctctgttgtaaaacctccctaggtggtgttggtagtcctgtgcatatacgacttattaccacctagataagtgtttgttcagattcagtactgaaattgctgacacaggggtttctgttttgtttccatgagtaaattgttttttattttattgtttg

SEQ ID NO: 25187 - DNA, 3141 bp, Oryza sativa
  ref <308>: DATABASE ACCESSION NUMBER: AK100629
  ref <309>: DATABASE ENTRY DATE: 2002-08-28
gaagcggagagagagagaaaaaggaaaaactgtctcgtcgtctcgaaccttctcgcctccctcaccgccctaacccttcctcttctcctccgccgccgccaccgccgctccgccccctccgtcccttcgccgctaccgatctcccccgcccgcccgcggagatggacagacagctgcgcggtgtgcgcggacgcgctggagtgggtggcctacggggcctgcggccaccgcgaggtttgctcgacctgcgtcgttcgcctccgcttcgtgatgggcgacaagcactgcctgcatctgcaagaccgagtgctcctccgtatccgtcaccaaggctatgggcgattacacaaaagtgataaatgatttcaatattttcccccctgtggcaactgagggaaaggtgggggagtactggtaccatgaggatagccaggcattttttgacgatgctgagcactagctgatagaacgatgcaatgcggcagattgtttgcaatgtgagagacatagctgaacatcacgctggccaaccatatcagggatgcacggaacctggctcaggagcattgaacagctgaagggacatttgttccatcaacataggttatacatgtgcagtctttgcttggaggggagaaaggtgttcatttgtgaacagaagctttatacaaggacacagttaaatcagcatgtaaaaactggtgactctgaggtggatggctctgaggttgagcgcagtggttttgcaggacatcctatgtgcgagttctgcagaagttcattttatggagataacgagctttacacacatatgtcccgagaacactattcatgtcacatatgtcaaaggcaacatcctgggcagtatgattatttccggaattatgatgacttggagttgcatttccgtaaagatcatttcctctgtgaagatgaagcatgtttggcgaagaagtttgtagtcttccagagcgaagcagagctcaagagacataatgctatggagcatggtgggcggatgtctcgtgctcagaggaatgccgcacttcagataccaaccagctttatatatcgaagaaacgagcaagatgaaaggcgtggtagaggtaggggacggaattctcaccgtgatggatctgaccgggataccccctctatgcaaaatggcagtgcaattataggcaacggttttcgaagtcgagttgataatgttacagggtctgtgagtgtcagttctagttctgggcgaggagaatctggccaaagctcaggcaatggacgtgtgtttgaacacttgtcctttcctcctcttcaagaccaggatattcctgatgcaaggatggactctgctcctgatgaaacctcattcccttccctctcagagcagcaaaccagatatgctcatgctcttagtcagagttcccttgctgccaagcttggggatgagttattattccctccactacctgggtcaagtagcaacaggggttctacttcaactcaacaggggctacaaagtctagcgaagaacacacttgcatcaaggcttcagcagcgtagcaagggcagtgtgaaagtacttcattctgcccggcctcgcccatctgaaaatcctgaatcagtccctcctgtttctagttccccacagatgtggcctacacctgatcaggggctgcttcattctagttcttcccagcttcgaattgtaagagaaaatgggattatgtcatctgccgactcggcatggaatcctggaggtggagcttcaaacaggatgaagcactctgtttctactcctaatcttatgtctggtgggtcctctgttcaggcactaagtacatctaacggtggcaataaaaaacaacagccaccacaaagcagccaaacattgcctgctgctgatgatgttcgtgctgccaataagaccctggttgaaagaatgcgcagtgctttaggcatggatgaagataggtactctgcatttaaagaaatcgctggtgaataccgtcaaggcatcattggtacttcagaatatctttcatatgttgagcaatttggtctgtcacaccttgtgcctgaaatggctaggctgttacctgatcctcagaagcagaaagaacttgctgatgcctatcacaccaatatacgcttcagaagcctccaagagaacagtgatggtttaaccattacctcaaaggagggtggccgcaagaaaaagggcaagggaaaatctcatgatgttacagaaactagtgctgctcctgctaaggatatgaaggattcactagcagatagcttcctggacactgtaaggaagcttcagttaaacaagactcaggaaggagaggctgaggtgctgtcaagggatgggtatcgatcttccaagggaaaggcccaactaataactggaggttcatcatctagtacaccatgtctagatggtgatcatggtgccatttcaatggcttcttgtgccaaagatgatgtaggcaagggaggaggtagcagcaacagcaacatcaacaaacaatcaaagaagacatcaaagtttctcagagcccgattaggtgataactccttagctacacttgatttgagtcgtcctaccatgagccctgaacgaccagaaagggaatcgcaaggcccacaggtagggttgcctatgcgaggtgtttggaaaaatggagggggccagaagctctttacgggcaatggaaggaagtaaaatcattttgcagatgcagtttgacttttgaaacgagctggtcaatggtacaagcagattctgttgccaagtgtgcatatatagtgcatcagttggtgagctggtgttggcagagccagactgctcctctcaaaagtatcgccgttgaaaggcgcctccatatcatgtattaggtgactgagcatcgcctgagcaagaggctgataacagtaatggagtgataatgcgtgcgcgggcagttaatggaatccgttggaaaaaggtatgcaacaggagatctgccacataatatagtggctttatcactctgtgcgttctggaaagcagtcaaaggcatgcactgagcgggtatgtgatcgagtcaagccagagcgtcattggccaaaggtataatttcaatgttcttggcgagatgt

SEQ ID NO: 25188 - DNA, 1339 bp, Oryza sativa
  ref <308>: DATABASE ACCESSION NUMBER: AK100630
  ref <309>: DATABASE ENTRY DATE: 2002-08-28
ggggggccgttgaagagaggaaaacctaggctagttggcgagctcgccccactccgtcggcggccgcgccttccctgtgctggaatccagcggccgccggagacggcgagttcgacgccgcggctgcgcgcggagacgttaaccctgcggcggctcctacctaggaggtgttcttactggttgttatagcgattctctgtttggtgcccatgagcaagaagaagaacaagtctcaattgccaataaaggcgccgttgaaagatgctgaacaaggaataacttcggattacattggaggagacgctcttgatgacctattatcgaagcttattaagagcgtggaggttgcaaaggcttcaagggaagggttgccggaaaagatatggatgaagcgacaatttgccgttggggtcaatgatgtcacaagggttcttgagcgaatgcctgctgctactgctgccacccattctggtcactcttctactgaagcaataactgacaaagctctgtgtagagctcctccggtgcttcttcaggttgtccttgtagctgctgattgcaaccctaaatggttaacaaaacacataccaaccctggcatctacaaggcaggttcctgtgttgtgcctcaaggacaacaaagaaagctcactgaggttaggtcaagtggtgaatgtcagaacagcactggccattggagtaaaggccagagatagcataatcaataaggctattgatgaagtcctgaagactgctaatctggttgccaaggaaccgtaactgagcttctggtccaatctcagtgacataatgggcgaatttatttttaaacaaggcagaagctctgcctcattccactaataaagaatagatattgacccaagaaaatgtttgcaccaaaaactgataggtgaattttggacctctgggtgctcagcattgcagtagcatcttgacaggaagtcatgaggatgaatgggcatgcagttgagaatttcgcgaaggaaatcaaggatgctgctgaactgtggcgtttacatctgaagaactttttctgcctgtattcatgaagatcaggccagaccaggcttgtttgttaggtaggttcattctgtttagttgaatttgtggatcatagagctagcaaagttgctcgcctagactgtaggctatattatgagcaatttagtgcgtatgtgtccactatgtataatgccatttgcagccttgtggatatctgccttatgttgtttgtgttcaaccttaatttggacgatataaatcattatcataacaaacatccttaatacataaaccaggatagatgtactaacgttatt

SEQ ID NO: 25189 - DNA, 2769 bp, Oryza sativa
  ref <308>: DATABASE ACCESSION NUMBER: AK100631
  ref <309>: DATABASE ENTRY DATE: 2002-08-28
gatatacgtatcattaattgctgggttctacaattaatgttccggtgaactaaacttttctatggacggagggagtaattaagacgataacggaatgtctaataattaaatgacagtgcatgctgtctgtttctttatgtaggattttcatgtagtcctttcgtttaaaaatgcatggtgccgttgacttttcacacaacgtttgactatttgtcttattaaatttttttatataaatatcatttatttctttatgacttgttttattatcaaataaaatataatcttaacttatacatttacatatttatactaaatttttgaataagataaatagttaaacgttatgtgaaaagttaacggcgtcgtacatttttaaatggagggagtacttgataaacattctcacctcacctcacctcccatatatgcctgattttcagggcccatgctaataagcaaatcaccgccgtacccggcctcggaagaaacacgcgaatgggaagcagatggacaacatgaacacacggatgaactaagagagacgacgacaaccatgatcgatggcatcaggacagcactgagatcaatcggagagggagagattagcatctcagcctatgacacttcgttggttgccctcctgaagaggctagatgggggtgatggtcctcagttcccatcaaccatcgactggatcgttcagaatcagctaccggatggttcatggggtgatgcctccttcttcatgatgggagaccggatcatgagcaccctcgcttgtgttgtagcgttgaagtcatggaacatccacaccgataaatgcgagagaggtttgttgtttatccaagaaaatatgtggaggttggcccatgaggaagaagactggatgctagttggatttgagattgccttgccctcgctcctagacatggctaaggacctggatcttgacatcccttacgatgagccagccttgaaagcaatatatgccgagagagaaaggaagcttgccaagattccaagagacgtgctacactctatgccaacaactttacttcatagccttgagggaatggttgacttggactgggaaaagctcctcaagctccggtgtctcgatgggtccttccattgctcccctgcttcgacggctactgctttccagcaaacaggagaccagaaatgctttgaatacctcgatggaatcgtcaaaaagttcaatggaggagttccctgtatctaccctttggatgtgtacgaacgcttatgggccgtcgataggctgacgaggctgggcatatcaaggcacttcacaagtgaaattgaggattgcttagactacattttcaggaactggactccagatggattagctcacacaaagaactgcccggtaaaggatatcgatgacacggccatgggtttccgtctcctccgactttacggataccaagtcgacccatgtgtgttgaagaagttcgaaaaggatggcaagttcttctgcttgcacggggagtccaacccatcctctgtcaccccaatgtacaacacttaccgggcctcccagctcaaatttcctggcgatgacggtgtccttgggcgagctgaggtgttttgccgctcattcctccaagacaggagaggctcaaacagaatgaaggacaagtgggccatcgccaaggatatcccaggcgaggttgagtatgctatggactacccatggaaagcaagtttaccgcgtattgaaacaaggttgtacttggatcaatatggaggtagtggcgatgtatggattgggaaggtcctgcacaggatgactcttttctgcaacgacctgtacctcaaggcagctaaagctgacttcagtaatttccagaaagaatgccgagttgagttgaatggccttagaaggtggtacttgaggagtaatctggagaagtttggagggactgatccacagactacactgatgacatcctacttcttagcttcagccaacatcttcgaggcaaaccgagcagcggaacgtcttggatgggctcgcgtagcgttgcttgccgatgccgtctcctctcacttcaggagaatcgggggaccaaaaaattcgaccagcaatcttgaagagcttatcagccttgttccttttgacgacgcttattctggcagtcttcgtgaagcttggaagcagtggttgatggcatggactgcaaaggagagcagccaggagtcaattgaaggggacacggcaatattgttggttcgtgccatcgagatttttggaggacggcatgttttgaccgggcaaagaccggacctttgggagtattcccagctcgagcagctcacctcctccatctgctgcaaactttccaggagggttcttgcccaggagaatggggaaagtacggagaaagttgaggagatagaccagcaagtggatttggagatgcaggaattgactcggcgcgttctacagggctgcagcgctattaacagactaacccgggagacgtttctccatgtggtgaagagcttctgctatgtcgcctactgctcacctgagacaattgatagccacatcgacaaggtcatattccaagatgtgatttaggaacaaattaccccgactcatctacactccttataaaagagagtagtggtggtgttggttctgccacccccacctccactaccaattcccgacctttatagaataaagatgtgtcttttgtattaagtttgttgtggtgtacctcgtgtttttcc

SEQ ID NO: 25190 - DNA, 2104 bp, Oryza sativa
  ref <308>: DATABASE ACCESSION NUMBER: AK100632
  ref <309>: DATABASE ENTRY DATE: 2002-08-28
gttcgttttcagtcgacctggtctcactcctgcggcggcggcagcggcgctgtcgattcaccggcgacggagctgcgacagccaacgagattggattgtctagggtttggattttgggggttatggctccatctgagtgcccgccggggtgcaaataaatgcaggaaagcatgattgttcctctactagcagggttcttggaagaatggcatcacaagcttgggtagcagatagagctgctgcaattatgaggaagaagccaaattgtggggccaaggagctaaagaccatattagaggagcggtacaaggctgagatagagttgaggtgtcctggcagtcgagttgaaattggtaccaaggaagtaaatggtcaagttcactttgagaggttcttttgttgctttgagccttgcatcacaggtttcttgttaggatgcagaaaataccttagcattgattctacggccctcaatgggaagtggaatggccacttggcagcatcaaatgccttagatgggcataattggatgtacccaatggcatttgggttctttgatgcagaaaccactgataactggacttggttcatggagcaacttgcagtgtgtattggacatgtggaagacctggcaatatgtacagatgcttgcaagggcctagaaaatgtagttgagagggtttttcctaactgtgaggagagggagtgctttaggcacttgatggaaaacttgacaaagaggaaaactggtacagtttatggtaacttgtggccagctgctagagcttttaggtctgagatctatgactatcacatggataaggttttatcagctgatcctgatgttggtgattggttatacaaacatcataaaattctgtgggcaaggagcaagttctcaccaaagatcaaatgtgacttcatcactaataatgtggctgagtcatggaatgcatggatcaaagaattcaaggaactgcaagttgatgccctagcagatgcaatcagagagaagacagcagccttgtgggctaagagaaggaagattggagaaaaactagaaggcagaaacattttacctgcaattgtcacacaactaaaggcagcaactagaggtttagccaacatgagagtcatgaagggagcggatgatacagctgaagtgactgagctccataatagtgttgaagtctataggcatgttgtgtatcttgaccaacagaaatgcacatgtagggagtggcagttaacagggaagccattctctcatgctcttgcagctatctccaaacaaaggaatccaatcatggatgattttgttgatcccgttttctctgttagttgctttagggctgcatatgaaggtgtcatcccctgcataactgacaagtcccaatggccaacagcgaacaaagattttaagttgcagccaccagtgcccaagcctagaactgttcctaggcaaaggaaaaacatgattccttcttgtcttgagaaggggaaaggaaagatcagaaggcaggtgaaatgcccaagatgtggtgggctagggcatagacagagcagccaaaagtgtcctcttaatgggaccaaaaagaggaagaggaaggcaaagaatattgctacaaaagctaggaaaaagaaaactgctaaggaaattgttgaaactccaacaagatcaaaggttgctagagttcaattagttgatagccctgctcgagtcactaggagtcaaacaaggacaactggaacaccaactattgctagagaaggatgctcacaagattcacctggaccagtgacaaggaggcgcttggctatgactgaagcaacaccatcacagccactaccaccaaccaagaagaaattgactccaaagaaaaaacagaactgatgttgcctttttgcttttgttacatgaaactggactcaagaaagatggggttatttatgtatttaatggcagcaaagaccaatgttaaggccagccatgcttgctactagacgtgctatgtagaaatgcagaaaacaatatttgaagcctatactattttagttctaagaaatgttccgttgaattgcgttatatacttgttattatggt

SEQ ID NO: 25191 - DNA, 1906 bp, Oryza sativa
  ref <308>: DATABASE ACCESSION NUMBER: AK100633
  ref <309>: DATABASE ENTRY DATE: 2002-08-28
gatcattatattccaaaccatggttaaggcctacattgccatcttctccatcgccgttctcttgttgattcacttcctcttccgccgccgcggcaggagcaatggcatgccgctgcctccgagccctccagccatcccgttcttcggccacctccacctcatcgacaagccgttccacgccgcgctgtcccgcctcgccgagcgccacggcccggtcttctcgctgcgcctcggctcgcgcaacgccgtcgtggtgtcgtcgccggagtgcgccagggagtgcttcacggacaacgacgtgtgcttcgccaaccgccccaggttcccgtcgcagatgctcgcgaccttcaatggcacctctctaggcagtgccaactacggcccgcactggcgcaacctccgccgcatcgccaccgtgcacctcctctcctcgcaccgcgtcagcggcatgtctggcatcatctccggccaggcgcgccacatggtgcggaggatgtaccgcgccgccaccgcctccgccgccggcgtcgcgcgcgtccagctgaatcggaggctgttcgagctctcgctcagcgtcctcatggaagccatagcccagagcaagacgacacgtcgtgaggcgccggatgcggacacggacatgtccatggaggcccaggagttgaggcatgtcctcgacgagctcaacccgcttatcggcgcggccaacctgtgggattacttgccggcgctccggtggttcgacgtgttcggcgtgaagcgcaagatcgtggcggcggtgaacaggaggaacgcgttcatgcgccggctgatcgacgcggagcggcaaaggatggacaacaacgatgtcgacggcggcgatgatggcgagaagaagagcatgatttccgtgctgcttactctgcaaaagactcagccagaggtctacacggatactctgatcatgactctctgtgcgccattgtttggtgccggaacagagactacatcaaccacaatagagtgggcgatgtcacttctactgaaccatccagagattctaaagaaagcacaagcagaaatagacatgtccgtcggaaactctcgcctaatcagtgtcgtcgacgtgcatcgtctgggctatctccagtgcatcatcaacgagacgcttcgcatgtaccctgcagcgccacttctgctacctcatgaatcatctgcggattgcaaagtcggtggctaccacatcccaagcggagcgatgttgcttgtcaacgtggctgccatccaaagagacccagtgatttggaaagagccaagtgagttcaagccagagaggttcgagaatggcaggttcgagggattgttcatgataccgtttgggatggggagacggaggtgtcccggggagatgctggcattgcagacaattgggttagttttggggactatgatccagtgctttgattggggcagagttgatgatgctatggttgatatgacacagagcaatggactgactagcctcaaggtcattccgttggaggccatgtgcaaaccacgagaagctatgtgcgatgttcttcggaaattcatgtgaagccatacacggctgtgtagcagggaataaagttctggtgactatatactctctgtccaaacaaaacctaatcttgtatccaaatttatctctaggattagatatttattgggacaaagggagtgggaaagacagaagctatacttagtcatttaaacagaagggaataagatagtcgtgcagtgttcgtcaaacaatgtacacatcattttagcacaaaagctgctcgtggaagctataaccactatccgaaaatatacctatcttgctggttcaaattagtagctatattttagatccgagggagtaaatttccactgcatgttctcg

SEQ ID NO: 25192 - DNA, 1854 bp, Oryza sativa
  ref <308>: DATABASE ACCESSION NUMBER: AK100634
  ref <309>: DATABASE ENTRY DATE: 2002-08-28
gagcaacaaaattcagaagtcaaaaaaatcccaaaaacaaaaaataataaaaaaaaagaaagagagagacatttcgcatctgctgccctgcctcctctcccatcacctgcccattttttcacattgaggcccctctgaagatattatatttacaactaggtccctggccgggccggccggccaccggaaggagcacctcgccggagaaggctttgtctcttctttttcttctcctcctcctcctccatcggcggcggcatggggttctcgctgtaccccatgaagacgtcgacgcgcatgctgtggagcaccagcttcttccgccataaggtcgcctcctccttctaagcccacgccctctcgggcggcggcggcgagccggcggcggagcgcgcggttggtaggtgcgcgtgcgtgcgtgaacgggagagcagcttcgagatcgggttttcttgggttcttggagaagggaggagaagagggggaggagagcatggatcccggccgcgtcgtgttcgactccggcgtggcgcggcgggcgtgccccggcggcgcgcagatgcttctcttcggcggcggcggcagcgccaacagcggcggcttcttccgaggcgtgccggcggcggtgctggggatggatgaatcgggtcgtcgtcgtcggcggcgggggcgggggcgaagcggccgttcttcacgacgcacgaggagctcctggaggaggagtactacgacgagcaggcgccggagaagaagcggcggctgacggcggagcaggtgcagatgctggaacggagcttcgaggaggagaacaagctggagccggagcggaagacggagctcgcccgccgcctcggcatggccccccggcaggtcgccgtctggttccagaaccgccgcgcccgctggaagaccaagcagctcgagcacgacttcgaccgcctcaaggccgcctacgacgccctcgccgccgaccaccatgccctcctctccgacaacgaccgcctccgcgcgcaggtaatctcattaaccgagaagctgcaagacaaggagacgtcgccgtcgtcggcgaccatcaccaccgcggcgcaggaggtcgaccagccggacgaacacacggaggccgcgtcaaccaccggcttcgccaccgtcgacggcgcattggcggcgccaccgcccggccaccagcagccgccgcataaagatgatcttgtgagcagcggcggcaccaacgacgacggcgatggcggcgcggccgtggtggtcttcgacgtcaccgagggcgccaacgaccgcctcagctgcgagtcggcgtacttcgccgacgccgcggaggcgtacgagcgcgactgcgccgggcactacgccctctcgtcggaggaggaggacggcggcgcggtcagcgacgagggctgcagcttcgacctccccgacgccgccgccgccgccgccgccatgttcggcgccgccggagttgtgcaccacgacgccgcggacgacgaggaggcgcagctcggcagctggaccgcctggttctggagctgatcgatggaagcatggagcattggagccatgctatcaatgaatgaatgaatcaaatgaccttgagaccctcctctccgtcctttcttttgccctatttttaatcgctgttatatgttaattatgtgcaattaaagtgtacgtgttttgtcgtaagttgtgtttgttcaaattgtatgttttgaaggtgtcatgtattcatacacgatatgatatatagacgggatcatgaatgatactcggaaagattggaataattccatgtagtgttgagcaataataaacattttcctccgataagatgtttttatgatt

SEQ ID NO: 25193 - DNA, 2443 bp, Oryza sativa
  ref <308>: DATABASE ACCESSION NUMBER: AK100635
  ref <309>: DATABASE ENTRY DATE: 2002-08-28
gggtctccttctcggacaagcctcctccactcccggcctcccgatcgatcgcgactagttccaagcagagatcatcagcagcaagtgggggccgaccgccttagctccccctccccgccgcctggttctcatctggcgtgcaacttgtagcagcggcatggtggtcgtccatggacagcgggctgaagactcgtttggtgggtttttctccttcgatgaggacgctgccagtgaggatatgtcattggatggtttggatgaggaacttgaagagcacaaggattatgatgtattgataagtattctagcgaatggtgaaaaacagagagatatggcaaccttggttgaaggcaacctaggccatgctgaacaggatctgattcaagattatgttgaagatagtgacaacctggtattattgcatgatcagattcatgactgtgacattattttgtcacagataggatcacttcttactggattccaggttcacattggttccattaactcagaactaagaagtctccaggagagatccttggatataagtgtcagactgaagaaccgcaagttggttgagacaaagcttgcaaaatttgtcgaagagattgttgctcctcctagtttggtgactgttattatcgatggagagataaatgatggttatgctaaaagtttggaaattttgagcaaaaagttgagattttctcaagttgatcctatgattaatgcatcaaattctctgaaggatattaaaccagaactggaaaggcttctacaaaaggcattatgcaaggtgtccgactatctcactgaattattcttttccatgagaaagcctggaactaatatccagatactgcaacaaaatatggttcaaaaatataggtatctcatcctctttcttagagagcatggatccaaggtctacactgatgttcgtgcaacatatgctgatacaatgaacaaggtgctgagtgcacattttcaagtgtacatagaagcattggagaagctcaagcttgacattggcgtatcaagtgatttgactggatatgacactaatatcattgaccttatatcaaggggaagagagcatttaagaaatcaccgtttcatgttttctttaggtgaacgggcaagcattttgaaggagattgatcgacctggcttggttcctcatatatctgaagtcaatcctgtaaaatacccatatgaagttatttttaggagtatacagaagcttctgatggacactgctagctctgagtatctttttatcaaggcattctttggtgaagaatcattgttttatcaggtttttcaaggaccttttaaagttattaatggacatttggatcatactcttcgaaattatcatgacgcggtatgcctaatgctcatgatctgcataactaggaaacaccagttggttatgttgaacaggcgacttccttgtctagacgcatatttggataaggttctcatctatctctggccacgcttcaagactgtttttgacatgtatcttcaaagcttgtaccggtgtgatacaaaattgttatgggtagatggctcccatccacaccatattgtaaggtgctatgttgagttcacagcatcccttattcaacttaatgctgaatgcggagatggtcagcttgatatgaacttggaacgcttacggctagctgttgataatctacttggtagacttgctgaaaattttgcaaaccccaagacgcaacacttgtttcttctgaataattatgacatgaccatttctgttctgaaggaagccggtgatgaagcaaataaactgcaaagctattttgaagagaagctagaaagtaacatgatatcatttgcggatgaattgcttatggagcatttcaaggatttgataaaatttgtgagaagccgtgtctctgaagaccttattctttatactgaatgcccaagcattgccgatgttgagccaattgtgaagaacttcgccgtgacatggaaaactgctctagagctcatgcacaatgaagttgttacttcttgcagtaaccttttagctgggatggagattctaaaagcagcaatggttcagctactcaatgactacaacagactctcagaatgtgtgaagataatcccaggaggatcaactctgaacaggaatctggtttctattacatccatttcatatgagatgaggaaatattcaataacactctagtaattgttatgatgtccaagcaatttttggaacagatgaaaaacaaacagcgctgatagtttcgatccctatcttcacaagcaagagaaaagcgcaacacaaaattatataattttgaacattctgtgctttgttttatggattgtaccttcacggcttcactgaaattttctgatcaaataatacttgacaacaatgatctgcttgcagttt

SEQ ID NO: 25194 - DNA, 2744 bp, Oryza sativa
  ref <308>: DATABASE ACCESSION NUMBER: AK100636
  ref <309>: DATABASE ENTRY DATE: 2002-08-28
gtctgcctcactccctcccttctcaacccggattccacctctcctccgcccgccacccaccgcgttctctcccatggacggcgacggctgggtctgggtgcggcggccggccgacgacgacgaggaggagcggccgctgaaggtggtgttcgactccccggccgagcacttcacggacgcggcgcccatcgggaacggcagcctcggagccatggtctggggcagcgtcgcctccgagaagctccagctcaaccatgataccctttggaccggcgtgcctgggaactacactgacccaaatgcgccatacgcactcgctgttgtgaggaagctcgttgatggagagaagtttgttgatgctacagaggctgcctctggccttttcggtggtccaacagaggtttaccaacctcttggagacataaatctggagtttgactcatctagtctggggtatacttcttacaaaagagagctagatctacgtactgcaactgtttgcatcagctataatattggggaagttcagtacagtagagagcacttctgctcaaatccacaccaggtttttgccaccaagatctctgctaacaaatcaggacatgtttctttcactttatccttaaacagtcaactaaaccacaatgttcggataacaaatgcaaatgagatgattatgcaaggtacatgtccaggacgaagacctgcactgcatcacaatggggccaacgatgctattggcatcaagtttgcaactgctgttgggctgcagattggtggcacttccgcaaaagtcacaattattgatgatcaaaagttaagaattgatgctgcagattgggttgttttgctggttgcagctgcttcctcattcgatgggcctttcgtgaatccttcagagtcaaaattaaaccctgaagtagctgctctaattacattgaatatcagcaggaatgctacattttctcagctcaaagctgctcatttggaagattatcagggtctttttcaccgtgtaactctgcaactatcgcaagcatcaatgcttgagaaagatatcttggaagaagttgatcatgacgtaaagactacagcagaaagaattaattcctttagaagcgatgaggatccttctttggtcgaattgttatttcagtatggtcgctacctgctcatttcctcctctcggcctgggacacaggtatctaatctgcaaggaatatggaaccaagattttgcacctgcttgggaggcttctcctcacctgaacataaaccttgagatgaattactggccaacacttccttgtaaccttactgaatgccaagaaccactatttgacttgataggatctcttgcggttaatggaacaaaaacagcaaaagtcaattaccaagcgagtggctgggtaactcatcacgtcacggacatatgggcaaaatcatctgcatattacgtagatgcgatgtatgcattgtggccaatggggggtgcctggctgtgtacacatctttgggaaaactaccagtattcactggacaaagaatttttggagaaaagagcatatccattactggagggatgtgcaatgtttttaattgattggttgatcaagggaccaggagactatttggaaacaaatccatctacttctccagagcatcctttcatagctcctggtactggtggtcaccttgctagtgtgagctattcaactacaatggacatctctattatccgtgaagttttcctggctgtcatttcgtctgcagaggtcttgggaaaatctgatactaatctggttgaaaggatcaagaaggcactcccaatgctccctccagttaaaatttctaaagatggcacgatcatggaatgggcacaagatttcgaggacccagaagtccatcatagacacctgtcacatctgtttggtctttaccctggtcatactataaccatgcagaaaaatcctgaggtttgcaaagctgttgccaatagtctccacaaacgaggggaagatggccctggatggtcgaccacatggaagatggcactgtgggcacgccttctgaatagtgagaatgcatacaggatgatcctaaagttgatcaccttggttcctcctggtggcaaggttgactttgagggaggattgtataccaatctttggacagcacacccacccttccaaattgatgcaaattttggattcacagctgcaattgctgaaatgctgctccagagcacccatggtgatgctgatctctacttgctaccagcactgccgcgcgaaaagtggcccaaaggctacgtgaagggattgagggctcgcggcaatgtgactgtgaacatcagctgggagaaaggggagctgcaagaagcaacggtgtggtctagcaacccaaaatgcaccctgaggctgcactacggtgaacaagttgctatggtgacagttttagggggcaatgtttacaggttcaatgggggtttgcagtgcgtggagacatacatggccccttgacaattgaacgccctctgcatttcagtgtttacggtttttcatcgttttagagtattttgtgtggacatgatgatgaattgatgcgtgcattggaataatttgcttttgtaaaagatggtgcatgctcttcaagatagtcaaggagctgtgcatggatgtctctgctgtatatggctatgatgtagtattgatttctggtgtatggcaactttatctgttgtat

SEQ ID NO: 25195 - DNA, 2721 bp, Oryza sativa
  ref <308>: DATABASE ACCESSION NUMBER: AK100637
  ref <309>: DATABASE ENTRY DATE: 2002-08-28
gagaaaaaaaaacgaaaagcagctaagcgagccagcgacagaaaggggagaggcagggcagcgcctccgagtcccaaaaccctagccatttctggttccctacctcgcgcctcaggaatcttccagaagcttctagaccccgcgcggatcctccctcccggtaagctcactccaccggatctcctcgagccgcgagctcccctagcgagatttgacgcggtttcgggcggcggccccaggcttgggctcgactttgggggaatcgcaacgctggcggcggtgggcaggtgatggcggatccgcctcggggtgggggatctagatttcggagctcgagagcgaaggtggagtcggacgagtgggtcgtgcggttgaagctagggttttgcagggcgaggagggaggggaggagggaaggatgctgaccatcctgcgggtgcacctcccgtcggagatccctatcgtgggctgcgagatcacgccctacgtgctcctgcggcgccccgatggcggcatctccaccgaagatgtgcatgaggccatccctctggatgggcactttatgcggtataaatggtaccgcatacaaagtgatcgaagagtcgctgtctgcaatgttcatccaacagaacaggcaacaatacagtgcttggggtgtttgaagtcaaaaataccagttgctaagagctaccattgttctgctaagtgcttctcagatgcctggcaacaccacagggtgttgcatgaacgtgctttgagcgctttaaatgaaaatggcaacgaagaggaggagttatttggccgatttggtagtggcaatgcagggattataaatgccagtttatctggctcaacatcaaatattggacagagctcaagtgttaataatggacctacacctgtgtatcccactggaactgaaaagaattctggtgaaacttggtttgaagtgggacgttcacggacgtatacgccaactgctgatgatattgggcatgccctaagattcgaatgtgtagcagtggattcagaaacaaggtcgagtgtgggagctccaacttcaatcatgacatctcgtgtaattcctgctccaacacccactccgcgtcgtctgataccagtgaattcggctgatgtaatgggacactttgatctagacagccgaaattcttcttttgggacattcacagtgttgtcttacaatattcttgctgatacatatgcaacaagtgatacatacagctattgcccaacttgggcactttcatggccttacagaagacaaaatttgctgcgtgaaataattggttaccatgcggatatcatctgccttcaggaggtacaaagtaaccactttgaagaattctttgcaccggagcttgacaaacatggatatcaggcactgttcaagaaaaggacaactgaggtgtacactggcaatctccaatcaattgatggatgtgctactttctttcgaagggacaaattttcacatgtcaaaaaatacgaggttgagtttaataaggctgcacagtctttaactgatgcaattattccagctgctcaaagaaaagtggctttaactcgattgattaaggataacattgcgttgattgcagttttagaagctaagtttggtagccatggggctgataaccctagcaaaagacagctcctttgtgtggcaaatacgcatatcaatgttcaccaagacctcaaagatgtcaagctatggcaggttaacaccctcctaaaaggtttagaaaaaatagctgtcagtgcggacattccaatgctggtctgtggagatttcaatgcaacccctggaagtactccacatgggcttcttgcaatggggaaagttgatctgatgcatccagatctagcaatagatcctcttggaatttgcgaccagcaagcaagttgacacaccagcttcctctggtgagtgcgtactcttcatttgcaaggatggttggtgctggttatgatttggagcaccagaggaggagaatggaccctgcaacaaatgaaccacttttcacaaattgcacgagggatttcactgggaccattgattacatattttacacagcggattcgttatcagtggaatcgttgctggaacttctggatgaggatagcttacggaaagacactgcgcttccttcacctgaatggtcatcagatcatatagcactcttagcagaatttcggtgcaagcctagagttagacgatgataccctaggtacatccatgttcactaggaggtgctctagcggcgtgattaccaacatacacaagggaacataccctcaggggaagtaagattaacaatcttaaggaagggaggattgttatgttcattactcttttcatttctgccctgatttttttagtggctctagctggattgcgactttctataggtgaaatatccacgcaaagagaaatatttaatagcatcattgttagtttttttcaatttcagtctgtctacaatttttccttaccatggaatctagttcttacaagctggaaatgatcccttccataatccattgtgtacgtctcactttttttttttttggctgacatgtaaatctgtcacgtgggtcggtgctagttttcggaaatgttaattgttgtttaagagccatagttgccaactgaagtacagttatcttgaaggaaatgaaattacgggtttggtttgttgc

SEQ ID NO: 25196 - DNA, 3289 bp, Oryza sativa
  ref <308>: DATABASE ACCESSION NUMBER: AK100638
  ref <309>: DATABASE ENTRY DATE: 2002-08-28
gacggtctttctgatgtttggaggacttcgtctcctacgcaattttcttcacactcacgccggcgcccctcatctccttccccaattccctctccggcgacaaggtcagggcggcgccgatcggcgagcttcgcactagggcgggcatggcgcgccgcgccgcttcccgcgcccttcgctcggagggctcgatccaagggcgagggggccgcgcggggggcggtggcggtggcgccgaggacgcacgccacgtgttcgacgaattgctccggcgtggaaggggcgcctcgatctacggcttgaaccgctccctcgccgacgtcgcgcgtggcagccccgcggccgccgtgtcccgctacaaccgcatggcccgagccggcgccgacgaggtaactcccgacttgtgcacctacggcattctcatcggttgctgctgccgcgcgggccgcttggacctcggtttcgcggccttgggcaatgtcattaagaagggatttagagtggaagccatcaccttcacacctctgctcaagggcctctgtgccgacaagaggacgagcgacgcaatggacatagtgctccgcagaatgaccgagctcggctgcatacctcctgagatgaaacaacaattaacctttcttcataagcatttttgccaacttctttaacctgaacgcaagcacctgtctgcaattaaaatattggatgcaggttcaaattgaatgaacaggttttataaaatttagaagcgcagaaatgcagcatgccacacaccacacaacttttattcaggaacaagattggattgtataaaatggtttcgatctgattatcttatctcaacgtattaatatgcacatatactaatcatgaaatatctgatggaatgatgtttctatttacctgtgtgaggcagcaaggagtgagatggataacaccacatacattattattctagaacaattttgtaaaatactgttgtgctcatgaagcgttccaaagatgtttcacaacctgtgctccacgggttttgagcttaatcctgggacattcagtctcatgaactgtcccattcttaaacatggaataaaggatgacagcatgatttctttgtctctataatcttttggctacccacagataatagctgtaaatctatactactttaaaaggagtagtggtggtggtgagtggtgaatctgccaccaccccacaccaccaactctcaaaattctgacatgtgggatcactgtctatcccttctccaaaccaattgtatgatagaacagtgaaaatagcgaggtatgtcagtgacccagagaggaggggacggcgcgtggtgagctacaaggcatactcagtggagggcaagatcaaggcctcccgtccgtagtggactccgctgcatcaaggccaactgctccgaactgatcaatttatggtgcagacaggtgcttgcgttcaggttaaagaagttggcaaaaatgcttctgaagaaaggttaattgttgtttcatctcaggagattccagatgatccagtgtctccaacaattgaggcgcttattttgctccatagtaaagtaagtacacttgctgagaaccaccagttgacaacacggcttgttgtaccatcaaacaaagttggttgtattcttggggaaggtggaaaggtaattactgaaatgagaagatggactgggggctgaaatcccagtctactcaaaagcagataaacctaagtacctgtcttttgatgaggagcttgtgcaggtaatttatttggccatacctacaccagagatccatatattacttttataactgcagcttttacttgttaacatttcattgtgcttttacatttgttccaagctttcaggttgctgggcttccagctattgcaagaggagccctgacagagattgcttcgaggctttgaactaggacactcagagatggaagttcttccaataatccgacaccttttgccccttttgatggtcctcctgttgacatcttgcctaacagggaattcatgctatatggacgatctgccaatagtcccccatatggagggcctgctaatgatccaccatatggaagacctgccattgatccaccatatggaagaccaatatccacaatatggaagaccttccaatgatccaccatatagaagacctgccaatgatacatcatacggacggttgaacaatgatgggcctcgtgatccttacaccgtgtatcctgtagagtacttctctaaaagagagtaccgtagtggaagtagcaaagtcaccatctgcttcatacgacagatatgcagcaactactcgcttgcctagtagagaactgccctcatctattagtcctggtgccgattatatgtcccgccgttcttatcttgaccaagtacctactgataggtactctagtagggtacactacaattaggcctctcgagagctgggaatagtaatgtgcaacaattaggaatcaccagagctggaaattccaatgcttatgattatactgaggtacatttccaatgcgttagcttgcctcttctttgcaaatggccctcgcctgatatgtttccattagaaacatgaaaccatatatatgactgttgcattatgtctattttcttccatgatggttcagacgtctgaaaaaaggacaaaaatattctagaatatgtcatggtggtccaaatatatccttctgtcttgtgcccactctaatatctatcattggtaacactattcaattgttaccatgttgttgcaaaccctagattcagttattcagctgttctctgctactgttgcttaccagttttcttagttgggtgttgatcttttctcattttttatttccttgtttcctggtacacctgatgcctctctgatgcatctgaatgtatgtttttgttctcttcagtgcttaatagatttaaatttcattcttttcaggctgcggagcagatccatggacgtgaggattaccgaagactgtcaggtctcactgggtatccaggtggctctgtcgaattgcggattccaaatagttatctggagtctgtgactgtctgtcattggtgttggtggtgtcaatctagctgagatccgtctggtatagcgtatgcgaaacatcatgcactatccccagtcttaaccatgccccaatggccaccaatagttttcctcatgaaaatctccccttgatcccggatctgtggtgcgagagtgaagttgcacgaagcccatcctggttacaaattattt

SEQ ID NO: 25197 - DNA, 1704 bp, Oryza sativa
  ref <308>: DATABASE ACCESSION NUMBER: AK100639
  ref <309>: DATABASE ENTRY DATE: 2002-08-28
ggcggatcggctcgagggtgtttccccactctcgcgtcgattcgcgcgatggacctgttgacatcggcgatgaagagatgctgcaacggcaagacgctcctccgcggcggccgcacctgtcgctgctcgtccgccagcgccattggatcttccggtgtccgtggcaaggaggaagcgtcgacttcggcggcggactccgagccggataagaagaggtggaggaagaagaggttctggaggaagaagaagaagaaggccaagaaggatcactacggcgacgccgccgccaccgagcacggcagcgagcgcgccagctgcaggcgctacgagaacgacgccgtggccgacctcgtgaacgacatatcgtccaagtcagatgtctgcaacgtgtacgcagccgaggggattctacggatcacccaccagaacatccccagcatggtgctcacgtacaggcagctatgcaacgccaccgactccttcagcccgaacaacctgctcggggaaggcggctttgggagggtgtacagaggccacctcgaagagatcaacgagatcgtcgccgtcaagcagctggacaaggacgggttccaggggaaccgcgagttcctggtggaggtgctgatgctcagtctcctgcaccaccccaacctcgtcaagctgctcggctactgcaccgacatggaccagagaatcctcgtctacgagtgcatgcggaacggctcgctggaggatcatctcctagatctccctccaaaggcaaagcctctcccgtggcaaacgcggatgaagatcgcggtgggcgcggcgaagggcatcgagtacctgcacgaggtggccaacccgccggtgatctaccgcgacctcaagacgtccaacatcctcctggacgaggacttcaactccaagctgtccgacttcggcctagccaagctcggccccgtcggcgacaagagccacgtcagcacgcgggtcatgggcacgtacggctactgcgcccccgagtacgccatgaccggcaagctcaccaagacgtcggacatctacagcttcggcgtcgtgctgctggagatcatcaccggcaggcgggcgatcgatacctccaggccgacgcacgagcaggttctcgtccaatgggcggcacctctcgtcaaggacaagaagagattcgtgagactggctgacccgttgctggaagagaaattccccctcaaggggctttaccaagctctcgcgatcgcctccatgtgcttgcaggaggatgccagcaacaggccgatgatcagcgacgtcgtcgcggcgctctcgtttcttgccgagcagaagtatcatccccaagatggcccggatcaggccgcccggaagagcagagacagggactgtagcaatcctcccaggaagacagacatggtttctgagatcaaggcagatgatgaaatcaagcacaggtgaccatagaggagtaacagcctagcagggaagggaggagctgcaggactgtctgctctcttgaatttcttgtgtaatgtacaccacctaggcaggatgtaacagcaacaagtcgatgttgactggtacttggtctgttcgtcaggattcattaccaggttattggagttcgcaggactgtctgctctcttgcagtcccaagttattggagctaactatagatacgatgagaatgacaagaatgatgacattacc

SEQ ID NO: 25198 - DNA, 2517 bp, Oryza sativa
  ref <308>: DATABASE ACCESSION NUMBER: AK100640
  ref <309>: DATABASE ENTRY DATE: 2002-08-28
gaccacaaagcacaaaggccagagcgaaggccactccaatggatcactccacctccctgctccggctcatcttcctcgccctcggcgcagccctcgtcgtccttgtcgttcgctccgcgttccgccttcccggcgacatcgacacgactacgacctctctgttcgatgatggcaacggcggcagctgcaccaggttctcgccgtgggcgtgccggcaagggcggggcgacccgaggtcgaagccgtccaagccgcggcgaccgtcgcacgagtccgacgtgccgcggcacccgctcgacccactcacggtgagggaggtgaaccgcgtccgcgagctcctccgcgcgcacccgctgtttgcgtcggcgccgtcgtccctgttcgtgcactcgctggagctcgacgagccggaaaagtccgtcgtcaagagctggcggaagggcgccgacccgctcccgcctcgccgcgccgtggccgtcgtccggttccgcggcgagtcccacgtcctcggcgtcgacttcagcgagggcgacggcgcggtgactcctctgcctgtccctgcctccggttacccgatgatgaacatggacgagcagaccagcctctgcttcgcgccgttcaaggacgaggcgttcaacgccagcctcctccgccgtggcgtcagggcctccgacgtcgcctgcctgcccatctccctcggctggtacggcccagcggaggagaaccggcgactcatcaagagccagtgcttctccaccgagggcacggccaacttctacatgcgccccatcgagggcctcaccgtgctggtcgacatggacacggcggaggtcctccacgtctccgaccgcggcgccggcatccccatccccgccgccgcgaacaccgactaccggcacggacactcggcgccgactccggcggaggcgcaagcgcaggggcggcacgggtaccagaccgtccgcgtgccgtcgatggagccgccggcgggcgggccggggttcgagctggtcgacgggcacacggtgcggtggggcgggtgggagttccacctgaagcccgacgcgcgcgccggcatggtggtgtcgcgggcgcgggtgcaggacccggcgaccggcgagcaccgcgacgtgatgtacaagggcatggcgtcggagctgttcgtgccgtacatggacccgacggaggcgtggtacttcaagacgtacatggacgccggcgagtacggcttcgggctgcaggccatgccgctcgtcccgctcaacgactgcccgcgccacgcccgctacctcgacgccgtcttcgtcgccgccgacggccgcccctacgtgcgcgagaacatgatctgcgtcttcgagcgctacgccggcgacatcgcgtggcgacactccgagagccccatcaccggcatggacataagggagtcgcggccgaaggtgacgctggtggcgcgcatggcggcgtcggtggccaactacgactatatcgtcgactgggagttccagatggacggcctcgttcgcatcaaggttgggctaagtgggatcctcatggtgaagggcacccagtactcccacatgaaccaggtccatcaaaatgacaatatgtacggcacccttctgtctgagaacgttattggcgtcatccatgaccactttgtcactttccggctcgacatggacattgacggcgccgacaactccttcgtcaaggtggcgatggcacgacagaacaccggcgccggcgaatcccctcgtaagagctacctgaaggctacccgacatgtcgcaaggacggagaaagatgcccaggtccgcctgaagctatatgagccatccgagttccacattgtcaaccccatgaagaagacacgagttgggaaccctgttggttataaggttgtcccagccggtactgcagctagcctgttggatccagaggacccacctcagaagaggggtgcattcacaaataatcagatttgggtgacaccctacaacaaaacagaggaatgggctggtggtctatttgtctaccagagcaaaggggaggacacacttgcaacttggtccgaaagggaccgtccgatcgagaacaaggacctggtgctgtggtacacgctggggtttcaccatgtcccgtgccaggaggacttccccatcatgcccacggtgtcgtccagcttcgaccttaagccagtgaacttctttgagagcaaccccatcctagggcagcgtccgacccaggagaacgacctgccggtgtgtgccgccgctgccacgacctcttgagacgacagcggatcaccgacatgtgtgcgtgcatggtcgatgcttcggtgtatcgatctactgatatggattgttcatagtgaaagaatgtatcggtacatctacggatttggagctagccatggctggctatctatgttgctctatatatgtatgagcggatgtatgtgcactgcagtggtatgaacataattgagaacctgaaaggagcaggcttcaaggctgc

SEQ ID NO: 25199 - DNA, 2535 bp, Oryza sativa
  ref <308>: DATABASE ACCESSION NUMBER: AK100641
  ref <309>: DATABASE ENTRY DATE: 2002-08-28
gagcggccgcctcggctttcgctgcgcctgcgcccaccgcaaaacgcgaccgccatctcctcctcctcccgcatcgctcggcgcggcggcggcggcggcggcgaggcgcgcgtgctctccgaagtgcagggaggcggcgggaattggggagcccatggtggcggtggcgcggggccggcgctgcaggggcgtggtgctgctgctcctcctctcgtcggtgctcgcgcccctcgtcctctacggcggctcccccgtctccgtctccaccctcccggactccaccgtggcgagcggcgtgctggatcgggatggcgagtacaatctggtggtggctgcctccgacgtctccctcaccaaagatttgacgattgagaggctaggcgagcacaagaaccgggtgctatcagcaaccgaagattggcaagtggttgaggcggcgagtaagaatccggcattcgagaaatccgatgcaagtgtatcgaggaaggacccaggatcaggggatgccaatgtggtgattactgaagggaatggtgctgctcagtcgggacgggatggcgttatctgggaggttgtcagcagggacagaggttcagatgggtttactcaaccatgggagatcaacggaggtgaggagcgggatggtgaaagggttgatagggtaaagttgggtgttagtgtggaagaacagaatgatggaacaggtgaaacaggggtgaacaacattgctggaacgcacactagtggaaacctgaattcatccctagaaaaggaaaggagcactggtagattgtctgaacaagttacaaaagctattcccaaagagtcttacacaccaacaactaacagtaattctgctctcccaacaagtgttagtgctggtcattccactacttccccagacgctaccatccgcacaatcaaggaccagttgacgagagcaacgacatatctgagccttgtagcttctagaggcaatcatggttttgcaagggagcttcgtgcacggatgagggatatccaaagagtcctaggtgatgcaaccagtggtggccagcttcctcagaatgtacttagcaaaataagagcaatggagcaaacattgggaaagggaaagagaattcttgatagttgctcgggtgctctgaacaggctccgtgcaacccttcactcaacagaggagcgactccaatctcataaaaaggaaaccaactatctagcacaagtagcagcaaaatctttaccaaaaggacttcattgccttccgctgcggcttacaaatgagtactactacaccaactccaacaataaaaaattcccacatatagaaaagttggaagatccaaaactctatcactatgcgttgttctcagataatgtgttggctgctgcagtggttgtaaactccactattattcatgctaagaaaccagcagatcatgtcttccacattgtcacggataggcttaactatgctgcaatgaagatgtggttcttggctaatcccttgggtgaagcagccattcaggttcaaaacattgaagagtttacatggctgaattctacctacagtccagttatgaagcagctagaatcacagtctatgattgattactacttcaagagtgggcaggccaggcgtgatgaaaatcccaagttccggaaccccaagtacttgtcaatgctcaatcatctgaggttttatctccctgaaatcttcccgaagcttagcaaggtgttattcctggatgatgacactgtagtacagcaggacttaagtgcgatttggtccattgatctaaaaggcaaggttaatggtgctgttgagacctgtggagagacctttcataggtttgataagtacctcaacttctcaaatcctcttattgccagcaattttgacccgcgtgcctgcggttgggcgtatggcatgaatgtgttcgatctatctgagtggagaagacaaaagattactgacgtctaccacaattggcaaagactgaacgaaaataggatattgtggaagctaggtactcttcctgctggtctcgtaacattttggaaccgtaccttccctcttcatcactcctggcatcagttgggacttgggtacaacccaaacatcaatgagaaggatatccggagggcatctgtcatacactacaatggtaatctgaaaccctggcttgagattggattgtccagatatcgcaaatactggtcaaaatacgtcgatttcgatcaagtcttcctacgggactgcaatataaatccctgaatgacagagtgttgtattatccaattattttcttttcacctggtagattaattctttacgctctaggttttatttaagctgtctagagcgatattcttttatctgggctcttctctcttgtaaaggttccagcaagttagtggtaggctttagatcagagacatgttcaatcacagatcacgaaagctgcatcacattttgtagtcactaatgttaatatagtaaattatttgattgtattattcctatggaagagt

SEQ ID NO: 25200 - DNA, 1808 bp, Oryza sativa
  ref <308>: DATABASE ACCESSION NUMBER: AK100642
  ref <309>: DATABASE ENTRY DATE: 2002-08-28
gagatgatgattcgatcacatttactcctactcgagatcaagatcttggtggtactactcatcgattaattaacttgtactcatcgagaccctgatactgatcaatcaatcaaacaatcagtcagtggttagtgctcgtcgtcagagatagcaaaaaggcgcaggcaagaacgaggagaggacggacaggcgccatcagaaaaggaaagaaacgtgagagagagagacacagatcgcggcggcgatggccggagatggggaggatggcggcgagagggtgcggctgttcgtcggccaggtgccacgcagcatggcggaggaggacatcctcgccgtggtccgcgccgccgcacgcgccgacgacgccaccgtcatccgcgaccgcgccaccggcgcctcccgcggttgctgcttcgtggtgtgctcgtcgagggaggaggcagacaaggccatcgccgcgtaccacaacaagtgcaccctcccaggagcgtccagggcaatgcaggtaaaatacgcggacggcgagctggaacgattagccgcagagcagaagcttttcattggcatgcttccaagggatgtgaaggagaatgaagtttctgcattgttttcgcagtacggaaatattagacaactgaaggtactgagaagtccacagaaaacaagaaaagctgcagcctgtgctatcctggaatttggaagcaaagaacatgctagagcggccattgaagctttgaatggcacacgtgttgtgttcaatggttcaagtgcgactttggttgttaagttggctgacactgaaagggaaaagcaagctagaaaggcacagaaagctcaggctcaaccttctaagcccttaagattttatctcttcccccagctgctatcaatatctggagcaccacagatgagctttcttcctccatataatgtattggattacaaggtaccagggcattatggacacacgaagaacccattggcattgtacagcactatgtacccacatgtcaatcaaggaaatttactccagggactcaacacaaatatatttccaggaacagatcctaaaatttcgaacctgattcaatctgctggatacatacaacctccttaccctgatttgtcaggtcttcattacccagtatcatatgcaggtgccttagtgggagatacaccacagtatttctctgatggtaaggtaaacataccaaacagtcatagcaatcatgcctcatctgcagcaaacacaaagatagggagtaagattgaaggacctcctagggctaatttatttgtctatgacatccctcaagaatacggtgatgaagatctggcaaatctatttcaagaatttggtaggatcttgagtaccaaggttttcattgacagagctactggtgtcagtaaatgtttcggctttgttagttatgacacaccagcatcagctcaggctgctatcaggaggatgaatggctcacagataggtggcaaaatgctcaaggtacagctcaagagggaaacatgatgtgacaactgacaacccagttgacatgtagtgaaattatgatgtctggacattgtagtgctgagagtaccatcctgcatagtgaacaaggcagtgcagctggatatggaaaaccatagatgtagctatgacaaggttgttcattgttactcttgaagatcgccagaatttctaggcacagttctcttgttgcattacacacaactaatgcatatgaacaagccatgtaattggatctggcatttggtcaagcataaggtagttccgacattcgattacg

SEQ ID NO: 25201 - DNA, 4052 bp, Oryza sativa
  ref <308>: DATABASE ACCESSION NUMBER: AK100643
  ref <309>: DATABASE ENTRY DATE: 2002-08-28
gactaacctagttagccactctattactactacctccgttgccaacgccggaatccatccatccatccccgcgccgcgctgtgccgccgcgagagctttgcggcgggcatgcgggtggggattcaccgcggggtggaagaagctgaagcagcagctggtggcgcaacgccacgaggcgcaccccgctggcacccacaccaacaaaaggagaagattctcgccaccaccactcccactgatcccctcttcttcctcctcgttcgcctgccatctccggagccggaggaggaggaggagtagccgccgcccagatctgcgccgccatgctgccgctgctgcggaggcggcggctgtgaatagctaggtcgtttttattgttgtttttgggttggtttggtttgattccgatggggtgcgggcagtcgaagatggaggaggagtacgcggtgcggcactgcagggagaggtcggagctgctcgccctcgccatccgccaccgctacgcgctcgccgacacccaccgtgcctacgccgaatccctcgccgccgtcggcgccgtgctccacgacttcctccgcggcgtccagtcgctgcccccgccgccgctcgagcccacgctccgccttcccgcccaccgcaagggcgacaacctccccaccgcctcccccgtcccggccaaccccgccatcgcctcctcctccgccgcccagccgctgccgcccgtcgccaagcaggtacgaatcgccgccgcccccgatgacggcggcggcggcggccacatccacttctcggacgacgactccgattccgagggcggcgggcacatcaagttccactccgacgacgagggcgacgcgcccgctcaccggcgcccagagatcgtccgctccgccgcgccgccggtggctccgccgccgcagatggggccaccaccaccgtatggctccggatatgctcctcctccgccttatggttcgggatacgggtatggatacggccccgcccccgattacggcggcggcatggccgttgccaacggcggctatgacccagggtatggtggtatgggcggagccagtggcggcggcggcggcggcggctatgcgcctggatatggaggcatgggagttggggatggcggcagcggtggcggctatgagccagcctatggcggcatgggcagctatggccaaagcttcttcaacatcagctatgcgcgcagccagccgcctccgccgtccgtctcatacgagcaccggctgcaggccaccgatgccagggtccactactacgccggagaaggcaaccctcaagcacccccactcgggtatggcggtgggtatggttatccgccgcagggctcgagctcttacaaccagtatgcgtacggtggttactatggtggtgcttctcctccgcctccggccgatataccttctacctcccgcggggaggttacgccaccggcacctccatctccgccgagggtgtctacttgggacttcctgaacccatttgaaacctatgagagctactatgagcagccaactgctgctcaagcgtcatacactcccagcagaagttccaaggatgtgcgtgaggaggaaggcataccagatttggaggatgaggatatggaggtggttaaggaagcttatggtgatgagaagcacgccgccaatgggtacagtggcaaggggaagatggcaaaagaggaaggtggtaggagcagcaccggggatgaactgccccatgaatccaagttatcggaagcgagcagtagcgggagcaaccaggagcatgatgtccatgtagtggagaagagtgttgtgggagaacaggtgcagcggtcagagcctcgtcagcatgtcgcaggcctgccgcccataggatcggagaagacgtactttgatgatgctgaggtggtgctggagatcaggactcaattcgagcgtgcctcaaaatctgccattgaggtgtccaagatgcttgaggttgggaagatgccttactacccgaagagttcaggtttcaaagtgtctgcgatgatgatttgcgggataccaacaatggaggaagagttcctgcggtttgaagaagacaaggcgatggggtgtggcaatctttcctcaacactgcagaaactgtacatgtgggaaaaaaagcttcttgaggaagtcaaggctgaggagaagatgcgggcgttgtatgacaggcaacgtgaggagctgaaaatattagatgagaaaggtgcagaagctgataagcttgaggctactgaaagatccatcaggaagctatcaacaaagataagcatagcaattcaggttgtcaacactatctcagacaagataagtaagctgagggatgaagagttatggccgcaaacatgtgagctcatccaagggttgatgcggatgtggagcactatgttagaatgccatcagatccaattgcatgccatatcccatgctaaaaacatagattccatgataaacggtgcaaagtttggtgaagctcacatggacttgatcaagcgcctagagcttcagcatttggattggatagcctcttttgcctcatgggtgaatgctcaaaaaagctacgttggtactttaaatgactggttgaggaaaggagtcacatatgaacctgaggtaactgatgatggtgtgcctcctttttctcctggacggctaggagcgccacctatttttgtcatatataacaattgggcagttggtgtggggaggatatctgagaaggaagtagttgaggcaatgcaggcctttgcatctaatgttcttggcctctgggaaaggcacaggtcagagcaaagacaaggtcttatggctaataaaggtatggacaaggaccttagggtgatggaaagggatgaacagtcgatgcgcaaggctctggaagcacaaaataagaagctggtgctcatttctaatcagagcggtgtatccttatcagcacaagcacaggccttacaagatggaggttcccatggtgatactggtagtttgcaactaagtctgaagaatatttttgaagcaatggagaacttcaccgccaactctgcaaacacctacaaggatctccacctgcgtgctgaagaagagaaagctcgcgttgcccaagagagttgcagagtttcctagttcctttcgtggtttccatgttacatgagggcatgagccctttttaacgcaaaggagctgactgcagtggttcagatgagcactatagtttgcatggcagcgtcacaattcaagtggcaagtgatgcaccttgcatgaaatagcttctacccagggctgcgggctgccagacaaacctgtggcgtaaatggagacttgctagattgtgtttttttgaattggagcaacactcctcatgccatacagcccaggaactcaattttgctaatagctgaatcacaagacattgccgataggggaagaaaaatctgaagtggcgagtgacaagattcactcaatgttgggaaatcccagtaaatagttggaagatgtaagctgcataaacgaaatgcatggtctaagcatggagcagtaaaatgttccgatcatgagtccaagattcatgaagttgtatccatccatatgaaatagtcaaatgtgatcatgctgccaggttcagggaaagagtcactggaagagtgcaacaatgctagcatgccagtgtacatagttgaaggcaatgcgatatgggatgaaccaaagctgatgctgtgggagatgcttccctcccagctgggaggctgcagcctagctagttcacctgttaggggagtgatggatgatgatgagcttgtaggatagagaaaaaaagtggatgccctgaccccgttctgcagttcactaactgttggatttttttgttccgttatttattatacatataattcatttgtatccctgtacagccggtggctaactcataaacccccccttttttgtgtcatgtttattctatttctcccccatcgactttgcctgtttctgcttctctctcttttaatcgcg

SEQ ID NO: 25202 - DNA, 1663 bp, Oryza sativa
  ref <308>: DATABASE ACCESSION NUMBER: AK100644
  ref <309>: DATABASE ENTRY DATE: 2002-08-28
gatccacccacagagcaaccggtatgttctcttccccctctccctcagtctgtccgtcctcctcccctcccaagctcgcccctcctcctcctcctcctcctcgatccgcttcgacgctccactcaggcactcacctccccccgtgcgacgacctcctctactgctgccgctgcgggcgcttctctccgagcctgagcggaaggtggagatgaagatggtgggcgaatcggagggggggggggggggggcgctccggtcggccaccagctcaaccccgtccacctctccttgtggcggcggccccctttgccggcagcggcgacgacctcctctccatccccctcttccagtgttgggccggcacaggagcatgcggcggttggagcgggtgctgcagcggcgaacacgacggcgacgagagctgtcgtgggtggcggtggtgggctcgctgaggctcctccatccccctcctttttttgtgcagttttttctcctttttgattttgattttcccctttgttgtgattgaatctgtgatgaatcggttgcccgacaaggcgagtctgtgatgaataggctgcgaatctgtgggttgtttattgggttgatcttttttttcctcttttttatttactcttttcttgtgattgaatttgtgatgaattggctgcccgatgaggtgaatttgagacgaatcggctgggaatccatgcgtgttttattggatttcaattttgattttgttgtttactttaggctttttccccttcaatttcgtttatttttttctctagttttactgtttccaatcttaaatattgaagtgcctcatctatcttaatttgggcttgtgggcttaatgtggcaaactgaagtaggaatcggtgtggggtattttttgtgcgtgatacttgtgtgcggtgggaagaaatcggataacgcgggacgaaaaatcgctggtgaaaaggatgtgacgacaggaaaaatccgaatatttatgttagcctcggcgatttccggtagtggcctggtggtcgtcggtagggacgccatcctccgtcccccggaagagaaggaggattaagtgatgtcgtcggctttctttcgtcccacaaccttttttcaaggcagttggggatctgaaattgaatccaatcacttcttcatagccggtgaaggaggggtggcggaggccatccatatgctgcaacatatccagcggccatccatatgctgggagccacagcgtcgcctgtggtgggagaggacgccacatatcagatccagcacggtaccgatcttcctcgtgttttttttctttttttgcggagtagcttcctgttgcatctggtggcgtgttaatggccggcacatctcactgtctcagcgcgataagtttgcagcttaaaagatatgtgatcattatgatttaatctacatttgccgatgcggccggcgccgggtttcctactcgccaccgtagagccgtcctccccttcatgctctgccgacgaccaccacgatggttgtgttgtcatgatttatttacagcccatgaggcaaaaaaacaggagaaacatggaagtcatttgatatttgattgcacattggggcttgatccttgcattgtgcttggtgagattgaattttgttcttttcactt

SEQ ID NO: 25203 - DNA, 2596 bp, Oryza sativa
  ref <308>: DATABASE ACCESSION NUMBER: AK100645
  ref <309>: DATABASE ENTRY DATE: 2002-08-28
ggtagatcacgcacctttctggctttcagcaaccccccttttcacctctactctcctctcctctccccgagaccgagacaccgagactgagtccgtgtgtgtgtgtgtgtgtgtgtgtgtgtgagtgagagagagcagagcagagcagcggcttcaccggaggccttctcccgtcggaggttgctgattctttcttgctcagagaacaaatcaacaatgtgcagtcaggtggcttggttctgagaagaatttggggggaggaaacacggctaatgccgaatatgttcgggttctcgaggagccggatgaggatcggaagatcgaaagggcactcaacagatcctttggacagctctaagagtccttcagggcttgtgaagcacctcagcctgcctaatggggatgaccaaattacaacgtcagtgagtggccgtgtagatgatctcgccttccgttgctcatctgacacatatgatctcgacgaccgcgctttggttagctcacggaactgggctgtcctttctacagagggcagtagaccatcaccgcgttttgcgcatgcagcagcccttgtagggagcaaaatggtagtgtttggtggcgattctggtgatcagttgttggatgatacaaagatattgaatttagagaagcttacatgggactctgtagctcctaaggtccgtccatcgccaaacagacgtccgtcaaagttgccagcctgcaaaggtcattgtctggtccaatgggggaacagtgttattcttgttggcggtaaaactgaacctgcatccgatcgtttagcagtgtggactttcaatatgggaacagaggtttggtcacttatggaagccaagggtgatatccctgcagctcggagtggccacacggtgaccagagcaggtgctacattgatactttttggtggtgaggacacaaaaggaaagaaacgacacgaccttcacatgttcgacctgaagtcatcaacatggctacctttgaactataaaggctctggaccttctccaagatccaatcatgtagctgcactatatgaagataggatccttctgatttttggaggccactcaaaatccaagaccctgaatgatctgttttctttggattttgagacaatggtatggtcaagagtgaaaatccatggtcctcatccaacacctcgagccggttgcagtggagttctacgtggaactaagtggtacattgctggcggtggaagcaagaaaaaacggcatgcagaaacctgggcttttgatgttgtagaatataagtggtcggtatgtgtagtaccccctagttcctcgattgctacaaagaaagatttcagtatggttcctttgtaccacagggacaaaattgttcttgttgcttttggaggaaacagaaaggagccatccgacaaggttgaaatattggtggtactgcaaaatgaacattcttttagcaggcggtctgcaccagatgtagatcctttactatatgaatactctccgagcaccaaggagcttgccagccatcttaacaactgtgctcctttgtattccaatagttctgttgcaaggcacagtctcgcttctacggtagaacacccacctagaagggaattactctctgagccattgttacagaatccaaatttgggcgcttcactccacaggcagttccatcaatcagaagcgtgcagtttagcccaaaaactgcagaaaccggtcgacgatgacaagtacgatgacactgatgattgttcttcatgtcaagcaagcactccaaaagagtatcgaagcaagagaactggaactgatgctcagattaacatggccagaattttatccagcaaggaagaaaatctggagaccacgggatcaagtgcaagaaggatagcaagatgctcttcagacattagtcatctatacaatacaaaaatagtagacttgatcaaaagaagctctgcacttgaagaccagcttgcgactgccttggtgagcaaagaacaggcggagaagaatttatcgtcggtcatcaacagcagggagcagctggaaaggaggcttgccaataaggaaaaggaagctgagatgctgaaggagaagatagcaggcttagagttggcacaagaggagtcaaacaacctctcgaacaccgttcatgccgataatgtgcgtctggaacgtgaagtggcattcttgaaggccattacagatgagactcaaaaggaactccattcgacccgccgagttttagcgggagaacagtcgagggcattccagctccaggttgaagtgttccatctcaaacaacggttgcagatggaaggaagagcgggaacgccaaagaaccctcctgtttaatccatagtaagcaacaaagagcaaagtgtgtttagttcatatgtttacatctctggaataatagtggttgtgtgtttgtaacatcgtcttgtacatcaatttgttacaggagtggagtgtatatgtaataacagggttcggttaaccattctgttacatgaactgatacagatttgtaatttggctgagattttgtgtgcagttgatgaatttagaacagtttgctc

SEQ ID NO: 25204 - DNA, 2604 bp, Oryza sativa
  ref <308>: DATABASE ACCESSION NUMBER: AK100646
  ref <309>: DATABASE ENTRY DATE: 2002-08-28
gtttcttttgttgttgtttctctctcgcttgtgattgactcctgcagttctaccccagcctcaaccggtccaagtgctgcgccaagggaatctgcacggagtgttttctccagatgaggacgcccacctcgtgccggccgacgcagtatccttagcccaattcttgtagatttttttgttttgtttagcttagatgttcttcagtgctattattcattgctgatgttaggaatcctgcgtgcgtgccatgtattatgtgtcatcttgtttggttattccttgacttgtaaggtgcccttactgcaaaatggcgagttacgcggttgagtaccgcggtgtcaagacgaaggaggaaaagggcactgagcagattgaggagcagagggtggtcgaggcgcagatccggatgcggcagcaggagctccaggacgatgctgagcggatgaagaagaagcaggctgctgctttgaccgatgtggtaacaactgcacaagtagaacattgtgatactggtggcgcatccaccacagtcaaaagcagtgggcaaggcagtgatatgctctcatctcaagtgcagcatgcggagttactgctgaagacttctgaacgcttaaagcagatgcggttcgtactgcttactgagttgtgcttgatattctgtaaaagtagctgcttattgttgcatcagtgcaatttagatcaaagtcatgacagtatctcaatgactgactaccgtttaagatctgaaatgtctatatctggtccctccaatcctcaaatagtttaagttttcgtccctcaactccaatattagccagaactcatcagtcaactatcaaaacgtctaaatatgttcttgggcatgttttccaagtggttttgagtgccgcgccatccttttttgccatgtcttttaccacatcaggcaaacccacatattagtttttttcctctttctttttaatagaaaacaaatggcgaggaaggggatgaaaataataaacctaaatggataatctgttatctaacatatccaattactttcttatttttgtgacttgtttcccatgtattcagcccaataggatgccattcaggacaaaaccactgatgtacttagccagggacattatttgtatggtgttgatagttcagggacgaattctgtccgttattggaattggagacaatattaaataacgtgcagagttgacaaaacaaatataagactttttcctgagatgtttttttattgttttgtcaatccgtcgactagataagtacaggcctttcaaatcttggttttggtgctctgacttttgcttcttcttcttttttttttttgggggggggggggtcaattttattgatctaatgtttgttgcagcaccacagcatgtgtagtaaatgatagttatttttgtttttgacttatctagaaatcattctattatgtaagaagtataacgggcaaacatgtataatctgaaagcttatggcctctgcaaagttcagaacgttaatttgtttgtgggtgattttgatattgaaatgagtatttgttctgaaaatttcttttccacagtacacctgtttgatgacattctgctatccacttctccttccttaattaatgtgttccttttatggtgctagtatatgccacaaatgctgatttgctgggaataattactgatgaattccttaaagcgcaggaataataattttgacatggatcctgacgaagttatgcttgttgaagcactttggctttctctgcaggatcaggaagcctcgggaaatccaacctgtggtaacacagtctcatcagtacatcctccgagaagctttgaaggttccatgacaattccagctgaagcagcttcttccagtagtgcatttgcttgtgcagtcgcagctttagccgagcaacagcagatgtatggagaagcttctagcaccgctacttgccacacgtcaagatgtgacattctcagcaggtcagacagatcttttacagaggatctgagcataaacgggagtggttcctcaggcgctaggtctgaggaaccatcgagcaacaaaatgcaccaaacaagggagggtatggagtattctaatgagcggtggtcagagatggccgaggccagtagcagctttaccggctctgatcttacaacagaggctggagctgccaattcaggtggatccgacactggtgctggcagtattcctgatagtttcgaagaacagatgatgctggccatggctctttcgttggctgatgctcgggccaaggctagttctccagggctaacttggcggtagcatttggcagtgctttattctttagctgggtcgtgtttgtttgttcttgtagttccttttgtcacataaaaacataggattagagggggaacagataagaaaaaaaatctagcctggatgttgtgaatatagtgggataaaaatgcacatttgcagtcagtctttgcccttttctcatgatctttttttttctttcttcagaaagatagattctgtcaagcagaccttctgtctgcatacattgtgccttaatgacttttcagaattggtgtaaat

SEQ ID NO: 25205 - DNA, 888 bp, Oryza sativa
  ref <308>: DATABASE ACCESSION NUMBER: AK100647
  ref <309>: DATABASE ENTRY DATE: 2002-08-28
gggggagccttggcggggaggagggggcgaggccggctgcggcggcggagggggcgcggaggccgaggttcctgtgcctgcacgggttccggacgagcggggagatcatgcggaagcaggtggtggggaagtggcccgccgacgtcacggcgcgcctcgacctcgtcttcgccgacgcgccgttccccgccgaggggaagtccgacgccgtgggcatcttcgacccgccctactacgagtggttccagttcgacaagaattttacagagtacaggaatttcgacgaatgcctgaactacatcgaggaattgatgattaaagaagggccttttgatggactgatgggtttctctcagggctcgattctatctggcgcccttccgggcctccaagaacaagggttggccctgactagagttcctaagatcaagtacctcataatcataggaggcgccaagtttcagtcgccgacggttgccgagaaggcgtacgccaataacatcaaatgcccctcggttcacttcctcggtgacactgactttctgaaaacccatggcgaaaagcttatagaatcatatgtggatccattcatcatacgtcatccaaagggccacactgttccaaggcttgatgagaagagtctggaaatcatgctccgtttcctcgataagattgagaaggagacagcgctcgagcattcatccactgatgttgacgaaaaggaaatgtacttgtgaagggtagaagattagtgtccagtccagatacacaccaaattcatactatagacaagcatactgttgtacttgtatcctccttatttatgtggtggtacaaagagttgaaaactattgaataatcacgcaaaagaatggatgtgtactcttt

SEQ ID NO: 25206 - DNA, 2525 bp, Oryza sativa
  ref <308>: DATABASE ACCESSION NUMBER: AK100648
  ref <309>: DATABASE ENTRY DATE: 2002-08-28
gtgagtcatcgatcgagtcagcacagcagcagctgttgtagctgacgcgccctgtgacgactgatctgattcagattcagagtccagattcagctccctgcaccgcaccctcgtcgtctcgtgtcgtctcgtctatcgtgtcgtacgagatagagcgtatagctatagccagccaagtgcccgtgttggtgttgcacttgccgccacgagatcgatcgagccctttttgcctcttttttttttaaaaaaaaaagagagaatatttttgcatccgggtagcagccagtgaatacagttacgaaacatgaacgtttgatcgttgactgcatgctagctagctgcttttcaaaagaaaaagggcacacatttcttttaatttagatgaaaaacaatatatatggatcgatcacacattaatctctctctgcaaattctgctatagtgatgtgccgagcactgtttgattgggccttctagctagttttcctcgagataataacacactcatatgtataatatactgtatataatatatgatcatgatctctggaatgatcattacgtcgtctttgggagaaaaacacatgattttacacaaactgagatatagcaaagcaggaacgacattgagtagaacgatcttaagatagtatatattcaatcgatcgtacgtaggcaaataaactaattaattaatcaactgactgagatactagctttattacagaaacaacaccaaatttatcagcattcaaacattattttatttattattaatttccatggaatgtctcaaacaatgtcagaaaatcaggtgatgttttaagtgcagtatagtagttttttatgtgtacaaaagttcaatatatatttttcagaatcatttcaataaatacatcatagctaggattatcggtaaaatattgtcacatataattcctagctaggaaaaatatataaaacaatttgcctgtatctacagtagttgcacatgctaaggaattgtatatatggattggtagatattatatttgtattgcacatccatgaagagataagaggtttaattttactcttccattatctaaaaggcaggtaaaacatttccattaattatctacaaaaagtctaaaaggtaaatatcatgttggatatatgtatcaaacgatagggttttctaaaacattctgtccaacaatttaaaatgtgcttagtttctttttttccccttgtttagaaaatagtttttatgaagttattttgagtggcattttccctcaaatgtggtgtgtatgaaatttactaaacaatttaacatttgagcttaaatgcatacacatcacatgaaattaatagcaaaacaagttgatttcttctcttcctagcttggttcaactaaagtaattaagagatgataaaatattatttggataaaagatggtgtaaattaaagtatctatatctgaaactagagaatagattttgatttttcttgataaatttattagagaagaatttgcagtacacataaaaacaagccaagaaagtaaaagtaattaaggagggaattaatgtaatgtgcacaattgctagaggaacatttgaaaagtaatccatatttatttgatgtcttttgcatggttgcatttccgattaatgttcatatatatgtgaggccttcgaagtaatttaccaattaaaatgataatttgcatgcacattttgtattgtatatagtgatgacataaaatgattttgattggcattgctacaaaaatgattttggcattgctgtatatgatcatacggccggggatattgattgcaatcagttgcttttgtcaatagttaattagaattttcgagtgtgaagggagcttatagacgaactgaccgaaacaataaaattaagaatcctcccaacacaaaaccctcatgtgcactgtacgtagatgtgtccaaagatcatgtgcaaaatttgtacaatcaatgaaaataggaccggatgtttcacatatatagttaattaaattccaggccataattttttaacaaaacaaggttgattatactaaatataagaaatgattataagtctattgttacaataaaggacataaaatttgccaagacaaaccaatatactccatatatagctcaaaaagtcacaagctagagatgcgagcagaagagcgcaaccacaatccttttgagttatttgtgcaacaaaaactctatttcttaatatattgacgtgcaatccttttgcgcgttcgcgaaaaagaagagcgcaaccacaacattgttgacgtcaccaactccagcacatgcaaaagtatatatgaatgtgtatatgtcaccatcttcgatcctttgacaaatctgtaagtcaacgtcatcaaacaaattggagacccagattttaaaatccgcaccaccgattgaatcgtcggtaacttagcatacaaatcttcctagatcttcatcgatgatcccagaaatacagaagacattgtcaaagatat

SEQ ID NO: 25207 - DNA, 3967 bp, Oryza sativa
  ref <308>: DATABASE ACCESSION NUMBER: AK100649
  ref <309>: DATABASE ENTRY DATE: 2002-08-28
ggcggaatcagcggggaaccctaacccccccgccgccgccgctgctcccaacccggcgggcgccaggctcatgcagctgctcgggaacacggcgcccacgcacctcgagtcggcggtgtccatgccgatgccgtcggagttctccgccgccgcggctgtggcgccgcccgcgccgctgcccgcgatgccgtccgcgccgcccgcgaggatgccgagcagcagcagcagcaagatgccgagggggaggctcctggggccaggggaccgggccgtgcacgacgtggactcgcggctgccaggcgaggcgcagccgcctcagctggaggtgacgcccatcaccaagtacacgtcggacccggggctggtgctcggcaggcagatcgccgtgaaccggacctacatcgtgtatggcctcaagctcggcaacatccgcgtgctcaacatcaacaccgcgcttcgctcgctcctccgcgggcacacacagagggttacggacatggctttctttgcggaagatgtccatcggttagcaagtgcaagtgtagatgggcggatctatgtatggaagattgacgagggacctgatgagcagaataaaccacaaatcacaggaaagattgaaattgccatacagattgtaggagatgctgaaacttaccatccaagaatatgttggcactcccataagcaagagattctgtttgttggagttgctaactgcgtcttaaaaatagacacaacaaaagtaggaagaggaatggacttcagtagagaagaacctcttaaatgcccactcgacaagctggtcgatggcgttcacttggttggtaaacatgatgcagatattacagatttgtccctatctcaatggatgactactcgtcttgcttccgcatcaaaagatggcatggtaaagatctgggatgatcgcaaatctgtgcctctgtctgttctgaaaccacatgatggtcaagctgtttactctgtttctttccttacggcacctgagcatccccagcatataaatctcatcacagcaggccctctcaatcgagaagtaaaaatttgggcttccactaatgatgaaggttggttgttgccaagtgactctgagacatggagatgcactcaaacactggagctcgtgagttctctggaacataggtttgaggaagcatttttcaaccaagtagcagtgttgccacaagctagccttattttgcttgcaaatgccaaaaagaatgctatttatgctgtgcatgttgaatatggcccagatcctgcttctactagattggactatatagcggattttacagttgcaatgcctattctaagtctgacaggaacacacgaaagccaactggatactgaacagatagttcaagtgtattgtgtccagacaatggctatccagcagtatggattggaattatctctttgtttgcctcctacagctgataatcctgggtttggtagagatccagctatttctcatgtgtatgagagacctccagcagaagtaactgtggtggagtcatccaaggaaactagtctgattgattcctctgttgttggtccaactaaaccagcaagcaataatcaggccctagaagcgaatgtcccttcgcaagttcaatccacaactcctccatcaagcattgaccttggatatttagaagaaggtgccttgagaagaggtccttcaagaggtccatctcttggtgatcgtgatatagacccgtcatctcttgattattcaagtaagaaaaggatggattctgatggtgcaagtgggcaaggttcatttggtaggaaggatagtttcggaaaggaagagccaagaggcagccagggtgatggtgtcctttcgtctccagaaacaattgctactggcagttctcaaaatgtagaagtggatgctaaacatgtggatgggagaaaatcagagcgaagtgttgaacttgaagctgtcaaggagacacaaattgttcatgagaaaagggagagacctcccaagactgctgaacaaactgtaaacacaatcagtgaacgcttggtaacaactgacaaatacagtgtggaagattcacaatctcggagtgctgatggatcagtatctacacttttgaaacatccttctggtgctggggatgaaaacactgtaagtgaagctccagagaaaactagtgatggttatgcttctaggaacttgcagttaaccttggctaccaaggaggagaaagttcttcatcctcaagtttctaggcagttatctccttctacaagcacttacaactctgctgattcctctcatgaacctccaagcaacgtaaaccctcctattgataacgttccacaagttggtattcaagaaacactacaacagctaatggccatgcatagtgacctgcaaaagcagctgagcacaattgtatctgctcctattgcaaaggaaggcaaaaggatcgagacatctttaggtcgtaacatggaaaagtccattaaggcgaacattgatgccatgtgggcccgtttccaggaggaaaatgcaaagcatgaaaaggctgaaagagagcgtatgcagcatatcactactctcatcacaactgctgtaaacaaggatattcctgttatgctggagaagtccctaaagaaagaaatatcttcagttggacctgctgttgcacggacaacagctcctatcattgagaaatcactatcttctgctgtttctgattcactccagaaagttcatggtgacaaggttgtgaatcaactggacaaatccctaagtacaaaacttgaagctacagtagctaggcagatccaaacgcagtttcatacgtctgccaagcaggcccttcaggatgctttgcgctctagctttgagtcaacaatcattccagcatttgaacaatcttgcaagacaatgtttgagcaagtagatggtgcattccagaaaggcatgtctgagcatggtgctgctatccgtcagcaggttgcaacagcacatactccactagcacaaactctcagggaaacaatcgcttcagcatcatcgataaaccagggtcttgcatcagagttgcttgatggacagcgtaagcttttggcacttgtttcatcggggggctccttatcgcataatacaagtgttctgcagcctagtaatggaccagtggctagtctccctgaggtcgatgctccactggatcctgttaaggagctaagcagactgatatctgagcgcaaatttgatgaagcatttacaatggctcttcaaagaagtgatgtctccatagtgtcttggctgtgctctcaggtcgatctgcacgagttatgcagaatgaaccccattcctctcaaccaaggggtcctgttggcccttttccagcaactagcatgtgacatcgtcaatgacacgcccagaaagcttgagtggatgacggctgttgctgttgcaatcagtccaacagatcctatgatcgctgtgcatgtgaggccgatattcgagcaggtctatggcgttttgaaccaccaacggtcactgccagcaagcagttcctcggaagcgaccaacatccgtttgatcatgcacgtaatcaactcggtgctgctgacctacaagtgataaccatcttcagtagcgtgctctctcagtagctgctgtaagtttgggcaacattcttgcaatccctgtacagataaaattttgaaaagcgaagtaaaccgataaaagttgtggtgatggtggtgatacattgtggctgacaagccaaggaccactagtcattagcatggtgggcatctggtgtaaattggtccgttgtgttccagcccgttctgagctgacatttttcatgtgggtctgtcatcttgaacatgttattcagcgcatgcagaatatagctctgtactgttaacctctgttgagttgctagtttaaaccgtgattttagttcct

SEQ ID NO: 25208 - DNA, 2089 bp, Oryza sativa
  ref <308>: DATABASE ACCESSION NUMBER: AK100650
  ref <309>: DATABASE ENTRY DATE: 2002-08-28
gatatcctccatcccgcggcggccgtgagcaccaacactcacgcattccttcctactccgcgagatctccggattcgtttcggtgttttgcgagtcgcgcccggagaagaggagaggaaatccggtcaatcgcggcgtcggcgtgccgtcgcttggggtggtgttggtggttctgaattttgattgcttcgtgcttttcgtttgggggagggcagtggtcgccatgggattggggaacgaggcgagctcgtcgtcgtcgcggctgctggatccggcgcctctgctgccgcaccacggtggagatggcgccgggaagctgtcgtcgcagcccaagaccttcgcgaacgtcttcatcgcggtggtcggcgccggcgtgctggggctgccgtacacgttctcgcggaccgggtgggcggcggggtccatcctcctgctctccgtcgcggcgctcaccttctactgcatgatgctgctcgtcgcctgccgccgccgcctcgccgacgagcacccgaagatcgcctcctttggggacttgggggacgccgtgttccgcggtccggggcgcctcgccgtggacaccatgctggtgctcagccaggccagcttctgcgtcgggtacctcatcttcatctcgaacaccatggcgcacctttaccccgtcttcgcgccctcctccaacgcgctcctctccccaaaggcgctcttcatctgggccatgctgccgttccagctcgggctcaactccatcaagacgctgacgctcctcgcgccgctcagcatcttcgccgatgtggttgacctcggcgccatgggcgtcgttctcggggaggacgtgtccgtctggctcgccaaaccaccacccgtcttcgccttcggcggcctgagcgcgatcctgtacggcatcggcgtgtccgtgtacgccttcgagggaatcggcatggtccttccgcttgaggcggaggccgccaacaagaagaagttcgggaccacgctcgggctatccatggggttcatcgccgtcatgtacggcctgttcggcgccatggggtacatcgctttcggcgacgccacgcgcgacatcatcaccaccaacctcgggaccgggtggctctcggccgccgtgcagctcgggctgtgcatcaacctcttcttcaccatgccggtgatgatgcaccccgtgtacgaggtcgccgagcggctgctccacggcaaacgctactgctggtggctgcggtggctgctcgtcctggccgtcggcctctcggccatgtacgtgcccaacttcaccgacttcctggcgctcgtcgggagcagcgtctgcgtcctgctcggcttcgtgctgccggcctcgttccacctcaaggtgttcggcgccgagatgtcctggtccggggtgctcagcgacgtcctgctcgtcctgctcggcctctcgctcgccgtcttcggcacctacacgtccctgctgcagatcttccattcctccagcgcttaatctctggagaatctttacggatagctgcgccgatgattgatttgctcatttgcttcgcgcgcgggtgtcagcctgtcaggtacgctggttgcattcttcgtgtacagagaaggtgatcggtcgatcagaggggcaatgcccaattcagcttgctgttgatttgggcatggacagcgtgcatcggccgcattctttcgattacaagtcagatggtttgtacaagttagcgtggatggcatggagaaatctgtatggttttgcaacgacagattcccatagctactcgtgtcagttaatatttatgtgtatgtcttggatgtttcagctgctgcattgcacggtggaatcgatgaaaggacatagtaagtttcagtctaagtttaagcctatttagttgataaataaagtgtctagttgaggttgcagcttgtgtgcggtactgcgggttgtgtcaattaggaaggcaagcaatcgggacgacttggcaaagtatacattctattctgttcattctgttttgtcccaagcaagtaaacttgtaatgccccaactaccaatcgaaatatcgaatcttctttcagcttgcctgttattacc

SEQ ID NO: 25209 - DNA, 2070 bp, Oryza sativa
  ref <308>: DATABASE ACCESSION NUMBER: AK100651
  ref <309>: DATABASE ENTRY DATE: 2002-08-28
gcggcccacactagggtttttgatccgcttcgccgccgccgccgccgccgcctccttctcctcctcctccgcggccgtcaccgatctcatccgccgccgacgatggtggggctgggcgcgatgccggggtacgggatccagtccatgctcaaggaggggcacaagcacctctccggcctcgatgaggccgtcctcaagaacatcgacgcctgccgcgagctctccgccatcacccgcacctccctcggccccaacggaatgaataagatggtcattaaccatctcgacaagctctttgtcacgaacgatgctgcaacaattgtgaatgagctcgaggtccagcaccctgctgctaagatcctggtactagctggcagggctcagcaggaggaaatcggtgatggagctaacctcaccatatcttttgctggtgaactgcttgagaaggccgaggagcttatcaggatggggttgcatccaagtgagatcatcattggctacaccaaggccattaataagactgttgagatcttggaagatcttgtggagaaaggttcagaaaacatggatgtgaggaacaaggaggaggttgtgttgctgatgagatctgcagttgcgagcaagcaattcggtcaggaggatatattgtgccctcttgtggctgatgcctgtatgcaagtctgcccgaaaaatcctgctaacttcaacgttgacaatgttagagttgcgaaactacttggaggtggtttgcacaactcttctgtagtccgggggatggttctgaaaaatgacgctgttgggagcatcaaaagggtggagaaggcaaagattgcagtatttgctggcggtgttgatacttctgcaactgaaaccaagggaactgttttgatacattctgctgagcagctagaaaactatgctaagactgaggaagctaaggtggaggagcttatcaaagctgttgctgactcgggtgcaaaggttattgtcagtggagcagcagttggcgacatggcactgcatttctgtgagcgttacaagctaatggttcttagaatcagttcaaaatttgaactgagaagattttgccgtactacagggtccattgcacttttgaaactcagccgaccaaatgcggatgaattaggatatgcagactctgtttcggtggaagagatcggtggtgcccgagtaactgttgtcaagaatgaagaaggtggaaactcagtggctacggttgtcttaagaggcagcaccgatagtatattggatgatcttgaaagagctgttgatgatggtgtgaatacttacaagtcaatgtgcagggatagtcggattattcctggagctgctgcaacagaaatagaattggcaaggagattgaaggaattttctctgaaggaaacagggttggaccagtatgccattgcaaaatttgctgaaagttttgaaatggttccaagaaccctggctgaaaatgctgggcttagtgctatggaggtaatatcttccctttatgctgaacatgctggtgggaatacgaaagttggtattgacttggaagaaggtggttgcaaggatgtctcaatcatgaaaatatgggacctttatgttacaaagttattcgctctaaaatactctgcggatgctgcatgtactgtactgcgggttgaccagatcatcatggcaaagccagcaggagggccaaggagagatgctcagcctggaatggacgaagattagtttgctaccgtgctatattttccatgtttaccgtgttctgaggtttctccgaagtagacctcttttttatcttatttataagtttggttcagtaggaagattttggtgcctggacagcacgtttgggtgggggctgcatggttgagctgattttctgcggggtatgtgtttgtgagtttgtctcggtgtattattatcatgccaatgtatcaaaatggttagctctaaaaaggatttgttctttcagatttgtatgccgaagtatcttttttctttgttgcgctgaactcttttttgttctacggtatgatgaatcacttacgctcg

SEQ ID NO: 25210 - DNA, 1679 bp, Oryza sativa
  ref <308>: DATABASE ACCESSION NUMBER: AK100652
  ref <309>: DATABASE ENTRY DATE: 2002-08-28
gcctagccccaccccctcctcctcgtcgtcgtcgtcgtcgtggtctctcctgctccggcgaggcgaccccacggccgccaaggcgcgggttagctgatttggttttgatttgatctgatttgatctggggctgcttgcttcgcggtgcagcccgtcgtcacggtgggtgggggggggggagcgcaatggacgcagagaccggcccggccgcgccgcaggaccaatggaaaagttattgcagaactatctctctgctagcatttcagagctttggtgtggtctatggagacttgagtacatcacccctgtacgtctacaaaagtgcattttctgggaggctgaataattaccgtgatgagacaaccatatttggattgttttcgctgatattttggactttgacacttcttccgttgctgaagtatgtaataattgtattgaacgcagatgataatgggggaggtggaacatttgctttatactcacttctctgcaggcatgcaaagttcagcctgcttccaaaccagcaatcggcagacgaagagctttcaacgtactatcagcctggagttggtggcattatttcctctccactcaaaagattcctggagaagcacaggaagctacggacttgtttactactttttgttctgtttggcgcatgcatggtgataggtgatggtgttttcacacctgctatctctgtcttgtcagccatctctggtttaaaagaccctggcccaggaggaataccagatggttgggtggtgttcattgcatgtattgtgcttgttggcctgtttgcactgcaacaccgaggaactcatagggtagcatttatgtttgcgcccattgttgtagtatggctgttgagtattggtgttattgggctttataatatcatccactggaaccacagaatatttcttgctctttctccacattatgttataaagttcttcaagatgacaggaaaagatggttggctttctcttggaggagtacttcttgctataacaggtactgaagctatgtttgctgatcttggccacttcactgctgcatctattaggttggcttttgttggtgccatatatccctgtcttgtgctgcaatacatggggcaggctgcatttctttccagaaacatgtcagctgtagaagatagcttttaccaatctgtaccaagatccctgttttggccagtgtttgtcattgcaactcttgcagcggttgtgggcagccagtctatcatatctgctaccttttcaattgttaagcagtgtctttctttgggatgttttccacgggttaaggtcgtgcatacatcaaggtggatccatggtcagatttacatacctgagattaattggattctgatggttctttgtcttgctgtgacacttggtttccgagacacgacagttattggaaatgcttacggtcttgcgtgtatcgttgtgatgtttgttaccacctggttgatggcattggttatcatatttgtgtggcaaaaaaacatcctgctcgccttgttatttgtcgtggcgtttgggtcaatcgaagtggtgtacctgtcggcagcagtcactaaagttcctcagggaggatgggcaccaatcgtatttgccttcgtgttcatgctcgtcatgtacgtatggcactacggctctcggagg

SEQ ID NO: 25211 - DNA, 2883 bp, Oryza sativa
  ref <308>: DATABASE ACCESSION NUMBER: AK100653
  ref <309>: DATABASE ENTRY DATE: 2002-08-28
gatcctccccacctccctcctcgccggccggagttctcgtctccggcgaccgccgccgccgccgccctcaccgtccggtaagcacctcccctcctcgtcctcctcctcccgcgtccgctcgccggcgcacatgcattgctcctatcgcacgcatcgtctcggctcggctctgtcgcgatctcgagttccagacccatccccgggagagagaggaggggggggggggagcgccctaccgtcacgggatcgtggccctgctcgccgtgcggcctcctccatccatggcctgatcggcggctgattggtacaccgcatttgcggcctgggtgattggctagtatttttgttctttgtttgggggtgaaaagatgaggaggagaggttggggggaaagggacgggcaaaaaagggtgaagaaaataaatcatatccatccctttcgcactaccgtttgaattttttttggaatatatatgtgtgtggtttgttcggatttgggaggaaagtgaggaggtggatgctcctgatttccgtgaggaactttgctgctgttggttgcaggtggagctcaggtgatcgacgccgcgatgtcgaggtctggggccatggatcttgcatctggactcggggggaagatcaccaaggatgaggtcaagtcggctgtcgatgagtaaagcatcttctgctctttgtttctctgcgttggttgattattattttctctctctcttttatttttgttggcatttagatttagatttagatatgcaggtttgattctggtgatgtactgtacttgcatgtctgctgtgctgtacttgaatgcatctcttcagagttcagggttcagaattcagtttgtatgactgagattaaacaaggaaagcacagattcactgatttcgtaatttctcactgttgtttgctcgacttttcgttctgcacccagaaattttcttcttcttttttggtggtagcagttctggacatctgaaaactcctgatgcattgcacctatttcatcttatagaatagtactaggtttttatcatgtgtattgaatgtgatgctttgtggtcgcccatcaggccatcactatataggctacttcaagccatgccaacttgtccatacgtattgtactcccctcccattaatattccaaagacccagcaataaatataagatatgagctttttctaccattcccatgtcttttactccttctcatttgcttttatttgttactgccacaaagtatgctcgctcatctttctgaatcaataatgagagtgcacccacgtcatcttctctaatgtttcatcacctttgtcacctctttaatccttgatttctcgtgcaaggtcaaactatgctctatggttaatcaaggaaaggagtacatactgtggcaccattacagaattattaaaacaagcttatcctcttttaaactatctctatctatgccagttttagcacattctattaagaatttgtcaatacattcaatatttaccctgtataaaaaacatatcaactgcttagcaagaattttattgacactcagaaaaaggatttttgtgctcagaacttggcctgtattttactgttatttattttaaataaattggttttgcaaggtatgagaaataccatggatactatggaggaaaagaagaagcaagaaagtccaactacacagacatggttaataaatactatgatcttgccaccagcttctatgagtatggttggggtgaatccttccactttgctcacagatggaatggagaatccctacgtgaaagcattaagcgacatgagcactttcttgcccttcagcttggagtgaaaccaggaatgaaggttttggacgtcggttgtggaataggcggaccactaagagaaattgccaaatttagcttggcttcagtcactggattgaacaacaatgagtaccagataactaggggaaaggagcttaatcgggtagcaggagttagtggaacttgcgactttgtgaaggcagacttcatgaagatgccgttttctgataacacttttgatgctgtctatgccattgaggcaacatgccacgcacctgatccggttggctgctataaggagatctatcgtgtattgaagcctggccagtgttttgctgtgtatgagtggtgtattactgatcactatgaaccgaacaatgcacacacaagaggatcaaggatgaaatcgagcttggcaaggggcctgccagatatccgaagcactcaaccatgtcttcaagctgcaaaagatgctgggtttgaggttatttgggataaagaccttgctgaagattccccggttccttggtacctgcccttggatccaagccggttttccttgagtagcttccgtctgactactgtggggcgtgcaattactcgcacaatggtgaaggcattggaatacgtcggccttgccccacaaggaagtgaaagggtatctaactttttagagaaggcagctgaaggtctcgtcgaaggtggcaagaaggaaatcttcacgccgatgtacttctttttggttcgcaagcctatctcagaatgagctcccagaaccacatttcagggataaggcgaggagtttgaaagaaacattatggcggtcaaagaaacacctgatgaagctcagaagcttgaagagttcttatgcgtacgaagagatgctgaaatgtgtttaactggtgaattttcgtctgttggtttgccgtgtaaaaaccgtttgatcaaggcacttgtctgcagggtgcctgttttagtctaagacgatgaactgactggtttttgtttgctcgtttctaagttgttagtgacacataagttaagtttgcagttc

SEQ ID NO: 25212 - DNA, 2451 bp, Oryza sativa
  ref <308>: DATABASE ACCESSION NUMBER: AK100654
  ref <309>: DATABASE ENTRY DATE: 2002-08-28
gaccgtacacacccccaccctgcctctctccgcaccggtctcgcacccacctgagaccggccgccgtttctcggtgtctctctctctctgcccgctccggcgagagggggtgccacacacacgtacgtacgggaggatcagtgcaacaagtgaccgcgcgcgtgcgtgctctccccccgaccgatgacaacgatgcgcgcctccgccgcgctgctgctggtggcggcggcggtcctcgccgccgtgcgcgccgaggacccgtaccacttcttcgattggaaggtgacgtacgggaccaggacgattatggacgtggcccagaaggtgatgctcatcaacgacatgttccccggcccaaccatcaactgcagctccaacaacaacatcgtcgtcaacgtcttcaaccagctcgaccatcccctcctcttcaactggcacgggatccaacagaggaagaactcgtggatggacggaatgccagggacgaattgcccgatccagccgggcacaaaactggacgtacaaatggcagcccaaggaccagatcgggaccttcttctacttccccagcatgggcatgcagcgcgcggccggcggctacgggatcatcaccgtgcacagccggctgctcatcccggtgcccttcgacgagccggccggcgactacccggtcctcgtcggcgactggtacaccaaggaccacaccgtgctggcgaagaacctcgacgccggcaagagcatcggccggccggcgggtctcgtcatcaacggcaagaacgagaaggacgcgtccaacccgcccatgtacaccatggaggccggcaaggtgtaccggttccgcgtctgcaacgtggggatcaagacgtcgctcaacgtgcgcatccagggccacagcctcaagctcgtggagatggagggctcgcacaccgtgcagaacagctacgactcgctggacgtgcatgtcgcccagtgcgtctccttcctcgtcaccgccgaccagaagcccggcgactacctcctcgtggcctccacccgcttcttgaaggagtacagcgccatcaccgccatcgtccggtacaacgggtcgaacacgccggcgtcgcccaagctgccggaggggccgagcgggtgggcgtggtccatcaaccagtggaggtcgttccgctggaacctgacggcgagcgcggcgcggcccaacccgcaggggtcctaccactacgggcagatcaacatcacgcgcaccatcaagctctgcaccagcaaggggaaggtggacggcaaggagcggttcgccctcaacggcgtgtcgcacgtcgacgacgcccagacgccgctcaagctcgccgagtacttcaacgcctcctccggggtgttcgagtacaacctcatcggcgacgtgccgccggccaccaccgtcccgcagaagctcgcgcccaacgtcatctccgccgagttccgcaccttcatcgaggtcgtcttcgagaaccccgagaagagcatcgactccttccacatcaacggctacgccttcttcgccgccggcatggggccggggatatggacgccggagtgcaggaagacgtacaacctgctggacacggtgagccggcacacgatccaggtgtacccgaggtcgtggacggcggtgatgctgacgttcgacaacgcggggatgtggaacatcaggtccaacatgtgggagaggtactacctcggggcgcagttgtacgtcagcgtggtatcgccggcgaggtcgctccgggacgagtacaacatgccggagatagccctccgctgcggcaaggtcgtcggcctgccgatgccgccgtcctacctccccgcataataaagcagaacccccaaccaagctcaggaacccatccatggtgctagctgctgctgtacacacaaacaacgcaggcgacagggagagcacgagtttttccgtttccttttttcgtacgtccccccgtttattcttcttgctcggtttactttctctttcgaggaataaaattgggcttcaagatcgacggcttcaattacctgatgtcgtcacaccggaacgaggatgaaaacacagcaaggagaaagattggccagcgagatgcatggaatgcatacaaaagctcgagatgccctctcgaatcgtcgttgcatgtagtaggagtattgattctacctgatcgtcaattaatttatcccccagttaataagtccttcaaaccaattgattgttctgtgtctataatatatatgtacatgagtatctcctctcgattgttttgatgtaatttttggttatttctatcctcgattttgttcggtacttcacctttgtaagctgttgttccgatagatgaaaatcacagtagtatatgagacatatggatgtgcaattcagtgtaccttttgaattcgatcagatttgcattttcagtgccatgcagc

SEQ ID NO: 25213 - DNA, 2663 bp, Oryza sativa
  ref <308>: DATABASE ACCESSION NUMBER: AK100655
  ref <309>: DATABASE ENTRY DATE: 2002-08-28
ggatcccatttattttttcctctcaaaagatcacaattttttcatcttcttctcgtgatatcctttgttttttttcatccatccatccattcccctttgcacggttgagctcgtctcacagttgttaattaacagcaagaacatttttttccttaaatttctatttaatttatactacttgcgagcgagagccacctaatcttggtgcccaccaagcataagcttcatcatcttcttcttctttgaagtcgtcttcttccctcctcctctcgtcgcctcttggaaagagagagagagagagagagagagagagagagagaggtgatcgagttgcagcaatggcgaggagggcgccatggctcgccgggattggggccgtgccgttcttgatcgtcgtcgtggtggcggtggtgggcgccgccgtgccggcgatggggaggttcgtggtggagaagagcagcgtgagggtgctctcgccggagcacatccgggggcaccacgacgccgccatcggcaacttcagcgtgccggactacggcggcacgctcaccggcgtcgtcgtctaccccgacaagaaggccaccggctgcgccgagttcgacgccaagttcaagtccaagtctcgccgcccggtcatcctcctgctcgaccgtggagagtgctacttcgcgctgaaggcgtggaacgcgcagcaggcgggcgcggcggcggggctgatcgcggacaacgtggacgagcagctgctgacgatggacacgccggaggagtcgccggagacggagtacatcgaccggatcagcatcccgtccgcgctggtcaaccgcgcgttcggcgagtccctcaagaggatgtcgtcgccgtcgccgtcgtcagaggcggcggtggaggtggtggtgaagctggactggcgcgagtcgatgccccaccccgacgagcgggtggagtacgagctgtggaccaacagcaacgacgagtgcggcgcccggtgcgacgagcagatggagttcgtccgcggcttccgcggccacgcccagatcatggagagaggtggctacgccctcttcaccccgcactacatcacctggtactgccccgaggccttcaagctcacccagcagtgcaagtcccagtgcatcaaccatggcaggtattgtgcgccggacccggagcaggatttcggggaggggtacgaggggaaggacgtggtggtggagaacctgaggcagctgtgcgtgcaccgggtggccaacgagaccgggcggccatgggcgtggtgggactacgtcatggactacaagatcaggtgctccatgaaggagaagaagtacagcaagggctgcgccgaggacgtcgtcaaggccctaggtctgtcgcttgacaaggtgctggaatgtatgggcgatccagaggccgacaccgacaacgccgtcttggccaaagagcaggaagatcagattggccgtgggtcgcgaggggatgtgaccatcttgcctactctcgtcatcaacaacgtccagtacagagggaaactggagaggacggccgtgctgaaagctgtctgtgccggcttcaaggagggcactgaacctcgcgtctgcttgagcaatgatatcgagacgaacgagtgcctgcacaggaacggcggttgctggagagacgagaaaaccaacgttacggcttgcaaggacacgttcaggggtagggtgtgcgagtgctcagtggtgaatggcgtccagtacgagggcgacgggtacatcggttgcaaagctgttgggccaggcaggtgtacggtggacaacggaggctgctggtcagagactaggggtcatcagacgttctctgcttgctctgacactgcattgactggatgccgatgccccccgggtttccaaggagatggccacaaatgtgaagatttggatgaatgcaaggagaagcttgcgtgcacttgccctaactgccactgcaagaacacctggggcaactacgagtgcaagtgcaagggcaaccagatctacataagaggagaggacacatgcatagccaacagcatgtcaaggttcggctggttcatcactatattggtggcgtcgtgcgtagccggcgtggggattgccggctatgtgttctacaagtacagactcaggtcgtacatggactcggagatcatggccatcatgtcccagtacatgccgcttgacagccagaacaacgagaaccaaccccttcgacagcatgattcagaggcttaagggacctggccatttgatggagaatttggttagctatataccttgtgaagagattgatacaaagatgggctatgagttcaagggaactagttatggtgatcccagaccatactcagcagatacttaagtgtgcttccaatgattttagcttcatttttgtatagtaaaagaaatggtttgtaccgagccacagtgattgagcaatagagaagtagctaggtaggcatttctgctctcatgtggaacgacatacaatacaatacacacagaatttttagaaaagaaaaatacaggtggcggtgtatcatagtcatagataaccatattaagaaaaatatggatggcggtgtatcaaaaaccataaaataaggtgtttctgtctatttggagttgttttggcatgctttcctg

SEQ ID NO: 25214 - DNA, 2052 bp, Oryza sativa
  ref <308>: DATABASE ACCESSION NUMBER: AK100656
  ref <309>: DATABASE ENTRY DATE: 2002-08-28
gacaagcccgtgcagacgagacgcgacacgcgacacgggaagaggaggggggaggggaacacacgccacactcctctcgcccgcatcgcactcgcaccgcacgcgtcgaaggatcgggaaggcgcagccccgcgtcggatcgagagctagggttatgagcggcggggacggggaagaggcagccgccgcggcggcggccgcgacgctgcacatccggtgcaccaacggctccaagctcgcggtgcgggccgacctggggctcagcgtcggggcgttcaaggcgatcgtcgccgagagctgcgacgtgccggcgccgcagcagcggctgatctacaagggccggatcttgaaggacgagcaaaccctagccagctacggtgttgagacggatcacaccattcacatggtccgtggtgctgcaccaccaccagcgtcaaccgcacctcctgcagccaacaatgtaactcctgccattaatgctaccactgcttccaattcaccagcagttggttttggaggtttgttgcatggtcttgggggttcaggttctgctaacagtggagggttgggctcatttggttctggccttccagaactatcccagatgcaacaacagctatccgagaaccctacgttgatgagagaaataatgaatatgccactcatgcagaatatattgaatagccctgatctaattcgcaatataattatgaacaacccccaaatgcgtgaaattgttgatcgtaatccagatcttgctcatgtcctcaatgatccaagcattctccgccagactgttgaagcagctaggaatcctgaacttatgcgagagatgatgcggaacacagacagagccatgagcaacattgaatcttctccagaagggttcaatatgctccgccgcatgtatgaaactgttcaagagccatttctgaatgcaacaacgatggctggggagggtgatagaagttcaaacccattttctgctctcctaggaaatcatggatcaaaccaagccagagatccagctgcaaattcaccaacgaccacctcagaatccacaacaggttctcctgctccaaacactaatccacttccaaatccctggagcacaactgctggagctgcacagggagcaacaaggccctctccagttaccaatgcaaggagtgccacagctggtggcctaggagggttaagttctacagatttgggaggtatgctgggtggtggctcggatacttccttcttgagtcaggtgttgcaaaatcctacaatgatgcaaatgatgcagaacattatgtcaaatcctcagtccatgaatcagctgcttaatatcaacccaaatgtacgtaatatgatggaatctaacactcagttgagggagatgttccagaacccagaatttgttcgccagttgacatctcctgaaactttgcagcaattaatctcattccagcagtccttgatgtcacaacttggtcaacaacaagctggcccagagcgaacccaatcaggtgctggtgcaggcaatactaacctcaacaatctgatgagcatgttcagtgggctcggtgctggtggtggcctaggtgttcctagtgcacccaatgttccaccagaagagctatatgcaacacaactagctcagctccaagaaatgggtttctttgacacacaggagaacattcgagctttgattgctacagcgggaaatgttcatgctgcggtggagcgacttcttgggaatattggctgatagactgttgtgatcgaagatgtcctcgacttgttacctgtagctcagattgtaagattgtctggttcattggttttataccgtcagattcaaaggcatcatctaggtacatggtttaggtgaataaatgagtcaagtgggttaacctttccatacatggttgtcatgtcgtgatcgagatattggtgtattgatggtactttgggttggtgtatatacatattgagctattggtggttactgcagtgtacatgaccgttgtttatgtttacttgcctgctcttacaacctat

SEQ ID NO: 25215 - DNA, 2861 bp, Oryza sativa
  ref <308>: DATABASE ACCESSION NUMBER: AK100657
  ref <309>: DATABASE ENTRY DATE: 2002-08-28
ggagggccatgaggagcggtggcggtggccgagcaactcgccgcgggcagggaacagggccccggcgtgccgcgccagcgctaccgcggagctcctgcgatgctccacctccgaggtgggacggcccctctgatccggctcctcctctcgccccttctctcacgcccaaccctaacccggctatggcgcccttgttgccggcgcctctcttgctgccgctggtgccacatccgagggagcaagagcagcaggagaatgctgaggaaggagaagaacagaggccgaggccgacgccgacaaccatggaaaagaaggttgtagagccttcaaagaagaagaaatttgtggatttgaaatcaatgtggggtagagctgaaaagaaactgaagtctatagttgatagcaataatatttctgagcattcagctaggaggaaagaccctgaacctgctactatacatgcacctgcaactaaagagattgggtgtagtagagcatgtgaagttggatttgcacaaacagaaactcaagtgccctatgaaagtatagaagtatcaagacctcaagatgtagatggcagcatagaagtatctaaacctcatgttgcaaattcagaatctgaagaggaagatgattggctagaagatgttgatgaggatgttggttttcttccacatgatcctggaaagaggattgccatctcagattatagtgtgtatcagcaagatgaagtgaggatgaagtatattgcacttgggccttgtcgaccaccactagagcaatttcctcaaagaaattgtggagttggcactttgcttgcgttatgttgacaagaaagggagggtggttgagcgccttcttggtattgtgcatgttgagaatactacagctttgatacttagagatgctatcaagaatttactaatgcaacaatcattgagcttgtctaaagttcgtggtcaaggatatgatggggctagtaacatgaagggtgaggttaatggtctaaagaagctgattatgaatgaatctccttctgcttattatgttcattgttttgcacatcaactacaattaactcttgtggccgttgctagggagaatggtgattgtgtttggttttttgagtaacttgggtatttgttgaatactattgggatttcttgtaagaaacatcaaatgctttgagttgctcaagctcaagagattgtagaagctttggaattgggtgaaattgaaagtgggcagggtctgaatcaagagatgggtttgggtaggccaggagatacacgttggggatctcactacaaaacagtgcaacatattcttattatgtatcgctcaatccggaaggttctactacaagttggaaaagatcgttcacaaagcacggaagctataaaagctcaaactgcattacaatcatttgtgtcatttgagattgttttcatggcacacttgttgaacactattcttggatacacagatgacttaaacacagctttgcaaaggagggcgcaagatattgtgaatgcggttgagctcattgttttgacaaagatgcaattggagatgttgcggcaagatgatgggtgggagaattttttaaaaaaagtcacctcttttttatgaagaacgaagtcaaagttcctcagatggatgctaggtacaagccggttggaagatcaccaagcttctttggtaaagtgcagaatcttcaccgctttaaaattgaaatgtttttgagtgttattgatagacaacttagagaactaaatgacagatttgatgaggtgaacacagatttacttgtttgcgtggcttcattcaatcccactaattcatttggttcttttgacaaggaaatgttggttaaacttgcacaattctatcccaatgacttctcagccaatgacatcatgcacctacctattcagcttgatcgttttattattgatatgcgtagagatgaaaggtttagagaagtgaacaccattgctgaactttcggtcaagcttgttgatacaaataagcatatcaattacacacttgtctacaagctactgaaattggtgctagtccttcctgtagcaactgcaagtgttgaaaatgtattctccacaatgaattatgtcaagaacaagcaaagaaatagaataggagatgaatacttgaatgattgattggtaacatttcttgaatgagattgttttcaacaagttcctgatgaagacataatacgtcatttcctgtcaataaaggctcgtagagtcaagttgtaacaacttgtgttgatttttcagaacatggacaggatcacactatcttatataatatatgttgctgatgggtatcattcaatggcattttcttcctctgtattggatccaatctttatggtggtgcagctatacgcaatgacgccaagatttctccaagacagaaaagcactacagcacaggagtgtgaccttgcagtttccagccattgattaattctatcagcgggctttcttgtttggacataacattccaagaagcagctgccagcgatcaccaaggaaccaaatgtcctccaagcaattgatcacggaagcaacctacgagttacaatgggtagcccatccactggaatcctgcagcttcccattcctatggcttttctctaacttgcaccagagaacgcacaaccacgacagactaaattgaattactcaagcccacattttcattgaggaggtatagagagctagcgtgtgttgtgagcaagcagaacaatgttatgccatatgcgtctggttttgtaggaacgcaccgcttctactgaaattaataatggtattgctatagtagttgagcacg

SEQ ID NO: 25216 - DNA, 2588 bp, Oryza sativa
  ref <308>: DATABASE ACCESSION NUMBER: AK100658
  ref <309>: DATABASE ENTRY DATE: 2002-08-28
ggttttcttctcctccctcacgctctctcccaggccgcgccatcaacgccgccgcgctcccccgctccggtcgccggactccaactccggtaaccctccagtacccgctgccgccgcgaatcggttcccctggctcccacgagcctgctcctgctaaccctagccatccgcctcctgctgctgcagcccccatggagatggccggtggaaaacacagcacaactggtggctgcaccctatccccattgatactccccctggactccggttcaaggattctcctattggaactctagcttctccccttgcagttgatgtaccaactcagctcctcctcctggagctgaaacccctctcctcttgaagctcaggtacgccgctgtgtcagcaggatgccacgcaaggttgtctctgggcctgactacgatgacgagtacgacgatgactatgatgagtatgatgaggactacgatgattacggtgagaccgggcacagtgacgacattcagcaccccgtgaaggaggagaaagagtcatcgaagaagtcctcaagtacggtgcctgtgctttggagatgctccatgtgcatgttcgataatcatgaaagcatggtgtattgtgagatgtgtggggtttttcgagaatcctttatgaaatctgccaaggatggttcaataaaagtccatgggataccaagtgattttgggacaccttcgatgccgaaatctgactgtaccaagatgccagtgaatactcgtactacagactttgatggtgaccctgagataaagaatgctagcatatctcatgagaaagttggttccacgcagtacacatctgctggtagctcatcaggcgctgggaaaaagctgaaggaggaccagagtagtagggctagcagttctgcgcagaatgaggatgtggcccagaaactttcttctgacatacagaagctaggtttagaaaagaatgaagtagatactgcaaaaccttatttacctgaagaatataagcctgagaagtggatgttcgctaatgaggaatcaggagtgctgagccaactaaaccttgcaatagtaggtcatgttgattctggcaagtcaacactctctgggagactgctacatctgttaggaaggatatcgaaaaaagatatgcacaagaatgagaaggaggctaaagaaaaaggaaaaggatcatttgcttatgcgtgggctatggatgaaagcagtgaagaaagagaaagaggcgtgacaatgactgtggccgtggcttatttggagactaagaagtaccgtgtagttttgcttgactctccaggccataaagattttgtaccaaatatgatatctggcgcaacgcaagctgatgcagctattcttgttgttgatgcttgcactggttcatttgaagctggcatggacggtgaaggagggaaaagtgttggccagacaaaagaacatgctcagcttattagaagcttcggcgttgaacagcttattgttgcggtcaacaagatggatgccatcggctactcgaaagaaagatttgagttcatcaaggttcaacttggtagttttctgcggtcatgcaatttcaaagattcatctgttacctggattcctcttagtgctgttgaaaatcagaatttgatcaaaattccttctgatgtccgtttaacttcctggtatcaaggattttgtctcttggatgctatagattccttgcagcttccatctcgggatgtttcaaagcccctcattcttcctatctgtgatgttatcaagtctcagtcaacagggcagtttgcagcctttggaaaattagagactggagctattcgaattggttcaaaggttttaatttcaccttgtggggaagtggcggcagtgaaatccatcgagcgggattcaaattcatgtgacatagcaagagctggtgataatgtagcggttagtttacagggtatcgatgggagtaagctaatactaggtgggattctttgcaaccctggtttcccagtgcctgtctctaacttcttggagctaagggttctagtgttagacgtcaccattcctatccttattggctatcaggtcgaatttcacatacatcatgtgaaggaggctgcgagggttacgaaaatcgtggcattgcttgacaaggctggcaaaccaagcaaaactgcacctcgttttcttaagtcaaagcagaatgcagttgtgcaggttaccttagacgctccggtctgtgttcaagaattctccaaatgccgagctcttggcagggcattcttaaggtcttctggaagcacgatcgctgttggagtcgtaacgcgggtactccggcaagatcagaactgaaagacctccgcccaacatctgaaaatttgaacgtatctgcagccgtgctttggggcccatattgtagctgactcaaaacggtactgtagtattgtcgatcagaagtttggcgacggcatttttcactgtgtggtcgtcgccatttccatcgtgcatttcagaatttgcgttgagatatggcctgtaaaatagtcactttcacgagttctaacccccagttttgtg

SEQ ID NO: 25217 - DNA, 3114 bp, Oryza sativa
  ref <308>: DATABASE ACCESSION NUMBER: AK100659
  ref <309>: DATABASE ENTRY DATE: 2002-08-28
ggttccccctgcgtaaaagaaaatctcccgtctcgtcgtctcctccgctccctgcggcaagacgagccgcggctgaacaggggaggggcgccgatctccatccagcgagcagagcagcggaggggatcctgtctagatctgtggtgggagaagctcttctcttaatttcagagtatacaagtaacagtttgttgtttgttccccccaaaaaagtttgggggggttcaactgaacccaccctccatgtcccaagttggatccgcccctgcaatctttgctcctgctcaggaccaactggttgctgatcgattgcggaagtgaggatggacgtggagctgaattcccgtgcgctgatggatgaagctctcaaagcaagggatgcggctgagaggaagttccacgcgcgtgatgtcaagggtgcacggaggtccgcaatcaaggcgcagaacctgtgcccgtcgcttgacggcatttcccagatggtctcgacgcttgaggttctgcttgcttccgaatcgaaggttgacggcgagaacgattggtaccggatcctgtctctcagtgcctctgctgatgaggaggaggtgaagaaacagtacagaaagctagcactccagctgcaccctgacaagaacaagtcggttggtgccgagggggcctttaagcttatctcggaggcttgggccgtgttgtctgataagagcaggaagatgcaatatgatcagaagagaaaggatcatcctgtcactaatggggccaatggtttgtatacttatgataagaaagctcacaagcgggctagaaagaatgctgcggcttctgcggccgcagcagctgcagctgctgctgcagcagcagaggctactacacgtcctgtgggacttgatacattttggacatcatgcaatcgctgtcggatgcagtatgagtacttgagaatttacctgaatcacaaccttctgtgcccaaactgtcaccatgcatttatgactgtggagactggatatccttgcaatggaaccagttcctcgttctcctggtcaaccaagcagcagcagcagaaccacaagcactcatatagctcagcaagcagaacctctggtgttccaggaacgggacatggtgtataccaacaagagaacacttacgagacctacaacaaccaaagcttccaatggaatcagtactccaagacaaataattctgctggtacaaatgcttacagtagtactgcctcagagaaaccaaaaagaaaacatgaggagagctatatatacaattattcgtcaagtggcaatgagtttgggcaggagagacctacatcaggacgggggcgattttcaaaaaggaggcagaatattaataatggatatgcttctgttgattgtaatggagataacaaggaaactgtggctgcaactgcaggaacaactgtgcttgctgatgttggaagggttaatggtacttccgtggagaaattcagatcagcagtaagtggaagaagagctaatgtcatgagggagatattccaacttgacacccgaggtcttctcattgagaaagccaaggcagcaatccgtgaaaaattacaagatttgaatatttcagcaacaagacatattgcagccaaagggaaagcagaaagaaaaaatcacgtggaccacgatgtaaaggggaacggcatcctccctcataatccaagccataaattcaagatatgtaactcaaaaggtgctgatgttgaaaatccagcaactgatgagaataatctggaacagaagcgtgtgcctgtgtcaattgatgtcccagacccagacttttatgattttgataaagatcgcacagaaagaacttttgataatgatcaggtgtgggctacatatgacagcgaagatggcatgcctcgtctatatgcgatggtgcagaaagttatttcaaggaagcctttcaggatccggatgagttttcttaattccaagtccaatattgaactgtcaccaattaactgggttgcctcgggtttctcaaagacgtgtggtgatttcagggttggaagataccagatttttgaaacagttaacatcttctcccatagagttagctggagcaaaggcccccggggaattatcaagattgttcccaagaaaggtgatacttgggctttgtaccgaaactggtcttctgattggaatgagcttacacctgatgatgtgatatacaagtatgagatagtagaagtgattgatgatttcactgatgagcaaggtgtgactgtcattccattgctgaaagttgccggtttcaaagcggtcttccataggcgcacagactctgatgtggttagaaggataccgaaggaagagcttttccgcttctcacatagggttccttctcgactgctcactggggaagaaggcaataatgctccaaaaggttgccatgaattagaccctgctgctactccagttgaccttcttaaggttatcactgaggtcaaggaagttgccacgacagaaatttctgaatagtacccatcaacctggatccctaaaaatgccatgccaaaaatgcactaactgggtgatgatccgcgttatttggctcttagctctatcatgtgatctaacttctagctgatgacttggactatgttaccagggtaaacagctaatgttgaaaactcctgaccattaattttttaaggcttttctatgtttaattttattttaatacggtatcgcatagaggaaaatataaccagggtgccacttatgatgatgaggccagttgccaaaggcatggcaatcctcattgcttgctaagaggtgtcactcttccttactttgtaaggtacggtagttctgcatacgagcttactagacagctgctgggcttctcactgtatccagtctgtaatctgtactcatttacttaatatgttgtatttccttaatccatagtattcttagctataccttttcaaattcagtgattgttgaacactggggagtgattctgaatgttaatcccatatgtagttgtggactgtggtactggtaccctaattatttgctccatgtctcaatacattcgtctgcacatgtctcaataccc

SEQ ID NO: 25218 - DNA, 2370 bp, Oryza sativa
  ref <308>: DATABASE ACCESSION NUMBER: AK100660
  ref <309>: DATABASE ENTRY DATE: 2002-08-28
gaagtgaaggggaaaatggcgtcgtccgtcgccgccgccgccgcaccgaccgccggggggccgccggggaagcggcaggcctccggcgggcgggagggagaccagctcatcatcactccgctgggcgccggcaacgaggtcggccgctcctgcgtctacatgtcattcaagggccgcaccgtcctcttcgattgcggcatccacccggcttactccggcatggcggcgctcccctacttcgatgagatcgatccctccaccattgatgtcctcctaatcacccactttcacttggaccatgctgcctctcttccctacttcttggagaagacgacattcaaggggcgcgtgttcatgacccatgccacaaaggccatctacaggctgctcctttccgattatgtcaaagtcagcaaagtttctgtggaggatatgcggtttgacgagcaagacattcttcgttccatggataaaattgaggtcatagacttccaccagacattggaagttaatggcatacgcttctggtgctatactgctggccatgtacttggcgctgcaatgttcatggtggacattgctggggttcgcgttctttacactggtgactactcccgtgaggaagatcgccacctgaaagctgctgaacttccccagttctcccctgatatttgcattatcgagtcaacttatggcgtgcagcagcaccaaccccgccatgtacgagagaagcgcttcactgatgtaatacacacgaccgtctcgcagggtggtcgcgttcttatcccagcctttgctcttggaagagctcaagagctgctacttatcctggatgagtattgggccaaccacccagagctccataagattccaatctattatgcctcccctcttgccaagaaatgcatggctgtctaccagacatacatcaactccatgaatgaaaggattaggaaccagtttgcacaatctaatcccttccatttcaagcatattgagtctttgaatagcatagataactttcatgatgtgggtccatcagtggttatggcaagcccaggtggtctccagagtggcctctccaggcagctctttgacaaatggtgcacagataagaagaattcatgtgttattccaggttatgttgtggaaggcacccttgcaaagaccattattaacgagccaagagaagtgacactggcgaatgggctcactgctcctcttcatatgcaggtccactatatttccttttctgctcatgctgatttccctcagacaagcaccttcttggatgagctccagccacccaacattgttcttgtacacggggaagcaaatgagatgtcaagacttaagcagaagcttatttctcagtttgatgggacaaatataaaagttgttaaccccaagaattgccaatcagtggagatgtatttcagttctgagaaaatggccaagacaattggcaggttggctgaaaaggtaccggaagctggagaatcagttaatggcttgcttgtaaagaagggattcacatatcaaattatggctcctgaggatctccgtgtgtacacgcagctatctacagctaacattacccaaaggattgccgtcccatattctggttcttttgaagtcataaagtacagactgaagcaaatatatgagagcgtggagtcatcaacagaggagtctgatgttccaacattgattgtgcatgagagagtgaccattcgcctggaatcagaaagctatgttacattgcagtggtcgtctgatcctatcagtgatatggtgtctgattctgtggtcgccatggtcttgaacataggccgtgaaggtcccaaagttgtcccagttgaagaagcagtgaagacacaggaagagacggaaagggtggcccagaaggtagtttatgctcttatggtgtcactttttggtgatgtcaaagttgcagaggaagggaaacttgttatatctgtggatggacaagtagcacacttggatgggaggagtggtggtgttgaatgtgaaaatgctacactgagagaaaggatcaagactgcattccgtcgtatacagggtgctgtgagaccaatcccgcttatatcttcttgagctgaaggcgttaaagttacgcttaaacgtgtccaatgtttcctagatgaacttagtagcattacctgtctgcacatgatgagcaggcattttcatcctgcttcaaatgcctgtctaatacagcatgatgtgttgtagatcactgctctgggccatcttagtgccgttgaaataaactccagctgtaacattttgattttgtagccatttctaactgttactcatttcctgtgaaattgttcttagcttctc

SEQ ID NO: 25219 - DNA, 3987 bp, Oryza sativa
  ref <308>: DATABASE ACCESSION NUMBER: AK100661
  ref <309>: DATABASE ENTRY DATE: 2002-08-28
agcttctcgacgtgaaaacgatggcccttgaggagctcgttgggcggctgtcgatggtcgactcatacagtgatgatgaggaggaaggtggcggcggcaagctctacctcacggaggaatagtggcaggcacgcgcaaggaaacaggagcaggaaggctcctgcggcagcagcaagagcaggggcagctctggcacccagaacaaccgtcggggcaaggccggtgggtcaccgaaggggaaggagacgatcaacagtgggaacaccagccgtgactactccaaggtaaaatgtttcaattgtgatgagtttgggcattttgcaaggcagtgccgcaagccgcggcgccaacgtcgaggggaagtaaacctgacgcagggggaggaggagctgaccttgctcatggctcacgtcatgggggtgtctctcgccggtgaggagacactcgggcgaacacctggtgtgcacgaggtgcatctcactgagaaaaaggtgattctgaatcatgaggttgcagaagaggaggacaacaccacggaatggttcctggataccggggccaccaatcatatgaccggctctcggtcggcattcgctgacctcgacaccggtgttgttggtactgtgaagtttggtgatggctcagttgtggacatcaggggacgcggcaccgtgttgttccagtgcaagaatggagatcatcgctcgctagaggcagtgtatttcatccccaagctgtgcaagaatatcatctccatcggccggcttgacgcgcgtggctacgatgctcacatataccatggtgtctgcacgctgcgtgatcctgatggtctactgcttgccaaggtaaagcgctccccaagcttcctgtacattctgaagttgaacatggcgaggcccatctgtttggcggcgaatggcaccgagacggcgtggcgttggcacgcccgtttcggccacctcaatttccaggccctccggagattggcgcaagcggagatggtccgtggactccccgtgattgaccacgtcgatcaactgtgtgatgggtgcctcgccggcaagcagcgacgagtgccgttcccagacaaagccaggttcagggcgcaggatgcgctcgagctggttcatggcgacctgtgcgggccgattgcgccggcaacgccaggcggcaggaaatatttcctgctccttgttgatgacatgagccgtttcatgtggatacggctcctctccggcaagcacgaggcagcggctgcgatcaagcagttcaaggccggcgtcgagatggaaagcggccgaaaactgcgggcgctgcgcaccgaccggggaggagaatttacctctgtcgagttcactgagttctgtgccgatcggggtgtgagtcgccagctcacggctccatactcgccgcaacaaaatggggtcgtcgagaggcgaaacctgactgtcgtcgctgctgctcgctctatgctcaaggcggcggggatgccggcacaattctggggagaggcagtcatggcggctgtgtatctatggaatcggtcgcccacaaagagcctggatggtgtgacgccatatgaagcgtggcacgggcgacgtccctcggtcgaacacctgaaggtgtttggctgtgtcggctacgtcaagacagtgaagccaaatttgaggaaacttgatgatcgtggcacacgaatggtgttcattggttatgagcagggctcaaaagcctatcggatgtatgatccggtgtcacggcgagtttatgtgtcacgcgacgtcgtctttgatgaggcggcaatgtggccatggcgtgatccggaggtcactcaaactggaggcgaggaggatttcactgtggagtttttttccactccgctgggtggaaatcgtgttcctgacgtggttgtggaacatggaggcgcacgggaaactgaaaccgcaccaagtccgctggccacgcccgacgcggcgcccgtgtggtctccagtgacatcaagctcacctgccggtgttgagttctgtacaccaccatctgatgccagtattgaaagcgatggagctcctccccgttttcggacggtgaacaatgtgctggccaccacaactccggtgctcgatttcgactacaacgacgagtgtctcatagcggagcaggagcctttcagtttcaaggaagctgagaaggagcagtgctggatgaaggcgatggaagaggagatgagctccattgaaggtaacaatacttggttcctctgtgacttaccatctgaccatagggcaattggtctcaaatgggtttacaagatcaagagaagtgccgaaggtgagatattgaagtacaaagcaagattggtggcaaaggggtatgttcagcaacaaggcatagattatgaagaagtatttgctccagtagcaaggatggaaactgtgaggttgctggttgctttggcagcacatgagggttggcaaatacatcacatggatgtgaagtcagcttttctcaatggtgaattggaggaagatgtgtatgtagtccaaccacctggttttgttgttgagcacaaggagaacaaagtactgaagttaaaaaaggccctatatggtttaaagcaggcgccaagagcttggtatgcaaagctggattctacacttgcaaatctggattttgtaagaagtgcaacagagaatgcagtgtacactagaggggaaggtaatgccagactcgtggtgggggtatatgttgatgatcttatcattacaggagctttggggacagaaatagcaaaattcaaggagcagatgagaagtatgtttagtatgagtaatcttggattactgtcctattacctgggaatggaggttaaacagactgaagaaggcattacaatgtcccaagctgggtatgcaggaagaattttagagaaggctgggatgcaaggttgcaatccttgtcaggttcctatggatgctagactgaagctgaaaaaaggagtagaagattgcattgatgcaacacagtttagaagcattataggaagcctgaggtatttggttaatacaaggcctgatctatcctactctgttggatatgttagtagatacatggagaatccaggtgctgaacattgggctgccatgaaacatattttgcgctatgtggcaggaagtctgaatattggtctcaagttcagaaagggagaagagaaatttcctcggctagttggctatagtgatagtgatatggctggggatgtggatgatagaaagagtacaacaggggtgttgtttaagctgggagaaaacttaatcacatggcagtctcagaagcaaaaaatagttgcattatcatcttgtgaagctgagtatattgctgctacaactgctgcctgtcaggggatttggttagcacgtttgctgggagaactgcaaatgaagaagccctgttgtaccatgttaaaagttgacaacaaatctgcaatcaatctctgcaagaatcctgtacttcatgatagaagcaaacacattgatacaagatatcatttcatccgtgagagggttgaaagaaaggaggtcgaagtggagtacacaagttcagcagaacaacttgcagacatattgataaagcctcttggcaaggtccgatttctggagctgaggggaaagctgggtttgtctccagtgtgatgcgtcaagattagggggagaaattgttggatattttgtaatcttgagcattttatatttctgttttgcatgaacgtagtggctggctgaaggttgttttggccggtcggtagaatagctgtttccttctgcatgttgtcagttttgtttagctgccgaatgacctggtttcagatcgtgggatggcgcggtcagtagccgatccgggttgctcgttccgttcagttgtgcatgtaacaaactccgttttggtggaggagaataaagagtgaaaacagaaaagcagcagaggttgcgctgc

SEQ ID NO: 25220 - DNA, 2670 bp, Oryza sativa
  ref <308>: DATABASE ACCESSION NUMBER: AK100662
  ref <309>: DATABASE ENTRY DATE: 2002-08-28
gacccccaacgcaacgctcctcgtcgtctcctcttgctccccaccccaccccaccccacccgtcctcctcgcggcgagccatggcggcgccgttcgtccgccgcccgaccgatgacggcaccagcggcaccagtgcgagcgctctcctggggcggccttagatgggtacctcggacgactcgaagggtgcttcctctcctcatcttcgccgtgtccatcccacccgatcgatctgtgtaggagaagatattataaagagccttgatatggggaaaggaaaggcccgagatgcagtcttagctcgtaaaaaggatgggattgggttgctgcatgccgcagcatgccagggccatctgactgtttgcaagttcttgatggaggaattgggggggttgccatgtctacgtttggtagtatgatgtgaagtataccaatgtgctgtttatcacatatgtttaacaccgtttatggcctgtgctgagtctggtgatgttcctactgtgaagtattttcttgatcatggtggtgatgtaacaaaatcagatgataaaggatgcacacagttctccaccatgctgctggcacagatccccctcaatatccagttcattcttatatatattaccaattgtattgttgtacaaggctctataatactgcaatactattaatggagtatgtttcaatcacagcttcaccgtaatcatttcttatgtccttgtatttatagcaaacgcctgcaaataaaccatttctctcctcctttattaatgaaaagaggagtcctcctgcccttcgaaaaaaaaggtaatcatttcttatgtggcaatctagatacctttagtttctatatatcaccactcaaagttatataagtttgctctatttatacttgatcacatgtaatctgttccaagttgtttattgtaatggtcattgtttattcacataacccaatttctatagtatctctctcccaggatttatagctcatctcattcacgctcaggatgctgtaaggtaacagagttcttgctttcaaaaggaatacctattgacatagacggcgattattatacatcttgacctttagtaatactcctaagtcttaagattaccatttggcatgctctaagtaaggcttgggtgatgatttcggcggaaagagtgaaaacttgggcgttcaattcatgacactaataaaacctatcctgctctatgagctattcaactctaaatgattgaaatgcttttggattatcatgtcattgtttgtaccttcagtaacttcattgccgaccttctcattttatattgacatcactaaatgtgcattaaaatctcttccaatgcggcaactccatcttggcttcatgaactctgaactcgtttttaagaattggcaaacgatgatcagaaaaaaaaaagttaaagtattgtatttctttcctttttctttcacatattctgcttttagcctaacgtaattgccaacaatggagcctgtagtaccctgataagtgctcttgactgctgttcgttgaagtgcatgaagctactcataaaggctggtgctgatgttaataacaagggtacaggtataactcccttaatgtttgccgcgttgcaagggtgttatacttacttcatcaagattctcctggagactggagcaatccctaatattcccaatgttttgggttggttgccagtagagcatgttgcatcatgtgattgcagggaaggagttgaaatgctatttccattcacatccccaaattccaaatgtcccaaactggagtgttgatggaataatttctcatgcaaaggtcaaccatacaaagccaacggatcaacatcaggagagtagaaaagctattttgaagtcgcatgcagatttggcatttaggcagaagaattacgactgtgcagcaaaagtatatgatttgactcgtggaccaactgcagttctgtacgcaaacaagagcatttgtagattgctcatgggtgatggtgaaggtgctctgtctgatggagatgccgaatgatgcagcctaactgggcaaaagctcacatgctactcaaggagtagaagcatgcatgcgatgctcacttggatacgcaaaaattggatcctgggagcgttgagattgagagggaacttaggtatcatcttctgtttctcttgagcatgttttccaatcacaaatgcggttgtgcacggaacatgactgttattattaagatgacgttgtggccacatttactggagctgaacactgaaacttttctttttggttttatatgcctttcttccatctttgagttgatgatggcaacgtgcattggctgcatgcatttaactgacatttaactgcatggcaatctgatttggctggcatatgcaaatcctgctcgtttgtcttaaaggagaaaggcagctcattattcagacatttcagtgcccaatgagttccgacattgtcattttcacccatttttctcgcatgaaggaaaatgagggaaccgtgggcgtcattgtctgttatcattttgactttgctttaatcattaagttttcatgactagaacgattctaatgaatgttggcatgttgctatgtaaaacattggaaatgaatgacagaattgctagtgttcattttaacat

SEQ ID NO: 25221 - DNA, 2677 bp, Oryza sativa
  ref <308>: DATABASE ACCESSION NUMBER: AK100663
  ref <309>: DATABASE ENTRY DATE: 2002-08-28
gaggtaggcagcagagggaggtggcgcacacggcgcaaaacaactcgtccccccgccccgcaaggaaggggaggcgagacgcgacgagagcccaaaggcaaaagcccaccaccaccaccacgaggaggaggaggagctatctcgccaacaccaccaccaccaccagcgaggacgaggaggaggagagagaggagagagcttcccgtctccgcgcggctcccgaggcgacgccgcctccgccgccgccgccgcccgccgatattggaaggatcccagagggctggagaggtgacctgagttgcatggggagaggatgccagagctgcgaagcagtactcgccaagcacgtctgaggtctaggaagcctgacgaccagaagccagcggaacaggctgcgaaaccagcgttgcctgctccacagagagcaggaaagcgtgttcctccccctgctatcaggggcagaaagggtgctgctgggagaagagggggagcagcaccaaggggtagaagaaaggcggttgaggttgttgatttggaggctggccagggtcgtggagattcccctaaacctgttgttggacaggcagttgttggtgaagcaaagaacgttaaggcacctgaggttgtcgccaataagggtttgcgaatggatggggaaagcgcagagaagcttgttgcggctgacgatgaatcatcactacctgtccctgagaggattcaagtaggtaattctccagaatatataactgacaggaaattaggtaaaggtggttttggtcaagtttatgttggtagaagggtatctggtggaactaatcgtactggtcctgatgcatatgaggttgcattgaagcttgagcatcgaaacagtaaagggtgcaattatggtgccccctatgagtggcaagtttaccataatcttaatggctgctatggcataccagctgtccactacaagggtcgtcagggcgactactatattcttgtcatggatatgcttggtcccagcctttgggatgtgtggaattcattagggcagacgatgtctccacatatgggtgcttgcattgctgtagaggccatttcaattcttgagaagctccgttctaaagggtttgtgcatggtgatgtgaaaccagagaactttctgcttggccagcctggatcacctgacgagaagaagctttatcttattgatcttggtttagcatcgaaatggagggagtcatcagggcaacatgttgattatgaccaaaggcctgatatctttaggggtacaattagatatgccagtgtccatgcccatttaggccgtactggtagtaggagggatgatttagagtcattggcgtacacccttatatttctaataagaggaagattgccttggcaaggttaccagggtgataccaagagtttccttgtttgcaagaagaaaatggctacttctccggagatgctaagctgtttctgtccacctccattcaaacagtttcttgaagttgtcacaaatatgaaatttgatgaagagccaaattacgccaaactgatttctctctttgatagtttgattgaggtacctgcctcaagacctatcagaattgatggcgctcttaaggttgggcagaaacgtggaagaaaccatgaagaagatgagcaacccaagaagaaagttagattaggtagcccagcagctcaatggatttctgtttataacgccaggcgggccatgaagcaaaggtaccactataacgtggctgacaacaggcttcagcagcatatagagaagggtaatgaagatggtctatacattagttgtgtggcgtcttcagcaaatctttgggccctcataatggatgcaggaactggtttcctttctcaagttcatgagctctcaccagtttttctgcataaggactggataatggatcagtgggagaagaatttctacataacagcaatagctggatcagctaacggaagttctttagttgtgatgtccaaaggaacaccttactcccaacagtcatacaaggttagtgagtcattccccttcaagtggatcaataaaaagtggaaagaaggttttcatgtgacatctatggccaccgctggaaatcgctggggtgtagttatgtgaaggaactcaggttactctgaacaggttgtagaattggatttcctatatccaagtgaaggcatccatcggcgatgggagactggttacagaataacctcaatagcagcaacaaatgaccaggctgcttttatcttgagcataccgaaacggaagccagtagacgagacacaagaaactctccggacctctgccttccccagtaatcatgtcaaggataaatgggcgaaaaatctgtacatagcatcgatctgcttcgggcgaaccgtctgttgacggtgtggctggctggctgccttccattgaagttgaagcgattgccattcgagagatgaggagatctggagatggaagaggattcgcatgatcattgggctagggagcattagaagtttcggtattttgcaactgtaaagaaatgttgtattaccggatgccggccttgtgggcctttttccataaaagaagctaacacattcttgcatgttgaaatcgatatctctgcatttttatcatacgttctcccgatgtttcttttcc

SEQ ID NO: 25222 - DNA, 2297 bp, Oryza sativa
  ref <308>: DATABASE ACCESSION NUMBER: AK100664
  ref <309>: DATABASE ENTRY DATE: 2002-08-28
gagcagcagcaaaccgaccccgttcccgtttccattttcacgccaccccaccacccgcacacccacactccacgagagacgacccaaaccggccgccaccgccgccgcgatcccccacctccgctcgccggaaggggcgccatagccccgcccctcccctcccccctctccggtggctggcccctctccggcgatggggagcgccgacctggtgctgaaggcggcgtgcgagggctgcggctcgccgtcggacctctacggcacgtcgtgcaagcacaccacgctctgcagctcctgcggcaaatccatggcgctctccggcgcccgctgcctcgtctgctcggcccccatcaccaacctcatcagggaatataatgtacgggccaatgccaccacagataagagcttctctattggaagatttgtgactggtttaccccctttctcaaaaaagaagagtgcggaaaacaaatggtctcttcataaggaggggttacaaggtcgccagattcctgagaatatgcgggaaaaatacaataggaagccatggattttggaagatgaaactgggcaatatcagtatcaaggtcaaatggagggatcacagtcatcaacagctacatactatttgttgatgatgcatggcaaggaatttcatgcatatcctgctggttcttggtataacttcagtaaaattgcacagtacaaacaacttaccctggaagaggctgaagagaagatgaataagagaaaaactagtgcaactggttatgaacgttggatgatgaaagcagctacaaatgggccggctgcctttggttcagacgtaaagaaacttgagcctacaaatggcactgaaaaagaaaatgcccgccccaagaaagggaaaaataatgaagagggtaacaattctgataaaggcgaggaggatgaagaagaggaagctgcacgcaaaaataggcttgcgctcaacaaaaaaagtatggatgacgatgaggaaggtggaaaggatctggacttcgatttggatgatgaaattgaaaaaggtgatgactgggagcacgaagaaacattcactgacgacgatgaggctgtggatatagacccagaggagcgggcagatttagctcctgagattcccgctcctcctgaaattaagcaggatgatgaagagaatgaagaagagggtggtctgagcaagtctggcaaggagttgaaaaagcttcttgggaaagctgctggacttaatgagtcagatgccgatgaggatgacgaagatgatgaccaggaggatgagtcatctccagtgcttgctccaaaacagaaggatcaacccaaagatgaacctgtagataacagccccgctaaaccaacaccatcaggacatgctcgtggcacacctcctgcatccaaatcgaagcaaaagaggaaatcaggtggtggtgatgattcaaaagcatctggcggtgcagcttccaaaaaagcaaaggatacaaaaccatcagtggccaaagatgagacaccatcttcctcaaaacctgcatcgaaggccactgctgcatcaaaaactagtgcaaatgtatctcctgtcacagaggatgaaatcaggactgttcttcttgctgttgctcctgtcactacacaagatttggtatctagatttaagtctagactacgaggtccagaggacaagaatgcttttgctgaaattctgaagaaaatatcgaagattcagaagactaatggccacaattatgtcgtccttagagatgacaagaagtgaagagcaaaactaaagtggtgctttcttaaaatgcaaccttttgctttgctgtgccttttggcataacatgtttgtaagataagtgtattggaagaattggccttgtaacctgatgtatttagggcctatttggattgttaccctaccaattttttggtagtgccaaaatgtaggcaagttttggcactaccaaatctttggtaaagtaagattgcattgatcatatttggtttgctaccaatatatagctaaaatgtaaaattgtagtgaagaatattctagatgataccaaatctaaattaggtattaccaatgaataggcttcgatccaaattaaacacaactactattcaaattaccaaaatattggtagggcatgtttttggtaacaatccaaataggcccttagatcttttttaacttaaggtcattgatcacttatcattgttgctgccgcgcttttagacatcctactggaaaccagctgtttctaaaactacaggaaatttttggt

SEQ ID NO: 25223 - DNA, 2734 bp, Oryza sativa
  ref <308>: DATABASE ACCESSION NUMBER: AK100665
  ref <309>: DATABASE ENTRY DATE: 2002-08-28
ggggctgctgctaggcggcagcatatttgtcttctggcagttgtgctgagaagccaggcagaggggagtttagcctgaaagtgagctctctagggagatagagagagaagagggccaaagaagaagaagaaatcaaagctaggagaggtccaagattcccactaggaccctttcttggttctcttctttttctttggctgattggaaggtctagagtcaatcacttggtttcttttgtttcttttctttggctccattggttcttcttgccttccaatcgttctaaggggtggatagaatttttggagtatcacctatcaggcactctgttcatggcccaatgattttgattggtgggcagattttcacagaccccccattccagtttttttttcccaaggggatgcgcgaatcttgctgctaatgttcttgtgaatcaaagccaggagatttctggaaagtgaggaattcttttcttagattgcaatatcaatcacagcgctttctccacaagttgcaatctctgagcgcttttgatctctccacaccaaccaaaagcaacagaaatttaccttggattccgcggttttgaagaatctgttctgatttggagatggagaggcagacgagcttccgattgggcgcgctggagaagctcaagagcttcagggggatggagaagcagaagagcttcaagatgatgtccacggacaacttccggaggcacagggacagccccgggaagcgcggcgacacgccgctccacctcgccgcgaggtccgggaacgccgccggcgcgcagcggatcatcgccgagttcgacccggaggtggcggcggagcgcgccgcgcaggccaaccacgacggcgagacaccgctgtacgtcgccgccgagagggggcacaccgacgtggtgcgcgagatcctcaaggtctccgacgtgcagacggccggcgtcaaggcgaacaacagcttcgacgcgttccatattgcggcgaagcaaggccatctagaagttctgaaggagctgttgcaggcttttcctgctcttgcaatgactacaaattctgtaaatgctacagctttggatactgctgcaattctgggtcacactgaaattgttaacctcctactggaatctgatgcaaaccttgcgagaattgcaagaaataatgggaagacagttctgcattcagctgcaagactgggccatgtggaaattgtaagatcattattaagtagggatccaggaattggtttaagaactgacaagaaggggcaaacagcactacatatggcttcaaaaggacaaaatgctgaaattgttatcgagctgttgaagcctgatatctcagtaattcacctggaagacaacaagggaaacagaccattgcatgttgcaacacggaaggccaatatcgttatagtgcagactctactatcagttgagggaattgaagtaaatgcagttaacagatcagggcacaccgctcttgccattgctgagcaactcaacaatgaagaacttgttaacatcttgagagaggctggtggagtaactgcaaaagagcaagtacatccacccaatccggcaaagcaacttaagcaaacagttagtgatatcagacatgatgtccagtcccagatcaagcaaactaaacagaccaagatgcaagtccagaaaatcaagaagagactcgaaaaactccacattggtggtctaaacaatgccatcaactccaatactgtggttgcagtgcttattgccaccgtcgcctttgctgccattttcaccgttcctggcaattttgtggaagatatcactcaggcacctccaggcatgtccttggggcaggcatatgtagcaagcaacccggccttcctagtatttttggtctttgatgccttggctctcttcatctcacttgctgtcgtcgtcgtccagacctcgctaattgttgttgagcagaaagccaagagaaggatggtctttgtgatgaacaagctgatgtggctggcatgcctctttatctcggtggccttcatagcactaacctatgttgttgtcgggcgcgacgactggtggctagcttggtgcacaatggcaatcggtgcagtgatcatgcttacaactcttggttccatgtgctactgtatcattgctcataggatggatgagaggaagatcaggaaggcgtctacaagccaatctcgctcatggtctcaaacagttgactcagatccagatctactcaacagtgaatataagaaaatgtatgcactataggataatagttacatgatgatggaatccatgtacacgagagtgctgtttttttttacccgaggcaacaagaagaatggaattgacatggaagtctttgttcagagcaaggtgccagctatattaactgaaggcaccttactgcaatgcaaagcaagttaactgaactgccaaaacaaaggaagttaactgaagaaacctcacactggctgctgaatttgttcctggtgtttacctggagctgtggtctcgtgtcagcgaatgaacacctgctaaaattgttttgttgttgctaaaaaaaggtcaatagtgagggcaacaatacgatttgtagactgtactaggaaaagaaaaatactatgctctgtcacataccttggacatgtctgctgcatgttgttgctcgatgagctagaaaatacttcgtatttcctttcttttaccatcctg

SEQ ID NO: 25224 - DNA, 3129 bp, Oryza sativa
  ref <308>: DATABASE ACCESSION NUMBER: AK100666
  ref <309>: DATABASE ENTRY DATE: 2002-08-28
ggttttcttctcctcgacccgccaaacagcagcccgctcttttgatcttttcctccctctcttcttctccctacgaaccacgagtcgccgccaatggcctcctgacaaggcctcgtctcggttctctgctcgtggttgggggcttcttggcgttcttgattttttggtttgggtgccttggtgctcgttcttgaggcgttcgttttcccttggtttgatgcggcggcggtggtgagggtgggagcagccgcaggtcgggaatggaaggggacgagggcgcggcggcggcggcgaggataaggctagtgcggtgccccaagtgcgacaagttcttgccggagctccccgcctactccgtctacgtctgcggcggctgcggcgccgctctccaagcaaagaagaagtactcagcccaaggttctgataactctgataatggacatgtgaagtaccttgaggtactagagagtgttgcggaggcgcctgaagcaatggatggtgctaccgctgatggtagatctatacccaatagaatttcagctttgcacagtagatcagtttacaaccatgaagacaatcgaatggcaagaggtccaagtacttcaacaggtgaagctactattagaaacgatggtagggaggcaaagtacatgcgcatccgtaatgtggaaaatgctgacatgatgaaatcagtaagaggaagaggtatatctgacatatctccgaggtctccaatcgatggaattccacccacctcttaccaagcggaaagccttgtcaactaccaattacagtcaaaatacagattctccaacagggagcatgccaatgatagggacttggatggtccaagcagagttaggggccttgagaaagatcgtgctgagctcttgaagatgcttgatgagttgagagaccaggtgcagcaatcatgtgaggttactgatgcaccaagtagaagtgctacaactaatagacctgcagatgcctcaagttcacatggtgcgcatgatcagccaaatcagctgaggcatgatccatctgtattgcattggaatggttctcatcactcgccatccttgaatgtgcaaagtcctaatatcccacaagtccatgctccattgcctactcgacagaatcttcatggatatgcagagcccatcccgcatgcgagagcctctagctatcatgctggtgctggttacccctgcagaaatgttgataatttcttctttggacatcatgatcctgaccctttgctctcatgtcaccatgaaggcttgtaccatcagcccgtctgttcttgcttcaattgttaccaccgagagtttttgcctgtacagggaactccccttggttttactgatcaaagggcaccataccttatgaacagttatggagcatatcctgtagagggtcccctatatggtcagcagagatacacttcaagaggtactaatacttctttacagaggaatcacctgaggaccaatgtaaggaagaaaccggcacaaacttgtgagccgattgcaggtggtgcccctttcaccatatgctacaattgctatgaagtgctgcgaataccaatgaaacattctttgttgggaaaggagtataagctgatgtgtggatcatgctcacatgcaattctagtcaaccttgatggaagcaggctcaatgtttcagaacctgcgcccggtataaatttatctgctgcactgcaaaatggtattggtgatagcatgagaaacaatgggcatgctaatgctgatgagaggttgcttccacaatattgtttttctaatggaagtcatgaatctcaagaaaaagatctagaatcaaattcaagtgaatcagatagcaaacacactcctctagggactgattctgaaaatactccccagtccagggatcttccttctgaagccaatgtaatttcccatgtaccaagtttaccgcatcatgatcgttgtggattctcaccatcggaagattctggaaagggaagtagaagtacccattctgaacatgaaaaggctaccctatttactgaaagttgcaaacggaactcaattaaagatgtatgtgtagccaatgagacacagtctccagtcgatgagtttgatgatactttatatgcacaagatatgctaaatttgccacaaaatgttggccatactaggtctacaaaggcaggcgattcatttctaaccaatctcattaaaaggagcttcaaaatgaacaatggaacacgcaatggaagagcaaggatttttgttaatggctttcctatctctgaccgtgcagtcaggaaggctgagaagctagctggagaaatctgtcctggtgattactggtatgattatcgtgctgggttctggggtgttatggggcgaccctgccttggcatgatacctccttatattccagagttcaattatcctatgcccaagaactgtggtggtggaaacaccggcatatttattaatgggagagaacttcatcagaaggatttggatctacttgtgtctcgaggactgtctgattcccctggcagatcttatatagttgaaaattctgggaaagtttcagatgaagtttctggtgaagagctttatggccttggcaagcttgcaccgactgtggagaaaatgaggcgcggatttggcatgcgagtcccaagaatcatccagtgacaaactgacgggtcaatacaatacattcacaagctctggagatgctaagggacaagccaatgccatagctcatagctgcagctcacacaagtcacaacagggtgacttgagttttccaagaatactgtttctagtttagctcgtgaatctagttatcgtcctcctttcttgttgcctgattgtgctgccccttcagatgtcatatggaggcattcttgtagttttctagtgtatttgtgatttcttttcgacctggtacaatgattttaggggggggggggggaggagggaggtagtcaattgaatttgtttggtttgcattctaacatgtattatgcaccttcgaagaatgatgttgaaatgcatgacaaaacgcatcaaaatgagctcaattagaaggtacaggaaggagttgctggggatggtttgaact

SEQ ID NO: 25225 - DNA, 2509 bp, Oryza sativa
  ref <308>: DATABASE ACCESSION NUMBER: AK100667
  ref <309>: DATABASE ENTRY DATE: 2002-08-28
gtggcgtcagtcagtcccgtcagccgtcgtcaccgccttgtgtcctctccgcggccagcttttctccgccctttcctgcccgtacggccaccatacgcggcccaaaccgccgcccaaatgccgccgccggcggaggaattcgccgtcgacgacctcgacgagttcgagagtcgcctagacagtttcctcaaccgcttccacgccgacgacctccgccgcatcctcctccccttcccggacggcaagctccatttccccctcgtcatcgacttcgcggagctcctggagttcgaccccgaggtcgcccaccaactctacgactaccccaaggacgtgctcgagctgttcgacgccgccgcgcaacgcgccctcgacaaattcgatgccgccgctcgacgagctgacaagaggaaggcgggcgacgagacaatggagaagaagttcgtgcacgtgcgcgtcaacacctcggggtcggcactcgaatgccctgaagcgtccccgagcattgggaaggtgagggtgaagcacaggggaactctgctcactttgaaggggaccgtgatcaggtccggtggcgtgaagatgatcgaaggcgagaggaagtatcagtgcaggaaatgcaagtgcaggtttacggttcatcctgagcttgaggctgggaatcgtataactcttcctgcatcttgcaaatccaagagtgcaaaaggttgtggaggtgccaatttccaattgatagaagatagcataacctgccatgattaccaagaaataaaaatccaagaaaatatacagcttctaggtgttgggtctataccccgttcgatgcctataattttgatggatgatcttgttgatattgttaaagctggggatgatgttgttgttacgggtcgattatctgcaaaatggtctcctgacatcaaggatgtacgttcaaaccttgatcctatgctaattgccaattttgtgaggagaaccaatgaactgaagtctgatctagacatacctgttgaaattatcaacaagtttgaggaattctgggcagcttccagagctactccactgaaaggaagaaattccatcttgaaaggcatttgtcctcaaatttatgggttattcacagtgaagcttgcagttgctcttaccttaattggcggggtgcagcatgttgatgcttcaggaacaaaggttcgtggagaaccacatatgcttcttgtcggtgatccaggcactggcaaatcccagtttctgaaatttgctgctaaattgagcaaccgttcagtgatcacaactggtcttggaagcaccagtgctggtttaactgtcacagcagtcaaggatggaggggagtggatgcttgaggctggcgctcttgttcttgctgatggagggttatgctgcatagatgaatttgatagtatgcgagagcatgacaggacaacaatacatgaagccatggagcaacaaacaataagcattgcaaaggctggattagtgacaacactcaacacaaggactacagtgtttggtgccactaacccaaaaggacaatacgatccaaatgaatccttatctgtgaatacaacactttcaggaccactgttgagtagatttgatatagttcttgttctcttggatacaaaaaacaaaaaatgggataaaatagtttcatctcatatattagctgagaacactgaagaaaagaaaggcaagacaagtgatccggaagtaatgtggacactgtccatgttgagaaggtatattcactatgtgaagcagcatttcaaacctgtgctgaccaaggaggctgaaagagttatctctagttattatcagcgtcagcgacaatcaggaactcggaacgcagcaaggacgactgtgcgcatgcttgagagtttgataaggctagcacaagcacatgcaagactaatgttcagaaatgatgttacgaaacttgatgctatcgctgccatattatgcattgaatcctccatgacaacatctgcaatagtagatactgctgggaatgctctgcactcaaattttacagagaaccctgaccaggaatgtatcctgaaatgtgattccatagcttacttatccaagaatatcaaatatttaactgatgaaatctcgaactgataatttttactgtagtgccacgtatatggatgttcttgcctatgtctctggtatggccttttgattcgggcaagcaaaggagaagaaaatccttacgcaattgggagttagcgaagactccccattgttataaaatatcattaccaatatgaagatttacaagcaaacgtggcttatataccatgctgcacaatgaatcaagtgatatgccaagggaatatgtgatttgcactagattactacggtcagtttggctctaccaggtaacggtattggaaattgtaacttgttgttttagatcaatgtactggaacttgaaggtctgaaatagcaactactccctccgtcccataatataagggatttt

SEQ ID NO: 25226 - DNA, 2979 bp, Oryza sativa
  ref <308>: DATABASE ACCESSION NUMBER: AK100668
  ref <309>: DATABASE ENTRY DATE: 2002-08-28
ggctcccgtgtcccatttaaaaccttcttcttcttcttcgcttccttcgtctcgactccagttggggaggcattcttttctttttcttttttttttcactctcgcgtccaatccctgaatccgctggcccgcgtcgaaacctaggggcgcggtggcggtatagccgacgttcagatccaaatgggggcggcgccgtcgacgccgaggctgggcgcggtggcgggggccgcggcgtcgcctggggcggcggagcagatgttcgcggcgctggtcggcgggaaggcgtacccgatctcctccgagttctggaggcagctgctcgagctgcccctcacgcagcagtggccgcgggaccgcgtcctgcaggcgtgtcacgcgttcgcccagaacaactaccacacaaagcatctcgcaaagattttgatccatttggtttggtgcttgcaagagtgcatggcagagtcttctcacgcggcgtataggaaggctatcaatgctgcatatatatcatccatatttctcaaattcattattgaaaatgcaaagactgataattggcaagagctaagtcttgaaattgacaaggatgagaaggggctggaaaattttccttctgaacaaagcgtggaatattttctgatgagaggtgttctgaactacattggtagtgtagatgtaagtctggagtcatgctacctgcaccatgaacttctaaacttgatgctagtacttatgtcaactcaattgtgttctggaccatctcctgaaccaaaagatgtgcatcctttcattgatgcggctatgcttcaggacagttccatagtgtcctcggtagttcaaaagttgctgctaaattttgtaaaacgaccacggattcctttaaacagttcacaccctgctttctctgatgatggtggacctggtgttttgcagcgagttggttcagttgctgcaaactttgtactactgccatattatactttcaactaccttgtgagctcaaacgctgaaggcgcatcgagtcaattggcagacaacagtttacttgttctgcttattctgatccactaccggaggtgcattacgatgagcgaatcctttccaagcagtaatgtctacacaagcgatttaaataccaatgtcaaggatgcaccggcttttcatgatgatccatattacaaggccttaagcaatgccaaagacagtcaatatgatcgtgctgatgttgaaggaaatgctcaaaatgggctagttgtcaggttgtcttttgcatcgctatttgacgctcttggcacatgcttaaaagatgagagctcggttctactgctctattctttggtccatgggaactgtgactttcaggaatatgttctggttcgaacagacctggatactttgctgatgcctatcttggaaatgctctacaatgcatcaagaaagacctccaatcagatatacatgctattgatagttcttcttatactcagtcaagattcaaccttcaatgctagtgtacacaaattggtgcttccgagcgtcccttggtaccatgagcgccttatgcatcaaacttctttgggatctttgatggttgttatactaatccgaaccatcaaatacaacctctccaaactgcgagatgtctaccttcatacaaactgccttgcaattctaacaaatatggcccctcatgtgcataggctgagtgcatatgcatctcaaaggctggttagcctctttgacatgctctctcgcaagtataccaaattagccgagttaaaaaatgacaaagctatcaaagttatatctgatcagattgaagcagacaacacctcagatgatacgtccacagaacttcacatctataccgacttcttaagaattgttctagaaatcatcaatgcaattcttacatatgcattgcctagaaatcctgaggtcgtgtatgctgtcttgcatcgacaagaggtatttcagccattcaaaaaccatccccgcttcaatgaattgcttgagaatatttacacagtgttggatttcttcaatagtcgaatggacatgcagcagttagatggagaatggtctgtagataaggttcttgaggttattaacaaaaactgccgttcatggcgtggagaaggaatgaagatgtttacccagttacggtttacatatgagcaagaaagtcatcctgaggagttttttatcccatatgcatggcgcgttgtcctatcacgaggattctctttcaatcctggtgcaataaatctgttccctgtggagattcatgttgatgatgaaccatccggtgaacaaaaggtctaagaataatcttgaatgttgagttctgactacagcaggatgacatgttccatccaccgaggcaaatagatattgtacataggaggcatataccagacgatcgacatgtattcttattcatttgtgtatatttccgtttcctcataatgtaataccagaggtcagcgggaggagagagcggtatttaggtggcagagaactatgtagggtacaacgaacaattctttcataagttaatctttgtatttttttttcatctcttatcacctctgacgcgggaaggccactctggtgttttaacatgtctaccgtaccgtcggtcggttttcctgtgagaggcctgaaccgttctcttgaatgttgcctcagttcgaagataacctgctactccgtcggtgtttcaacaagcatgctggaagggcagaaaaaggaaagcgtgcgagaagagtttatagaccaaggaaccgacggtttcattaatcggaagctattccattttattcactttctggcttccagaaacaagtactggtaaaagaaaaaaatgtttcatgtgtctgaaaagtagtcaggtaccttcattttgatgaaatatcaaaagttgaaatgtactacggtgattggaaggcattacaactttacaagtgcactgttacc

SEQ ID NO: 25227 - DNA, 2937 bp, Oryza sativa
  ref <308>: DATABASE ACCESSION NUMBER: AK100669
  ref <309>: DATABASE ENTRY DATE: 2002-08-28
gatattatgcatgcatcaattgcaagcaccaagaaccaagaatcgatagcatttatgctgctgatttactaggcagcaaaggaggccaaggaaatcaatacaatcctttcttgagcattttaatcactcctctccctttgcttagcaacaaaggatcccatcttctttgtagacgtcaacaaagatgcagaggattttgcttggtttttcacaccatcgccgacctcagaatcaaagccattgaccgtgcaggctgcaggaagatcagcagcaagctaagctagtagcctccaaggtgcccggagatgtcgtcggcgctggaggtggagggctcgggctcgccgggcgtcgagccggcggcgacggcgacggcgagcaggctgaagcggcacgactcgctgttcggagacgcggagaaggtgagcggcgggaagcaccacggggggtcggcggtgagctgggcggtgacgctgcacctggcgttccagagcgtgggcatcatctacggcgacatcggcacgtcgccgctgtacgtctactccagcacgttcccggacggcatcggccaccgcgacgacctcgtcggcgtcctctccctcatcctctacaccctcatcatcatccccatgctcaagtacgtcttcatcgtcctctacgccaacgacaatggcgacggtggcacgttcgcgctctactcgctgatctcccggtacgccaagatcaggatgatcccgaaccagcaggcggaggacgccatggtgtccaactacagcatcgaggcgcccagctcgcagctgaggagggcgcagtgggtgaagcacaagctcgagagcagccgtgccgccaagatggtgctcttcttcctcaccatcctcggcacctccatggtcatgggcgacggcaccttgacccccgccatctccgtgctctctgcggtgagcgggatcagggagaaagctccaaacttgactcagacgcaagtcgtgctgatctcggtggccatcctgttcatgctcttctccgtccagcggttcggcaccgacaaggtcggctacaccttcgccccgatcatctcggtgtggttcctcctcatcgccggcatcgggctgtacaacctcgtcgtccacgagatcaccatcctcaaggccttcaatccgtggtacatcgtgcagtacttcaggaggaacggcaagaagggttgggtgtctctcggtggcgtcgtcctctgtgtcacaggcacagagggaatgtttgccgacctgggccatttcaacatcagggccgtgcagatcagcttcaactgcatcctgttcccatcggtggcgctctgctacatcgggcaggcagcgtacctgaggaaattccctgagaatgtcagtgacaccttctacaaatccatcccagggccgctgttctggccgacgttcatcgtcgcgatcctcgccgccatcatcgccagccaggccatgctctccggcgcgtttgccatcctctccaaggcgctgtccctcgggtgcttgcccagggtccgggtgatccacacctctaagaagtacgaggggcaggtgtacatccccgaggtgaacttcatgatgggtctcgccagcatcatcgtcaccatcgccttcaggaccaccaccagcatcggcaacgcctacgggatctgtgtggtgacgacgttcatggtgacgacgcacctgatgacggtggtgatgctgctgatatggaagaagcacctggtgttcatcctgctcttctactgcgtgttcgggttcacggaggtggtgtacctgtcgtcgatcctgtccaagttcgtggacggcgggtacctccccttctgcttcgccatggtgctgatgacgatgatggcgacgtggcactacgtccacgtgcggcgctactggtacgagctggaccacatcgtccccacggcggagctggcgtcgctgctggaggagaacggcggcgtgcggcgggtccccggcgtgggcctcctctacacggagctcgtccagggcatcccgccgctgttcccgcgcctcgtccgcaagatcccctcggtccacgccgtcttcgtcttcatctccatcaagcacctccccatcccgcacgtcgccgccgccgagcgcttcctgttccgccaggtcggcccccgcgcccgccgcgtcttccgctgcgtcgcccgctacggctacaccgacgccctcgaggagccccgggagttcgccgccttcctcgtcgacggcctcaagatgttcatccaggaggagtccgccttcgctcctcatcaagagatgatcgatgccgccgccgacgacgacgacgaggcggcggcgaggccgaggcggtcgacgagctcggccgtgcacagcgaggaggcgatccaggcggcgtcgtcggggaggacgacggccagcagcgtccagctccaggcgggcggcgagccgccggcggcgatggacgtggaggaggagaagcggctgatcgacagggaggtgggccgcggcgtggtgtacctgatgggcgaggccaacgtgtcggcggggcccaactcgtccatcctcaagaggatcgcggtgaactacatctacaccttcctgaggaagaacctgacagaagggcacagggcactggcgattccaaacgatcagctgctcaaggttgggatcacgtatgaaatctaggcatttgatacatctgatctgatatcaaagtatacatatatatgtgggaaaaaaaatgagcctagtataaaccatgggttttgttgatgatgctgatgttggaagagagggcaaagtgccttttttgtttttgaataagtagtttcagctgaaagtgttggcaggcagggagggtttggtttttctttcgcctctgtacagtgtggtttgtgtaaacggcgtgtgccaacttgagtagaaggtttctcaaacg

SEQ ID NO: 25228 - DNA, 2196 bp, Oryza sativa
  ref <308>: DATABASE ACCESSION NUMBER: AK100670
  ref <309>: DATABASE ENTRY DATE: 2002-08-28
gagacgaacgtcagctagccgccggcttcaggctaagccctaaacccgcgtctcccccctctccgagtctccggcgcggagtatccgtccgccccgcgcgcaggtgcagctcgccggctggggctcggagccaagagcatcccctcgggaatttgtgatattagttggaaggaaggatatttggctgtggtaaaactggtattgataaatagagcacagatgcggctaactgttggccaagtgcatcgacatgtacttgcattggcatcttctcggtcatgcttcgtccttggtgatcaccttccattcagaatgctttcacttccacgagtggtaagatttcaccaaaccgcttggcatgatattcaaactgtggaagataagagtggtccgctaactctagctagtcttgaagtgcaaaacaaagttgaatatgttaagaaagaaagagcaacacgtactggaggcataaagccatcttcaagggcttcagctcttaatatgaaaccaaaagtttcttcattcaatgccaaaccagtaaagagtgccttgccgaaatcagcagtactgaagaagactctgaagatagatgaatctcttttttctgcaaaatcatttgaagaactcggtttgccacctttgcttatagataggttgaacaaggaaggtcttactgctccaactgaggtccagtctgctgctattcctatcatttcacaaaagcacgatgcagttatccaatcatatactggctcagggaagacacttgcttatcttctccctattctttctgaaataggccctctgaagaggcctacagaacaagacagttctgataagagatcaggtgtagaggcagttattgttgctccttctagagaattaggaatgcaaatagtgcgagaagtggagaagatattgggccctaatgataagagacttgtccaacaacttgttggtggtgctaatcgttcgaggcaagaagaagcattgaagaagaacaagccaattattgttgttgggacacctggtcgtatttctgaaatttcagcagccggcaagctacacacccacagttgccgctttcttgtactggatgaagttgaccagcttttgtctttcaattatcgtgaagatatgcatagaatacttgaacatgtaggaaggaaatcgggtacttcatctagagatattcttggccctcttgcaaggcggtctgagcgccagactatcttggtttccgcaacgataccattttcagttatacgagcagccaggagttggggtcacgatccagtccttgttagagctatgagtgttgttccacttgagtcaattactgttccaagacctgtgctgtcccagccagatgccaactccaactctccatcaaattcagtgaatcaagctgcagttgacagcttaccaccatctttggaacattactattgtacatccaaggctcaacacaaagtggacactttaaggagatgtatccatgctctggaggctcagacagtaattgcatttatgaacaacaccaagccattgaaggatgttgtatttaagttggaggcccgtgggatgaaagctactgaactacatggagatcttggaaagcttgcaaggtcaactgtcttgaaaaagttcaaggatggtgaattcagagttctagttacaaatgagttgtctgccagaggactggatgtgccagaatgtgaccttgtgattaatctggatcttccaacagactcaacacactatgcccacagagctggccgaactggccgtctagggcggaaaggaactgtggtcacaatatgtgaagaaaccgaaacatttgttgtaaggaaaatgcgcaagcaattagctgtacccatcaagccatgtgaattcaccgaagggaagcttcttgttcataaggaggaagatgtagagtaaactatgcattgttcaaatgaattcatcgaatggcattttcatagattgtattttctttaaatgttgtcaattaatgttttttggtcgatgcaaagattcagatagaaggaatggttgttatcctggaaactttttcctcacggggagttggtactcctcggatctattatatatttctgttgtcaccttcctatggagatgtactgtaatgtgtaaaatgactccaagaaattacagtatatgctagcatttcac

SEQ ID NO: 25229 - DNA, 2124 bp, Oryza sativa
  ref <308>: DATABASE ACCESSION NUMBER: AK100671
  ref <309>: DATABASE ENTRY DATE: 2002-08-28
gaagtgcaagtgctcctactacccaactggcaactgctgctgccgctgtacacgcgcggacccaagaacgcgcctcctctcaccgcccgggaggaagtaggaagaatctctcgcgaagcatctccagagtctcccccgctgcctccgtctccggcggctcaccccgtttctgtggaggtacggttgggcggccatccttccttcctcccgtttcttctttctctttcttcccctcggcgtgtgttgggagttgggagaggatttgatgcgagagcagtcgagcagacgagtggactggatgggtggggttttggttgatctccgactggaattttggctgtttcttgggatttagatttggtccgtgtgttgcggtggttacgtggagcttaatttggggggttgggacgaatggcaaagatcatggaaagtggaaagtggtattcttttccccccctttcttgcagagcggtttgcataagctttctgatgcttctgttcgtcctgaaagttcttttgtgattttgcactgaaaagcatgcgttttgtattgagatttgatcggggcaaagcgtgattggtggttcttgccccacttttttaggatttatatgaaaaaggcagatcttttttggccggtacaattggtacaatttagtatcttcttgataaactagcagcggaagatatgcagaaaatacgtccaagaaagaatacagactggattttcgatcaaattgtgttcgacagtgcatgttgtgcggttttctccgcgtacttgtgtacttgtgtggacaccaactagacccctgtcatgaaattctgttgagataatgagatttgtatttttaattacataaacgattattagtttagaccacttgcagtcttgcacgcttgttcgtcatgttccactgatagtcattgagaatttgtactgattgcatctttctttgctgctactgcagcaatgcagctatatcaccacccgtattcgctggatagtcagaaagtgcggatggcactggaagagaagggtattgactacacctcataccatgtcaatccactgaccgggaagaacatgaacgtggccttctttcgcatgaacccttctgcgaaactccccgtcttccagaacggcgcccatgtcatttatcgggccttcgatataattcagtaccttgacaggctttcggtgcatttaagtggtgaaatcgtccctgtgaacactgaggtttaccaatggatgcagaaagttgatagttggaatccgaagatgttcactctcactcacaccccgatcaagtaccgcacgtttgtctccaagttcatacggcgagtgctgattgctcgcatggctgaagccccagatttagccagcatgtaccatgctaagctccgtgaggcttatgagaccgaagacaaattgaaggatcctgacattatgaagcaaagcgaggaggagctgagcaaactcctcgatgatgttgaagcacagctcaacaatggcaaataccttgctggcgatgaattctcgcctgcggattcggtgttcattcctatcctcgcacgcatcactcttttggaccttgatgaggaatacatcaactgcagacctaggttactcgagtactacacattggtgaagcagaggcccagctacaaggttgcaattggcaagttcttcggtgggtggaagaagtaccgaactctcttcaagacctcgttcttcctttgtgtccgaaccttgttcaggaaatactaggtggttcagcagacagcaatgtgtacagtgaattcaacctgaatatacgaccactacatcttgatgtgttttctgccgaggggttgtggttgatggctcctgatagttttcgttttagtttgtgaaatcaaatgcgtttgtttccttatatgtctctctgcttgcatgctcctgtccacagctcagaacttgtacatcataatgcttacacaatacatatacattttggttttgtttatttagctcatatggaattggaatatctctaatcagggttgtttcttgaaacaattcatgtcttgagtaccttgtattctgttctattttctgctatcaaaaggggtaattttcactgc

SEQ ID NO: 25230 - DNA, 3130 bp, Oryza sativa
  ref <308>: DATABASE ACCESSION NUMBER: AK100672
  ref <309>: DATABASE ENTRY DATE: 2002-08-28
ggggttttgtcgctctctctctctctctctctctctctctctctctctctcctgatctctcctcctcctcctcctccatccgcgcctccacatctccacacgcaacacacggagacgaatttttctcctggtcccttctcgcctcgcctcgcctcgcctctcgatccgatcgggatactatggccgcgtcgtcgtcgtcgtcggcgtcggcgtcggcgatgggcggcggggggatgcggaaggcgccgtcgatggagtggcggtgggtatccacggaggaggacgacgagggggaggaggacggggacacggtggaggcggcggccgcggccgtcggggccgtgggcaggggcgggagcttcgggtccgaggaggaggaggacgaggaggacggcggcggcggcggcgagggggagggggagggcgaggatggggagaagcagaagctgatccgcaccgtgccgtccgtcgactggttcgacgtcgagggctacgaggtctccgtcgcgcagcacatcgaggacagcgaggagtttgattttggcaggacaatgtttcttgcccttcagactcttgctgtggtgtttggagatattggaataagtccattgtatacatttgatgtcatgttcagcaagtatcccattcttggagaggaggatgttcttggagcactgtcacttgtcctttatactctaatttcgatgccactagtgaagtatgtcttagtcgtcctttgggctaatgatgatggtgaaggtggtatatttgcgttgtactctttgatttgcagaaatgcaaaagtgagtctcattccaaaccaagtacactctgagaagaggatgtcgagtttccgactcaagcttccaacgccagagcttgagagatccataaaagtaaaggagaagcttgaatcttcattgctattgaagaagttgcttctaggtctagtgctatttgggactgcaatgttcgtatcaaatggagttatcacaccagctatgtcagtgctgtctgctgtcagtggcttgaaagttgggataccaaatgcctcacaaggccttgtggtgatgatttcagttgtacttcttgtaatcttgtatagtgtacagaggtatgccactagcaaaatggggtttgcacttggcccttctttacttatatggttttgctgtctcggaggaattggtatatacaatctcagtacatatggcccagcagcttttaaagcatttaatcctctctacattatttattattttgggaggaatccctttcaggcttggctgtcccttgctggctgtcttttatgtgcaacagggtccgaggcaatctttgcaaatctttcctactttcctgtaagatatgttcagtcaatgtttgcgcttcttgttcttccttgccttgtcttggccaatttaggacaaggcgcttttcttattgcaaaccaaaattcatctgagcagatcttcttctcatccatcccaagtggagttttctggcctgttttcttaatagccaatttagccgcattgattgctagtagaacaatgacgacagctatattccaatgcctaaagcagtcaatagctcttggttgctttcctcgactcaagatcattcatacgtctcggaaatttatggctaagatatacattcctgtcgtgaactggtttttattgttttcctgcttgggctttattctgctgttcagaagcatatatgatgttggcaatgcatatgccatagctgagcttggggtgatgataatggccacagtctatgttacaatcataatgcttctaatttgggaaaccagtattgtgaaagtgttgtcatttgtcatcacattcctctccttagagttggttttcttctcatcgtctctaagtagtgttggagatggaggttgggctctgataatttttgcatctggtattctaatggttatgttcatctggaattatggaagcaaactgaagtatgacagtgaagttaaaaagaagctttcaaaggatttgatgagaaaattggggcccaaccttggtactattagagctcctggattaggcttggtctacagtgagatagtgaaaggagttccggcaatttttggtcattttctgattgcccttcctgcaatccactcgataatcgtttttgtatgcatcaggaatgtaccagtgcccgtggttccccagactgaaaggtttcttttccaacgtgtttgtacaaggggttatcacatgttccgctgtattgcaaggtacggctacaaagataagaaccaggagagccaaagcacatttgagcgccttctgattgaaggcctcgagaagttcatacagcgggaggcagtagagctatccctacaaagtggagacgacatcgactctgacgaggagcctccaaccccatctaggacaatcgtagcgccaaatggtagcctctactcgcttgacgtccctctcctggcagactttgtgccttcggcagaagttattcctgaggccagttgctcaacgcctcagcacgatcctgtggtggattacacacagaaccttgagctggagctcgcattcatcaggcaggccaagcaatctggagccgtctatctcattgacaaccccatcgtcaaagccaggaagaattcctggttcttcaagaagctgatcataaactacttcttcgcattcttgaggaacaactgccgcagggcgatgatgtcgatgagcattccacacacaaatgtgatgcaggtgcgcttgacctcttatgtttgattgccgaatggtaccctttccgacacccttttgttttgttcgttgctatcaagtagagataacactaactagagaagaatggcattgcaaagagaagaagagtatagttgcacctctagcattattcaggaagggataacatctgttttaggaatccacgtctcctgtaatttttgtacaattgcgaaatgtatctgcaagcaaatgttgtgtagcaaacacatcagagtgtggtgagctaacatgtgtattcctgtgtgaggaagagattcttttgccatgtactagacaaggtactcgttttgagtttttgagtaaaaattttgatatctacaagtgttaacaac

SEQ ID NO: 25231 - DNA, 2278 bp, Oryza sativa
  ref <308>: DATABASE ACCESSION NUMBER: AK100673
  ref <309>: DATABASE ENTRY DATE: 2002-08-28
gaccctgcacaccaccctgttgcttccctacatccgctacttgagactcctcccctatcacctatctcttcctaccccatcacatcccgtcctcgatcagatacacctcctcttgtcacttccctctatccatcccatctccttcaccaaggccaccactccccctcatcatcatctcctcaaccaccccgtgtgtgcacaatggaaagtaaccaacacaaagcatcagatccacaggattctatggttcatttagatctggatgaagataagataatggtgacatcagcattaccatgtccttcaatgtccgtgggaaaatcggttatgaggaagaggggaagaccaagcaggcatgcacgaggaacttcgttgtcttctgttaccccagaagggtgcaagaagatggagggtcgatcatataatttgcgtagtgattcaacaattttgttgagaaattcatgtttgctaatagctgatggatcgacaaaacagaagcgatcttggggacttgacaaggatgacttgcatatacctttctttcaaatttcagataatcctagggaagctgttgatgatatactcatgacatttggtggactacatcggaggatcatgcagttgatagatgtgaaaatggcttcaaaacagcttgtcttccaagcattgaacctcatgagaaaagttggatatcatgttaacaaggacaagagggttggagaggtcccaggagttaaaattggtgacatattctactctagaattgagatgctcttggtagggctacatagtaacatcaatagaggaattgaattcatgtctggtgcttttattaataaggaagataagatagctacatgcattgtgtcatctggaatgtatgagaatggtgatgatgacccatatactttggtatataatggccaaggcaaagtccaccataagcttgagagaggtaactattcgttgaatcagagttttattagaaggaatcatattagacttattcgtagtgaaccaaatccattggttaggctaggctcaaaggaaaaaatatacatatatgatggtctttataagatcgaagaaaagtacagacaaacaacaaaatctcgttctaacttaaagttcaacaagttggtcagggaactaggccagcctaatggcattgtagtatggaagaatactcagaaatggagggaaaatccatcttgtagagatcatgtcataatgcctgacatgtcaaatggtgcagaaatagctcgtgtttgtgttgtaaacaacattgatagtgaggatgctcctaacaactttacctattcaactaaacttgataatgggaatcatatggtttcagcaaacaagatgtgtgtctgcaaatgcacaagctcatgccttggtgaagacaattgctcttgtttgaaaacaaatggcagctatttaccttacaactcttcaggaatacttgtttgtcgaaagactatgatatatgagtgcaatgattcatgtgcttgcacaattaattgctcgaaccgagtggtacagaggggttcctatctacactttgaagtgttcaagacgatggatcgaggttggggccttcgcagttgggatcccattccggcgggtgcatttgtatgtgaatatgttggtgtagttattgacaaagatagcttagttgaagaagatgaatacatatttgaggttactagaccagagcataatttaaaatggaactatttaccagaattgataggtgaaccttctttctatgacatgaatgatacattcaagaagttgtgttaacaaccaaatttggtaatatcggcattgggaaagaagattagattgaagcgaagtcggaggcggagatcaagttcggaaacagagcagggattggctggagtccagattagctacgataagatcggctgagtctgagtcggactaggtaagccgatgtagccgatcctagcaatacaacttgatgtgtgatgtcgggttggattgaggtgcttcaaggtgattgccgcacatggatagagtcctgagggggcaattgtatctattagttaggatgttttatgtaatttccttagagatatgattgggcaaaagtctgccgcaaagacttatagtatcttagagtttgttagagatagtagtcgtgtccgttatggacatatcttgtaattctcgggtataaatatacccgagccctatgtaacttttaacacacgttcaatacaatctcggcgcatcgccacccttttacttt

SEQ ID NO: 25232 - DNA, 2837 bp, Oryza sativa
  ref <308>: DATABASE ACCESSION NUMBER: AK100674
  ref <309>: DATABASE ENTRY DATE: 2002-08-28
gactgttttagattaacccgtcacctagggcctcttcgagttaagcgcgcagaggccaagggagaaaaggaaaaaaaaacgaaaaaaaaagagaaaaaaaaaaggacgcgccaccgcggcgggagaggcgtacggcgcaccggccggccgtcggatctgcgccggcgacgcgcgcccccgccggatccccgctgccggaggtggacgaggcggcgctccggccatttccccgcccgcgagcgcccagatccgtcccgccggatatttgctgctcaattatgcgataaagtgcttccagttgacgcggagttggtggagacgccttgctctataatctattctccattgctcagcagtgatcagttggaagattctgcctttcttcctcttgctgcctgtttgtttgcttccttggtggagtagacgagaggaggagggcaagaagataaaggtagcttctttcagccactctatgtccagggacttggattgtcctgttcagacacagatggccgttgcagtactggatcggagcttcagcagtgaatatcctgcaagcagcagaactgaggggagatcatgtagttggaaaagagtctttgtccaaactgaaaatggttatgtcctgggcattgaactggagaggggagaaaatgcacacactgtgaaaaagaagctccaggtagccctcaaggtacccacagaggagagctcactgacctttggtgatctggttctgaataatgatctcagcagtattcgcaatgactcaccactgctcctcagaaagaatcaaatgcaccggagcagctcaactccttgcctctctcctactgctcatgatgtgcaggagcaagatcacagcgaacccattgaaatccttggatgtttgagcccctcttctcggatgaagcagcttgctaaggatgttgtggaagccataaggaatggtgttgacccggtacctgttaatagtggcatgggtggcgcatactacttcaagaacatttacggggaacgtgttgcaattgtcaagccaacagatgaagaaccatttgctccaaataatcctaaaggttttgtggggaagacccttggactgccaggcctcaaaagatcagtacccgtcggtgagactgggctccgagaggttgctgcttaccttcttgaccatgataactttgcaaatgtcccacccacaatgctggtcaagatcacgcactctgtgttcaatgtgaatgatactgtcagctgcaaaagtaaagtcttccacaacaaattgcaggctgtgagcaagcttgcatcattgcagcaatttattgctcatgattatgatgctagtgaccatgggacatcaagcttccctgtatctgcagtgcacaggattggcatacttgacatcagaatattcaacacggacaggcacgcaggaaatcttctggttaggaagcttggacctgggcctgacaattttggagtgcagactgaactcattcctattgaccatggtctctgtcttccagaaagtctagaagacccttactttgaatggattcactggccacaggcatccattcctttcactgaggaggaactcgaatacattgcaaatctggatcctgtaaaagatgctgaaatgcttcgcttggagctgccctttatccgtggagcatgtctgagggtgctggtgctatcaacaatatttctcaaagaagctgcagcatttggcctctgcttatcagagataggagagatgatgagtaggcaattcactgggaaagaagaggagccaagtgagcttgagcttctttgcatggaggcaaggaagtgggtcaagaaaagagagctatttcttccagaagccggagttgaagatgacaatgatggcatcacccagttctctatcgacagcgaagatggttcagatgcatctgaattaccatctttcagcaagttcgggctcatgaatgctagtcacagaaatccactgtcaaagttagatgagtgtgatgaggaagatggtgaagaggaagaggatgatgatggtgatgaagaggatgatgatgaagatatgttcaaagatgatgctggcaacttgaaaaatccgttttcgaagcatattccttcagtctcaaagttatcagcatcatttaaggggctcggtttcattgggaaagctagagcctaccacaaaggtgttcccaagaacaaggtgactgctaaaactaactatagtggcaaaggtagtgagcatcagtctggtagcaggagtgccaatgagcttctccctcccagcgccagttttgtgaagctgtccgacatgggctctgatgagtggagcgcattcctcgacaagttccaggagctgctcccgagcgccttccgagcccggaagcacgccgctgctgatggccctcgtccgttgcagaggctgggcacttcttgccagttttgaaactagaaaagaagaagcagcagctttataccaaggtaatgtagatggaacccatcaggtgttcagcagcagcagctttgtccgtcgaaggcagctagcagaagctctgtacgcttgtaggtgtctgttctcggagaagatatagaggtggttcgggaataagaccgtccgtccttgacaaatatgagcttgcaggagggtttgtgtcgtgtttgtgaatagctttgacatatgtgttgggttgttctttcatctgtacatatatgaaatgaatgagtacctctcgataccgggcttgacctggtagtggtgagtgtgctggccttgccggtgtaccggcgctgtaccattttggagacgtttacctggatattattactgc

SEQ ID NO: 25233 - DNA, 2814 bp, Oryza sativa
  ref <308>: DATABASE ACCESSION NUMBER: AK100675
  ref <309>: DATABASE ENTRY DATE: 2002-08-28
tgagagcaaaaaagaaaaagctagcacagagctgctcacttctcagtatagaggcagaggcagagacgacagaggcagcgcgattctttctttttggcctcctctcctcttgtctcgctcttcttcttctccctcttcttcttctatgagacctcgctctactctctctggcggcgcggccacactgctcttcttcctctgatcgagacctctctcggcggcgcgcacactggtagcgtggtgagcggagcggtatgggtccaaggagcacaagaggccgtgttctcatgttccttttgctggtcctgatgatggccgtcggagccaatcgcgattcaacagcggctggatttgcaaggacggtgtccaaggctgaagtgttggcatcacctcctccaatttcaccagctgtcaatgctgtcatcattataagaaatcgggtggttctgtcaattggtaaaatcaatgttttgaatgattagatgcacttttttatataaaaaatagatgataatgtggctttatatataatttctattattacaatacaattcatgtttttttatacgtcgttgtgtattgttatgatatatgaaagttttttcatgtacaatctagatattgtcacaattagatagtgtagcatttctctgcttcatctcaagcatgtttcaaaaataagtttgaattaatgacacctaattattatacgttatctaattgtttataacaaaacaaaactcacatcttatgtaataattggagttgtatttagaaaaataaagattagtattatctttgaggatttagatgtgtagaatggataacaatatcacacgtgattatgaactaaagggaggtgaatggatgagcaatgattaaattagatagatgaatagctagcttcttgatccaacggctgataactctatacaaatgcgatccaatggcttaaaattgttgataatgtggctttttgcatatcttgatttttatgagtaaatgcttcttagtgggtatcaactatataggaagatatgatatgcattcatttctcttctgctctatttgattgttttcaaattaagtcatgtctagtctcgtgtactagttattgcttttatggcgattaatatgcatgcttacaatattattaaccggtctcccttttattttttttctctgcatctatttaatttattttattttatcttattgtagctaatatttttagcgtagcagtctcattatggccgttttttgttcgatggagatacggttcttggtttattacacgccagattttttcagcaaaagtcgtggcgtgtaatcttgtggcatctgtcacttggactatctatatgatggttcaaatgtatgccggcggtaattacgctggagacgacgttttactgatcaattcagtaagcagcacgagtagtatgtttattttgctggtgtatttcttgcatgggagagaggatattaagtactggatcctcatgatcctctttgctttggtggtatgctgcggaatgggatggttagtttggcaccctaacataatcatgtccgagagaacacaagacattttaaagaagtccaccaaatcagctgggattactggaatagtactattcggattggtgaattttctcccattttttgatctgtggaccataaccaagagcaacagtacagacttcagtttaacaacgccaattgttataaatacgatgttggcaggtgtattgagtgcattctgggctttgtatgcctggatatttgacccaaaatcacccaattactttatgatagcaaattcattggcggctggcatgagctcaatacaatttgtatggctgttggttctgcgcaattctcacagagaagtaaacggacagattgtagaagttgagagtctgcggtgtgtgttacttagtgtcgcaaagtcgttggagaggttgggagcagcagctcctaccgaggagttcttgcaacaaaccaagtatctgctgaggttacaagaaggtctgtccattgggctgcagtcgttggatttgatggagagtgcattccttcggctggaacaggagctagtgaagaacgttgctcgcactgctaatcatgttttagaaatgcaggataaacaagatgcagcggctaatttcgtggcaaggtctgatgacaacaatgcaaatgatgtgctaagagcctgtagaattttacgtgaaggatgcacaacgaacaagaatgcttttgatagcatgcaagaggctatacaacacaagattgcaaatgccgaaggaggagaaaacaacttgaaagacagaatcaatgccgcagcagcagccataagaggcttggccatttccatgggatacaatatgcaaaccatcaacggtcgagggattccacccacggtgaagatcgccttcaatttttgctgtgagcagattttgtcagttaaaacttgcgccgacgccccgtttgtgtggttggggtttggtggattttctctacgaaggcgtctgaacttacggtttgataacgtgaactggcctgatgtacccttgtagtacgaattgggctacgtactgtacgtgaaacttgctctaatagcttccgcgagcaagcactgtgcaacttctggattgctagctaggatacttcgtgtccctaagtagtcatatgcttgttagctctgttagtttcttctgctgcttttgtgcccgattgttgtggagtgtgatgcttctactggtgccagacagctctatatatctttccagcaaattaatttctaaaactagc

SEQ ID NO: 25234 - DNA, 3139 bp, Oryza sativa
  ref <308>: DATABASE ACCESSION NUMBER: AK100676
  ref <309>: DATABASE ENTRY DATE: 2002-08-28
gatccccaccaccacagccgcctctcatatatcaagcggccgcccacgcgcccctcgcatctttcgcgaaggcgattcaggcgagaagagagagagagagcgcgaggccggcggttctagaagcttccagacccttcggcgcgagcgagctcacctcccccgtaggagctgttcattagatctgaataagggggattgaagcagtgaggagaagatgagcgtggtgggctttgatctagggaatgagagctgcattgtggccgtcgcgcggcagcgcggcattgatgtggtcctcaacgaggagtcgaagcgggagactccggctattgtctgcttcggcgacaagcagcggttcatcgggacagcgggcgctgcttcctccacgatgaacccgaagaattctgtttctcagatcaagcggctcctcgggcgcaagtactctgatcctgagctccagcgtgatattgcggccttccccttccgtgtctcggaagggcctgatggatttcctcttgttcatgcccgttaccttggtgaagagcgggttttcactccgacgcagctcatggctatggtgctttctaatctgaagggtattgcagagagcaacctgaatactgctgttgttgactgctgcataggcattccggtgtacttcacagaccttcagcgcagagctgtgcttgatgctgccaccattgccggcctctgcccattgcggttgtttcatgagaccaccgcaacagcattggcatatggtatttacaagactgatcttccagagaatgatcaattaaatgttgcctttgtggatgttggacatgccagcatgcaagtctgcattgctggttacaagaagggacaactcaagatcttgtcgcatgcatatgaccggtcccttggtgggagggacttcgatgaagtcctgtttaagcactttgcagcgaaattcaaggatgagtacaagatagatgtttaccagaatgctcgtgcctgcattaggctccgtgtggcttgtgagaagctcaagaaggtgctgagtgctaaccctgagtcaccaatgcacattgaatgcttgatggatgagaaggatgtgagaggttttatcaagagggaagagtttgagaagattagtgcatcaatactggaacgtgttaaggggccactggagaaggctttagcagaagctggtttaacgacagagaatgtccattttgttgaagatgttggttcaggttctcgtgtcccggcaataattaagatactcacagatttctttgggaaagaaccaaggaggacaatgaatgcgagtgaatgtgttgccaggggatgtgcgctggagtgtgctatccttagtcccacttttaaagtgcgagagtttcaggttaatgatggtttccctttctcaattgcaatgtcatggaaaccagactctcagaatggtgataaccaacagactgttgtattccccaagggtaacccattgcccagcgttaaagcattgaccttctataggtccaatacatttcaagtagatgtcacgtatgttgatactggtgatttgcaaatatcaccaaagatcagcacttacacggttggtcctttcaatcccggcaaaggtgacaaagcgaaactgaaagtgaaagtccgccttaacatccatggggtggtcacagttgaatcagcaacaatgttggaggaggaggaagtggaagttccagtagcagctacaactgagcctccgaaagattctgccaagatggagacagatgatgcacctaatgaagctgcttctggaactgatgtaaacatgcaggaagccaaagcccctgcagatgctgctgccgatggtgctgaaaatggcgcaccaaattctgaggaaaaatcagtccctatggaaactgatgccaaggttgagccatcaaagaagaaagtaaagaaaactaatgttccagttgctgagttggtttatggtgccttggggactacagagttgcagaaggctgtggaaaaagagtatgaaatggctcttcaggacagggtgatggaagagacaaaagataagaagaatgccgtggagtcttatgtttatgacatgcgaaacaagctgtatgacaagtacaatgattttgtgactgctgaagacaaggaagcattcattgctaagcttcaagaggttgaggattggttgtacgaagatggtgaggatgagaccaaaggagtgtatgttgctaagcttgaagaacttaaaaaggtggggggtcccattgaggcaaggtacaaggaatggatggacagaggcccttccatcgaccaacttgcttactgtatcaacagtttcagagatgctgccttgtccaaagatccgaagtttgatcacattgagatggaggagaaacagaaggtgattaaccagtgttccgaagcagaagtctggctgagagagaaaatacagcagcaagatgctctgccgaagcatgctaaccctgtcctactctcttctgatttaaagaaaaaggccgaaacggttgacaggttctgcaaaccgataatgatgaagccgaaaccagctcctaagccacagacgcccccacaaacgccaccgaccgagaccccggctggcggagcccaaacaccagagcagcaacctcagggagctgaagcggctggcgaggccagcgagggcggcgccagcgaatctaccggcgagcaaatggagacggacaaaccggagggaactgaagctgcctaggctgcagctgcggaaacgtttttcagtttcctgcaagttgctgctgctcggtctgcattcgttatcagattccgacaccgaagttcagtagaggttcgctagggatggatttgtgattcaccatacttcgtgaggatcatctgcgtgaacgtacgtttaggtttatatcctactgtaccaatgtgttgttaaaatcggctttccctttttaatttttctgccaaggggttttctttcaattcgagatataagggcacgtttcagatttggtgtcctacggggtgggtgttatagcgggacttacaatggaactcaaatttttaagtccgatgtatcaactgattcttgttccatgggatttgcacgctcttctggacttacttttgc

SEQ ID NO: 25235 - DNA, 2190 bp, Oryza sativa
  ref <308>: DATABASE ACCESSION NUMBER: AK100677
  ref <309>: DATABASE ENTRY DATE: 2002-08-28
gaccgtctcatcccagctcagctcagctctgcctccgccatttcgaagcacatcgaggagagagaaagttctagagagagaggagagaggagagatgtttgatgcgggggatcgcggcggaggcggcggggtggtggcggtgaagaggatgaagctgtgcgaggaggaggaggaggaggaggaggggatggaggtggatgaggaggaggaggaggtggggtgggtgtggaggccgccgggggggctagcgggggaggatgaggcggcggcgtgggaggggagggcggcggcgatcgcggtgtcggacgcggtggaggtggatttcccggtcatctacgtcaacgccgccttcgaggccgccacggggtaccgcgccgacgaggtcctcggccgcaactgccgattcttacaattccgggatccacgtgcccaaagacgacatccgcttgttgatcccatggttgtttcagagatccggcgatggttgaatgagggaattgagttccaaggtgagctattgaattttcggaaggacggtgctccactgtacagcaggctaaggctcattccaatgcatggggatgatggttttgtgactcacgtcattggaatccagttgttctctgaagctaacattgatcttagcaatgtatcatatccagtgtataaacaacagtccaaccacagacccaacattcaagagatcaaccctgcttctcatgaacatattcctaagattcaaagttccgagtactgctgcatcctccagctctcagatgaagttctggcgcacaacatattgtctcgcttatcgccaagagatgttgcatccatcggatcagtctgcactagaatgcatgagttgaccaagaatgatcacctgagaaagatggtatgtcaaaacgcgtggggaagagacgtcactgtgaggcttgagatgagcaccaagatgttaggatggggtcgtcttgcaagagagcttacaacccttgaggcagcttcatggaggaagtttacagttggaggtcgtgttgagccttcccgttgcaacttcagtgcctgtgctgttggtaatcgccttgtcctgtttggaggtgaaggagtcaacatgcagccaatggatgatacctttgtgctcaacctggaatctgcaaagcctgaatggcgccgtgtcaaagtttcagcttctccacccggccggtgggggcacactctctcatggctgaatggctcatggctagtggtctttggaggctgtggacagcaaggtttgctcaatgatgtctttgtccttgaccttgatgccaagcagcccacctggagggaggttgcaagcgagggcccaccattgccgaggtcatggcacagttcatgtaccctggatggatcaaagcttgttgtctcaggggggtgcactgaatccggtgtgctcctcagtgacacattcctgcttgacctcaccaaggaaaaaccagcatggaaggagatcccaacatcctggtcaccaccatcccgcctcggccacaccttgtccgtctttggtaagaccaaactcttcatgtttggtgggttggcaaagagcggctctctccggctacgctcctgtgatgcctacactatggacgctggtgaagacagcccacaatggaggcaactggcgacaaccgggttcccgagcatcggtccacctccgaggctcgatcatgtcgcggtcagcctcccctgtggacggataatcatattcggtggctccatcgctgggctgcactcgccctcacagctgttcctcctcgacccagcggaggagaagccgacatggaggattttgaacgtccctggccagccacccaagttcgcctggggtcatagcacatgcgtggttggcggcaccagggttcttgtcctgggtggccacactggggaggagtggattctcaatgagctccatgagctgtgcctcgcgagcaggcccgacgaagatgagtgattcccaactccattgcttgttcttatttatttagatcctatgattattactgatatctgttgttgtcacaaccctatgtaatagtagtaaaaaagaaacaaaaagaggattactggtagttttcatccttagaagttaggaaaaagatctgaaaaaaaagttatgaaataaaggtttgttctagttttttttttgttttcttc

SEQ ID NO: 25236 - DNA, 2224 bp, Oryza sativa
  ref <308>: DATABASE ACCESSION NUMBER: AK100678
  ref <309>: DATABASE ENTRY DATE: 2002-08-28
cctagctggttctatagtggtcacaactcacagccaaaacctcgtacattttcagctagccacaagcaacacaagtccaagacaagtcaagcgttcgcaccaagtcaaaccgcgcctcactgccaccttcgtttgcgcaccatggagcttgccctggttggcaacccttcgaatggcgtggcgaagccgtcgtgcaactccgtcggctcgctgcccgtcgtcagctccaacgccgtcatcaacccgccggtgaccagcgcggcgggcgccacgctcggcaggcacctcgcgaggcgcctcgtacagatcggcgccaccgacgtgttcgccgtccccggggacttcaacctcaccctgctcgactacctcatcgccgagcccgggctcaagctcatcggctgctgcaatgagctcaacgccgggtacgcggccgacggctacgcccgcgcccgcggcgtcggcgcctgcgccgtcacgttcaccgtcggtggcctcagcgtgctcaacgctatcgccggcgcctacagcgagaacctccccgtgatctgcatcgtcggcgggcccaactccaacgactacggcaccaaccgcatcctgcaccacaccatcggcctcccggacttctcacaggagctccgctgcttccagaccatcacctgctaccaggccgtcattaacaacctcgacgacgcgcacgagcagatcgacaccgccatcgcgacggcgctaagggagagcaagcccgtgtacatcagcgtgggctgcaacctggcaggcctctcccacccaacgttcagtcgcgagccagtgccactattcatctcgccaaggctgagcaacaaggcgaacttggagtacgccgtcgaagccgcggcggacttcctgaacaaggcggtgaagccggtgatggtcggtgggccaaagatccgggtggccaaggcgaagaaggcgttcgccggcatcgcggagtcgagcgggtacccgttcgcggtgatgccgtccgcaaagggcctcgtgccggagcaccacccgcggttcatcggcacgtactggggcgccgtgagcaccaccttctgcgccgagatcgtcgagtccgccgacgcctacctcttcgccggcccaatcttcaacgactacagctccgtcggctactccctgctgctgaagcgggagaaggccgtcatcgtgcagcctgaccgcgtggtggtcggcaacggcccggcgttcggctgcatcctcatgacggagttcctcgacgcgctcgccaagcgcctcgaccgcaacacgacggcatacgacaactaccgccgcatcttcatccccgaccgcgagccgcccaatggccagcccgacgagccactcagggtcaacatcctcttcaagcacatcaaggagatgctgtctggcgacaccgccgtcatcgccgagaccggcgactcgtggttcaactgccagaagctcaggctccccgagggctgcgggtacgagttccagatgcagtacggctcaatcggttggtccgtcggcgccacgctcggatacgcccaggcggccaaggacaagcgcgtcatctcctgcatcggcgacggaagcttccagatgacggcgcaggacgtgtcgacgatgctgcggtgcgggcagaagagcatcatcttcctcatcaacaacggcgggtacaccatcgaggtggagatccacgacgggccgtacaacgtcatcaagaactgggactacaccggcctcatcgacgccatccacaactctgacggcaactgctggacaaagaaggtccggactgaggaggagctgatagaggcgatcgcgacggcgacgggcgccaagaaagactgcctctgcttcatcgagatcatcgtgcacaaagatgacacgagcaaagagcttctcgagtggggatccagggtctcggctgccaacagcaggccgcctaatccccagtgatcttgctgctcgtcttctcaggacgcacactcgaaattgctgggctgccaatgtctaagatgtgctgcttatcatcgtctgtgaattaattgtttaacgcttctgtttctgtatccattcaaaattttcttagagaagaggttgaattagtacatgtcgatgggtgttacctatcctatgataatgtatgtaattcaaatgcttggaattaatgttttgtaaacctacactatattgcgatgcaataacatggacgatttgaagg

SEQ ID NO: 25237 - DNA, 2514 bp, Oryza sativa
  ref <308>: DATABASE ACCESSION NUMBER: AK100679
  ref <309>: DATABASE ENTRY DATE: 2002-08-28
ggggggtttagtagtagtcctccatggcttaacaacaagagaagcgcgcaattagggaaaccgtttggtcttccttaattgcgccctcgcccccgcggcaaccgtccttctcctccatctccccttccacgccgctgccctcccctctcctctcccctcccgccgagaaatcggtaagtagtggactagtcgctgcgactccgcgagggttccccggctgcttgtccacgggatcccacgacccggcggcgttgcggcgaggaggaggagagcagtttgggggtctcgccgcgatcgctgagatctcagtttgccaaggggttcaagtttcatgagtcatcttgacgttgttactactgtggaagttgcaattcttcatggatgtcctcaagagtgatgtgaagaagactggtattctcaatgagactctaagaccaccgctagttccatccgagaagcataatgcttctccagtaaaccgtgggagagatgttgcttccaggtacaagaatggtctgtctgctcattctgctgccaccacagcaaggagatgcacatcaccaagtcctgggcggacctccgcaaatgaatgcacaccagaaccaaaaagagctcaatcagcagacagaagaaggccctcaactccttcttctagagtgtcaacaccctccacccctgcatcaaggtctgtcacaccagttcgtaatactgttacagagggacataagagttctaggcgaataacaagcacaaggaatactgatggcttgtggccagcaatgcgaaacctatcttcctctttccagtcagaatctgtggttacccccggtaataaaaaggataaggtagtccccagtggatctttggatcaaacgaaggggcaagctagtgttatagccgagaggaagaggagtcctctgagaaggaagaacattggtgaacaatgtgagaatgctcaaccctcagaggaccaacctaggagggtaatcgaacaacaccgctggccagcaatgcagagtggccgtgtggccagcaatattttgtcaaggagtattgacatgtctgacaaagctggcagatcagtcccttcaacaaatatttctagaggtgtttcaccaaggaagacgcttgcttctgaaggcacaggcaaagggtttaataaatcattggatgaggtagcaaggagattggctattcatgcaggtggaagagatgacaaagtagactctcgctgtcatgcttattcacagtcaacagagagatgtaaatccgttagccgtccaagtagggcagttactttacctgttcctgttcttcatcgctcatcttcgccaagcaaggcctcttcagttacatcctctatttctaggtcctttcagagcccatctcggacaaggccttcaacacctagccggtcacaaagtgctggaagtattcaatcaggtgttgcgtcacctattattagctacatggttgatgcaaaaaaaggaaagaagaactccagccaaattgaaaatatccaccaattgcacctgtcttataatagatacttgcaatggatctttgtaaatgcttatgcagaagatactatgtctttccaaaaagtgacagctgagagtattatatataatgttttgaggaatacctcgaacttgcgggatgttgttaatatgagaagaatcatggttcaatgcatacaacaagagttgaagctacatggcattcttaaagagcagattgattaccttgaacaatggccagcacttgaaaaggagaacagtatttcattattccacgcaactgaagctctaaaagcaagcacattgcgtcttccagttacatcaggagcaaaggctgatgtagttgctcttaagaatgccgtaagctctgctgttgatatcatgcaaggtttgggatcagcggttcgctgtatgcttccaaaggttgaggacaggacatatttggtatcagaactttcagttatagcaagacaagaaaaggccatgcttgatgaatgcagagaattattagctatggcagcaaaactacaggtacaggagtccagcctgcggacgcatctcacacaactgaggcctggaattgctcatatgatttgacaatctaagggaagatctgcaagtcccagaccagccttctgaacaggtacaccagtgcaagttgagcctctggcgatatgaacatattgtgcaaacatacaaggagtttgtagagatgaaataatagaccaaaagaacgttgaacatcccctggtgatcatggagtgatgctgtgcagctaacaactcatggtgcggtacagatgatagatttacttaaaaggtctcctcatgtgtaaataaattcattcaggttccccacacccacctacctctctttagtttctctaaaattatttgttagtatttctacaatgatagagctatgttctttccgattgtattttttggcatctggaaagaaaatacacagatgaaatggaagggcaaaagtaatg

SEQ ID NO: 25238 - DNA, 3348 bp, Oryza sativa
  ref <308>: DATABASE ACCESSION NUMBER: AK100680
  ref <309>: DATABASE ENTRY DATE: 2002-08-28
agagagagagagagagagaggagcggaagagaaggggagaaccaggaggaggaggaggaggaggaggaggcggtgggagggatcgatggcgtcgcgcgtgctcccacgagagggttcctgatcgcgtccgtggtggttcgcaggtccaactaacggcttaaaagcttataggctgatgcttaggttggatgtggaagccaactcgacagatttgaagctactgcatgaggggctaataaataagtttgcatgcttcaatttcttgtgtctctagagaaaaatcaactcattggcggaaaaaaaaaacatcctggtgcgttcataagtcagccatctagaggacaatgtcagcttcggagttcaggattccttatcagcaagtatcatcttcacagactgctgagaatgcaggtcagtacaagatctgccggtgtggggaaggagacccaaacacatctgaaactggtgacagttcgccaactagttgtcctaattgccaggttcttaagagtgggcatctactgctctcatctaaaggaattggttggacaacatggaaaaagcgctggtttattcttacaagggcatcattagtgttcttcagaagtgatcctaatgcacctgtcagaggaaatgaaccggttgttacactaggtggaattgacttgaataacaccggaagtgttgtggtcaaagaagacaggaaacttttaacggtgttatttcctgatagccgtgacggccgaaccttcactctgaaggcggaaactacagaagagctcaatgaatggaaaagtgcattagagaatgctctggcacaagcacctgctgtagcaaatgctgttggccaaaatccaattttcagcactgacatagcagagcctgctgaagctccagctgaacagccggacgacaaatctgttattggtagacctgcagagtttgcccttgtagatgctgatggtagtccatctttcctggagaaggccttgaagttcattgaagattatggtgtcaaggtggaaggaatcctccgtcagtctgctgatgttgaagaagtcaaacgcagagtccaagactatgaaaaggggaaaaatgagttctccccagaagaggatgcacatgttattggtgactgtatcaagtatgttcttcgagagatgccatcatctcctgttcctgcaccatgttgcactgcgctggttggagcttaccgaaccgacaaaacaaaaaggcttgatgctatgagtaaagtgatttatgaagtttttccggaaccaaaccagcaactattgcagaggattcttaagatgatgcagattgttggatcacacaaagctgtgaataggatgtctccatcggctttggcggcttgcatggcaccactccttctccgacctcttcttctcggtgaatgtgaaattgatagtgactttagtatggctggggatggttcattccagctgcttcaagctgcagctgctgccaaccatgctcaagcaattgtcatcattatgctcgaggaatacgacgagatatttgatgacttggaagacggttcctgctcttcagatgcatatactgattcagaagatggcgatgttgacaaggaatattctacggacaatgatgtggatggctcttatgattctggtgaagataacattgaagaagacatggaagatgatactgagtactcctctggtggcagtgaatgtgatgacaaggttaaaaggaataactctggcaaggcatctaatgtggagaatacttcccaaatggagagcaatgatccatcccatcgaaaattacacgaatcaaatggatccacagatcaaatagaaaagtcaaatgttcgcgcatcatcatcaagagcaaaatttatggagaaatcaagctcaagaaataagagcaaaaagaccttattgggccgtgcttcagcaagaagagacctgtcggcagatgagactgacttttgcagtgatgatgagactcttattgagaagcttgagaacaacaagacggatctccaatctaaaattacaaaggaggtgaaagaaaattcaatcctccaggcaagtcttggaaggaggaaagaagaattgcatgaacgccgcttagcacttgaaaaagaagtggaaaatttgcgggatcagctacagaaggagagaaaattgagggcctcattggagtctgggctgatgaatttgcgtagaggacaggtgtccttcccatcaacaattgatagcaagactaaggctgatcttgaggaagttgctactgctgaagctgatattttgaacttgaagcaaaaggtttctgatctccgtggacaactcaacaacaatgtccagatgagctccacctcattatgtgactcttgcaacaaacgactcctaagtacagacaagcttttcgaagatgaacagaatacttcaccatcaaatgttgggcccaattctatgtctgacatggcatcggctacagacatggcagatattgagcaatcaaggaagcaaaccacacaacattcatcttcttccatagacaagccaactctccacaagcatcaaaagagtattgcatccaatgaacaatcaagtaccatcagccaaagggctcaaaggatcttatcttctaagggtgggattatgaaggatggccaagatggatcatttacatcaaagtggaaccttgcacagaaacaatactcaaacaatccactgttaggcaggcttggatcaaatgcctattcgagcactagaacagaggaatctggggcagtgccatttgcattagccaagctgacaaaccggctcaattttttgaaagaaaggagggcgattcttgcaagtgagatgcaaaacttaaatttggctcgcccaccagggcctacagctccagcaccaaagaaagactccacatgagaagttagaattttaacatggcatcattctcaggctacggatatttgtactgtcaagtgtcaaatgtgagcgatgcacatatatatgatggacgctacacaagctatttcacatcctgcttctggaagatgggggtggtgcaatattgtaaccttaccggaggttacccagtccgagatgcgtcatcatgcaagaaaataagaggatgctggtggtgtttacataaatcgtggattggacaaatatccatagttctaggtaaacgtaatctgtaaatttatcaggttgtcttgtttttaccacgatgtttcataagtaattttgcagcgacattgatttatccgggttgcaccatttcatgtagaaaatagttaaaccacagtgctattgcaaatgcaattacctgctgcattcgacgccc

SEQ ID NO: 25239 - DNA, 2626 bp, Oryza sativa
  ref <308>: DATABASE ACCESSION NUMBER: AK100681
  ref <309>: DATABASE ENTRY DATE: 2002-08-28
gattttcttcccttcctccccgattcttctagcgcaaaaggcgacggcggtggagcggcggcggcggcgtttcggcggagcggcgatggtggcggcgctcccttcctccccgattcttccggcgcaaaaggcgacggtggcggtgcttcggtggagcggcggcggcggcgtttcggcggagcggcgatggcggcggcgcttcggtggatgtcggcggcgcgacgtacccgtgtgtggcgggctgatgccacgcatggctccggcggagctgaagccgacgacgcgcagcgggtcgacaccgaggcgagccccagtctggtgcggcccactcaggcaggcgagccccgatccggtgagttatgcccccaaggtttttagggtttgtactgatttggggttttgatttaggatttgcaaaaattagggttcttgatttgtggaaactaaaaattagggtttcaaatttggggaattttaatttttgggagaatacgtgaaaaggatttggttggcactctgttctattgacggaatcaaattggcacccgttttttctcaacaaaacccacctagtagatcaattgaagaaagaaacggtgaaatagatgtgactaccaaaagaaaaaaactgattaccgggtctatttggtctggatggtgggcctggctttgtagattaggaaattgttgtgattattgccgaacaatcctcacatgtaatcggattcaattttttttccacccgagtttgtttctttctttttttttgaatcggacatattcgattttttttgggtggggggtgatggaattccgactgggattttgggggaggcgagggggacgaaaaatcaccgcacctatgaggtgacgaccggaaaaatacgaatatttatattagttatatatagattgctgaagatagtgtatacctaatcactacaccgtgcgtgtcattaatttggtgtatgtctaatttcttttttaatttacctattagggtttaaattcttatatccataaatatatttatgtgcatcctgttcctttacttatgcagagagaggtcggaaattatagtttcatcgtaagaaaaatgccctgatatttgtgttgcttgatacagtatttgatagaacttgggcttttgtcttaatgcttgatgttcgacagctctctcgctgcaatttgctttgctgtgcaaaaagcatttatacaaggccatcacttgtcacgtacacgataattagaagaaatagctaattcacacttttttttttggtcaccgagagatagtttcgctgtcattctgagagcacgttgggttgttcaggtcaaagcgagttaggctacaagtgcagaaataattatcgtttttcaagtcaaggacagaagaacactttgacggtgcttccggatctcggtaaacgaaacaaacgaactaaaacttttccaataccaaagttaagaattctaatacaatgttctcctttttttgtttgttacaaataaaaacactatgtacatgttccactctgaaatctgctgctttggtttctactaattgttaccatttactgaagaagaagaagaaggggaaaaaataatcaatcagctgcattttgtgagatgaagagctcctgcacaatgtcagcaatgagctggtcgaagatggcacgttcgagcttcctccccaaaacataggaatcctcatgcaacacctcaatccatggcgatgtccaggcctctcgtgccaccatgctctccactgtctgcgtctcctgctgcaccggagggttcctcacactctgcacctgaagaagaacaaatcaacagcacggtcaatgacattcacaagcttatttcgatcgagaccgagcaagcttgggattacgtcacctgctgccacacatcgacgagcagcttcctccccggcgacacgccggtgctgtcgacgacccaccgccacagcgacgacccggtcttcgtgctacccatcatggtgatctcaagcgcttcgttcgccaggtcgaacagcatcctgtgatcagctgcatcttcttcagtgttgtaggtctcctctacctcgtcgaagacgtagtcgcagatcggccttcttgccattgagtccacccgggcattgttcatcatcgatggagacgagtacgacgacccgtcttcgtatagtcccacggcaatgaggacttgctttatgtacgccatctcagtatagctctcctcggtttcagttgcgttcgtcctgttcttgcatgatgatgattcattgctggctatgggtgttgtatcaaattctgaccaacttttcgggctcagttctgcacaacattggactcattgttttacacttcaggtctcagtgaaactctgaaatgtaacgaacgacagagagagggccgtagttttttcatacctggcaagttgcagttcagatcgctgaagaaatggcgggaactgctgcctttaacctccaacggggacaccgggctaggaggcagctcggtgaaattctcctgaaacaaatgcagcaaaggaagtgaatccattgtacaaaagaaagttattctgatcctctcaaggtcaggcctgaaatacagatttgattttg

SEQ ID NO: 25240 - DNA, 975 bp, Oryza sativa
  ref <308>: DATABASE ACCESSION NUMBER: AK100682
  ref <309>: DATABASE ENTRY DATE: 2002-08-28
ggcttttccgaaccctttccattttttccacccacacagcggcggcgagggtttccgatggagaatggagacgagacgttcgcttcccccaccgccggcggcggcggcggcgagttcgagcagccgctgaccaacggcgggggaggaggagggggcggaggggtgtaccccgccgccaaggcctacgacgcgggcgagttggacgcgctccgcgaggcgaagcgcgacctggaggacaagctcgccgccgtggagcacgagaaccggttcctcggcgcggaggcgtaccgcctcgaggggatcgtgtcgcaggccagggaggacatcgccaccgccgagcacgccatcgccgcctccgagggggaggccgccttgctccgcgacgaggtcaagcgcgtgaaggagctcctcgccgccgagaagtccaaccacgaggccgagcggcgcagggccgcggacctcgacgccgagctgaagggcgtgcagaaggaggtggcggccctcgaggaggagatcaaggccctgaaggcatccgccgccgccgccgatgcagaggatgaggatgaggctgctgctcccgcgacgccatctaaggaagcggaggtaggttatcacgggctgatggcagctgccgccgctggagccgccgccacggccgtcgttgcggtggtcatccttcacctgaagaggtaatctggtgctgtgacgcgtaagaagttttggtctgctgctatggcttacatgagattggattacccccttttgccgtggtgctggtattactggaggtaatattactttagcattccactcgctagcatttagagtcctagagaggtggagacttatcgtgagtccgtttcggttctgcatcctcacatggtaataagaatgtcaagacaattctgagtgagacgcatgtggttgtgttatgttatgttattttggtgctgtactgatttttaattctgtccc

SEQ ID NO: 25241 - DNA, 2206 bp, Oryza sativa
  ref <308>: DATABASE ACCESSION NUMBER: AK100683
  ref <309>: DATABASE ENTRY DATE: 2002-08-28
gacactgttgatagtcatgactcatcactttgtctttgctgcagtatctgcctgccttgtcagcattccatttccctccctttagctagtagtatagcttcctcacctcgccggccaccgctccatcgctgccgtgccggcgcgccaccgtgagatctctctcccccgacattctctcggagacacagagagagcagcagggacaaggaatcggacgaacagtttgtgtcagagagagagaatagacgagagctcggatgcaacgcaagagatcggattccatgcttgctccgccattgccattccgttcttggcaactttgatccctcgcttgctccggccatccacggcaaccaaccccaaccaggaaggtcaccagcgagaggaggatcggaggaggataagtagccgtgggtgcttgccgcctcgctgatggcccttgccgccgcgccgccatgccccgcaccgcaagaaaagctcgtgtcctcctgctgtcctcgccgccgccgccgccgtcgccgccggtgatgcttcggcgtggcggggtggtgttgttgttggtggtggtggtgctcgggctgctcgccgcgcggtgcgacgggaagaaggtgtcgtcgttcgtggggacgtacggggtgaactacggcaggatcgcggacaacctgccgccgccgacggaggtggtgaagctcctccgcatggcgcggatcaagaacgtgaagatctacgacgccgaccacaccgtcctcgacgcgttccgcgggtcggggctcaacctggtgatcgccgtgaccaacggcgaggtgaaggacatcgcggcgagccccgccaaggccatggactggctgaacgagaacgtccagccctactacccctccacccgcatcgtcggcatcaccgtcggcaacgaggtcctcggcggcgccgacgccggcctcgccgaggccctcatcggcgccgtcgtcaacatccacgacgcgctcaagatgctcggcctcgccaccaagatcgagctcaccacgccccactccgaggccgtgttcgccaactcctacccgccgtcggcgtgcgtgttccgcgacgacctcatggtgtacctcaagccgctgctggacttcttctccaagaccggcgcgccgttctacgtcaacgcctacccgttcctcgcctacatgagcgacccggcgcacatcgacgtcaactacgcgctgttcaagcccaacgccggcatctacgacgccaagacgaggctgcgctacgacaacatgttcgaggcgcaggtggacgcggcctacttcgcgctggaggcggcggggtacccggagatggaggtgagggtggcggagaccgggtgggcgtccgccggcgacgcgacggaggccggcgccgacccggcgaacgcgagggcgtacaacttcaacctcaggaagaggctgttcctgcgcaaggggacgccgtacaggccggggagggtggccaaggcgctgttcaacgagaacctcaagccggggccgaccaccgagcgccattacggcctcttcaagcccgacggcagcgtctcgatcgatctggggttcaagggcctcgtcccttcgtcgtcgttgccatcgtcgtcaattatctcattcaagagagctcgagaaaggggatggatggcgcttgtacagtactcggctacacttctgtcatgtacattcatttttctagttttaagttagtgatctgattacaaccagattaattagttactaactgtcaatcgatccgtcatgcccatgcgaaaaaaaaatattcgttctttggatgcaaattccacgaaaattgtggcatagaaattcaaaagagttgtcccttcctgtacatagtctctgttcctcttgtagtcttgtagcaaacgattatctagatgtagttcttatttctgaatatgttcttctcatgctccagagctcagcaatcagcataacctccagaacttaacctaagtacataactatgccactttcccctttttcaaaccagaatttgaattacattacaccaaataaacttctcctaaattgaaacattactagttgtgtagtttcattttttgaactatcagattagaatttccactactacgacttgaatttagagccttctgaattactcaaggcatctgattgctacaagctatgaaatgaaacaccatgcttctgttctg

SEQ ID NO: 25242 - DNA, 2074 bp, Oryza sativa
  ref <308>: DATABASE ACCESSION NUMBER: AK100684
  ref <309>: DATABASE ENTRY DATE: 2002-08-28
ggtggtttgtcagtgacttctgcatgtggctgtgttgtgcgactaccttggtccttcctgattagtgatggggtttagcgcatggcagtgtttgaatgcaagggtcaggttgcgctggtaggtatctgaggaattcaggaattgaggatgatgagtaatggccacagcaacagcagcaagagccttgaaaggtttatatctcggagggctctgcagatggggagctctgctccctgcaagacatgggcactgggcttcttctgtggtgtctgcattgtgtacctgtttggtgttgctctcccacctatccaaatcctgatgatccgatcggtacatccaccggttcggcgagcaatcttgttgaattcaacatcaactgaacctggtggagctacagaaacagatgacttatctgttttacaagaaaagatagaaatagccaccaatagcaaggacatcaatgaagctgataaaatgcatttgtataatgcttggagcactttactggatacgaccagtgatgaagttatgaaaagttcagacgtgccgcggccgcctcatctggagaattgcaggcttaaatgggaaagaaataagaaatttgacagttatagcgacaacggcgtatttcctccttggacattatggaaagggtcacttggtcttgagttattcaaccagaactattcagattcagaagagtggaggcaaatgtttttcaggtcaaatgctaaatctgacagggcgccatatccaccttggattgcaggatcagatgaagaaaactatccactgaccagacaagtgcagagagatgtatggattcatcaacatcctccaaactgcagtgatccaagcttgaggtttctctatgcagactgggagaggctaccgggatttggtataggtgcgcaactcgctggaatgtcgggacttcttgctattgctataaaagagaggaggattctagttgcaggatactacaaccgtgctgatcacaatggttgtaaaggcctagcaagatctagctggtcatgctactttttacctgaaacatctgcagactgccagaaacgtgctttagatctcatgcaaagcaaagattctagggaaaatggaattataaaagttaaggaaaactatacctccaagcaaatatgggctgggcatatacctaggatatgggggagaccatggaaatatatgcaaccgacaacagagatagatgggagattggttaaaaatcattgtaaaatggatcggagatggtggattgcacaggccctgagatacctaatgaggttccagtcagagtacatgtgcagattactgaatgtggctagacattcagcatttggcatgcaggcagcaaagatggttcttgaaaatgtcccagatccaccaaagcctagcattagcagaacagaatctgacattgagcgacttgtgtggtcggagcataaaccatatatacccgggcctcttatcagtatgcatgtaaggatgggagataaagcttgtgaaatggaagtagttggctttgagaaatacatggagttggctggtcgtcttcgaaaacgttttccaagtctcaagaacatctggctttctactgaaatgcaggaagttatcgacgaaacaaaattatatcccaaatggaatttctatttcacaaatgtgacgcgccaagatgtcaatgtgagcatggcaatgtatgaggccagcctgggccgtgagaccagcacaaactatccccttgtcaatttcatcatggccactgaagcagatttcttcattggagccctgggatcaacctggtgctacctcatcgacggcatgcggaacaccgcaggaaaggtgatgtctggctatctgtcggtgaacaaggaccggttctggtaagcaattcagaagctgctaagccttgttcattgtattttagctcctctgaatagatatgtttggcctaagtttgcttctgtacggcaatagggcatgtatatatgcaccatcctagcagataactttagcgtgtgaaacttctgagctaataggaaaacagtatcgttatatc

SEQ ID NO: 25243 - DNA, 2928 bp, Oryza sativa
  ref <308>: DATABASE ACCESSION NUMBER: AK100685
  ref <309>: DATABASE ENTRY DATE: 2002-08-28
tgggggtttttctcctccaatcctttcccctctccctctcctcctcctcctcctccctgcgccttccgcttgcagcgattcctcctccccgcccgctcttctcgaaccttctggaaccttcccccatcccccacaagaagcagcagatgggcatcgtcgtcgtcgtcgtcaaccaatcctaggcgacgagcgctgcggcggcgcgcgccatctgctcccctccgccgtgctccggtgctccccgatctgcgcctcccgctccggttggtcggctgtcggaacacgcagctgcaaaaccctagccgagctgcggcgatctcaacgctggcggcgaggccctcctcttcgtcggcgtcgacggaaaaatatggcgcatgttttatttacttccccttgctgtcactgaacacatttcctagagtcaaggacaagacatggtgttgcagaagaggttggactatggatcccatggccatcgtgctcccattaagccacgtgtcgcaacattggcgccggttaaacgctccacaagaataaggaaaaagcagatgtatgcacttgatttgcttgcgacagctgcagaaaaattgttggctgatcaagacaatttatctagtggacctaacataaatgaaacaccagaaggttatgttacaagcatgaaaccagttaaagcagaacagtttgatgaagcgtttccgttgagaagcgtggctgtgaaaaaagatgactgcaaaggttgtacagtaggctgtgcaggcatctgtggctttctcagacaagctaatatgtgcttggctgaaaactcgtcgactcaaaatctagctgattcagtactagagtcactaacagcaaagcctgatgtgttggctaaggactcatttgttagcagtaaaaaatcatgtcgattgggttttggtcttggcacaattccggagtatggatctgttggagtatgccaaccttggtccacaagatcagcagaggttaaacaagtgcatcgggcgagaccaacagcaatcagaagtcaagaagatagtgatgctgcagctctatgtgctttggtcgagaccatggatttggacaccaaacctcttgctgaggctagctctggtagtaactcaggagtgcacatctgcggccctgacagggggcataactcccatccctcgtgtttggctaaagtgcagcatgctgcagacagagatgatgacgaaaattcttctgggtgtgtacatccaagcacctcaggaaataaccgtggttatattccacattatataggtgaccgcaggataaggagattgtttgcctccaggttaaggaaggcagctcgcaacaggatatgtggagagatgtcttgtaaaggtaacaagctgagtttgtgtgaaaagaagatgcccactacgcgccgaagagtgcaacaaacaactttgaagaggaaaagacttgctcaactttactccgaaaaatcatctgatgaagaaaactgtgtcagatgctgttactactataattgaacgcggtctccgtgtcggtatacttcttcaaggaaaaaatattcaaaatgacaacaagacgcttcgtcaggctgggatttgccgtggtaaaaaactaaatgacataggctttactctggaatgtgaagctgggcaagattctcaccctggtgtaatagtgccagaagaaatggattttgttggtgcatctgttgtggacaagtctgctacggtgaaatgcgaagaacctgctgagaaccagcagcttatgcaagattttccaggctgcagcttgagtgatcctggttctgttgattatcccgtggaatggagcacacaagaaacatcagcaagctcccaagccatcgtcccttttgcagatccaaactcactggcgctggccaatgtgccgctttctaggtcaaagcgaccagattttgggcaaagacggataaggaggcctttcactgttgctgaagtggagttgctggtggaagccgtcgagcaccttggaacaggaaggtggagggacgtcaaattccgcgcatttgaaaatgttcatcataggacctatgttgatctgaaggacaagtggaagaccctggtgcacacggcgagcatagcgccgcagcaaagaaggggagctccagttccacaggaactcctggaccgtgtgctcgccgcacaggcctactggtcggagcagcaggcaaagctccatggcgatccccctgttcctgaaatctgccctacctgatcctgatgatgattgatggagaaggcaagaatggccctcgtgtacaaatcggtgtaaaaattgttcagaagggattggttggttgacgtttgattgaaatttgtcgacagttgaaaactcacaacttggtccttcctactgttggttcgttaacaggaggaggaagaagaagaagaagaagaagaagaagcttatttgtaaatttcagcagagtttactgtctttgcaaaaatgcaagtcgttttggacaagttgagctggtttttgcatttgcttggacgtgatcctggctgggccgttgtgatgatgaggtgaggcccaagcccatgaaacaagatgggctttgtcatcgtgggaagcagaccttggctgttacggctgctgttgtctttatctaccggcctggccttcttatccaactgcaactaacaccaaccggccagctgccgtcaggcctgacgtcagcacaagcatggaagcagacgaactccacgtttagctccatcagaccatcaccattcggcgcggattctcgattagcatgtgcactcgtatcatcacaattagagcaagttcaatagaatagccaaccgttggctctaaatcatctataactaatataatagtttattcatacaatagttatctataaaaatatactgcaccattaat

SEQ ID NO: 25244 - DNA, 3436 bp, Oryza sativa
  ref <308>: DATABASE ACCESSION NUMBER: AK100686
  ref <309>: DATABASE ENTRY DATE: 2002-08-28
gagagatcccccaacgcttcgcgaatcgcaaatccctctcgcttctctctctctctctctcctcgcgccgccgccgccaccgccggcgccgcggccatgggcgactacggcagcgggatgatgcgggggaacccggacggcggcgggatgcagtcccgcaccaagggccagcgcgtcaacgtgcagcagctcaagctgatggggcagggacacccgacgggcctcacccccaacctgctcaagctcttcgagccccgcccgccgctcgacttcaagccgcccgtcgagaagcgcaagttgccggcctacactgggatggcgcagttcgtgtcgcagtttgcggagcccggtgaccctgagtacgcgccacccgtccccacatgcgagaccaaggctgaaaagaaggataggatccgcaaaagtaagcttgaccaaggtgcggctaaggtggctgaagagcttcagaaatatgacccacagagtgaccccaatgccactggagatccatacaaaacactctttgttgcaagacttaactatgagacgtctgagcatagggtcaagcgggagtttgaagcttatgggcctattaaaagggtaagtacatgtggtaaattccagtgcaggtggacttattcctctttggtaaggtgtttggttgttctaattcatctacaaaaacatgttttaagaaaaagctggttcactgccattatatattgcttacttggaatttcacaacaaggtgctaaaggatgaaagggatatcttctatctctctccgattttcaatgggcagaattgtctgtagtatttgtttctaaatcaaacaaaatgctgtgaagtcttcttttttgtaaagaacaaaaataagttattctgtcaagtctttttttttgcagcaaacaaaaataacttcttgtttttgtcaaacagtattcatagcactctcattttcaagttgggcaatacattcactgttttgtgtgtaagcatgcatttgctgtttgcttctcaataatgatgttggttgcattttgctaaaccaaggagaaaataaccaaataatcttctcaaattatttaaataacacttttatcttgtattgacatgtattggtttgggtggttcggacagtcttttctttgttatccatttctaaacatgtgggctctgttgatgtacttagtggataagtaatatagagctccagcagaaattatgtcttctggtaatttttgttagacatattatctgagttactgttgagcaatttaatgtgcgaatggttggtacaaccattagaagactaaaaaatcctgggaaatacaaatacacacaagcaggtatttttactgcatgcagccttgatgtttttttttcttagaacatcttttcccttttactctcggaaaagatcaaaccatttgcttctgcagtaggcacaatgtatcatttgttttcccattctatgaacttgcttctcgtgtgtattaactggagcaaacaagcttgaagaatgttggcgatggcacaagtaagcttagatcactttatgcttttaaaagcagcttatctgcaggcatggggtttctacattctgggatttattaggttgctggtgagtacagtgtttatgttactttccctgagctgttaaagctagttctgctttcaagtgctgcttctcttggaggaaacaacagcaaaatataatgcaaatgacatctcaacttttagagttgaagatggctccattttctgatgcgtaacagcgtaaggaatagacatcactgacttgctatttgtcacctccatttatgtaaccgttgtctattttgatggtcttaccgacgaaggctgaacgaactatatgcaatggagagggtaaatgggtattgtatttagtccaccaccatcttcttttcttaatctagtaaattccctggtaagggggtatcactgtatttcccacaaacgccaatcagccagactgctttttgcctccaactgtgttgatctgtgctggatttcactcctcgtaatgaaggatctacatatgcaaggttagcacggctgttttaggctttatgcctgtctgtcgtgcagcatagaatatatgctaaaacaaacaaacaattgtaatgacaaccggcaacattcttaagttcagtgcatatttctttttggaaagaccttaatgggtacatttgagctttttgcaggtacggcttgtgaccgacaaggaaacaaataaacctagaggatatgcattcatcgagtatatgcacacccgggacatgaaaaatgcttacaagcaagcagatgggagaaaagtggacaataggagggtgctagttgatgtggagcgtggtagaactgttccaaattggcgtcccaggagattgggtggtggacttggatcaagcagaattggtggtgaaaatgctgaacagaagctctccactagggatcagcagcacgctggacgcccaagatcggaggagcctaggagagatgagcgtcgtgcagatagggaccgcgagaagtctcgtgaaaggccacgggaaagagatcgtgatgagagaactcgtgaacgatcccatgaccgtactcgcgagcgtgattcaaaagaagatagacaccaccatagggatcgggacaggactcgggacagggaacgaggaagggaccgggagagagatcatggtcgtgaccgtgaccgtgagcgtgatcgtcgtgatagagatagggacagggatcgtggtcgggattatgagagagaccgtgaccgtggtcatgatcgccatcgtgagagaggcagggaccgtgagagagattacgagcgtgcaagtcatgaacgggaccgtggtcacatgcatgagagagatgctgaatttgccaacggtgagccaaaacatgatcaggaatatggctataactatgagcaacacaaaagccatgatgcttatgagacggagcgctcaaagcgacatgagcatgagtactatcagatgcaacctaacaacacagaacctgaaggccctgaagagggcgaggcatatgatgaaggtgactaccagtatcaccaagctgctgatgagcacaataactgaaatttgattgctgcactgcttgaacggttgttctaggtgctcgtcattgttgccaaaagaggcagaagcatgtttacttgttgcctggcgcttgagctctgccgctttgcaaggctggatatgtaataccggtgttactgtctgttgttccttttgtggtttgggagttaagatgtttttgcacttccctgcttttgtattgtatgagacgctagaacttgttttggattcatcttttgcttcagtactctgttcagaaaggttttgtaattcgagcacatgaactacagttatttcgtatggaattccaatattgaagt

SEQ ID NO: 25245 - DNA, 1335 bp, Oryza sativa
  ref <308>: DATABASE ACCESSION NUMBER: AK100687
  ref <309>: DATABASE ENTRY DATE: 2002-08-28
gagtgtgttatcagcaacctgtgggaaacaggaaacgacgccggcggcgagatgtctcctccgccaccgccgccgcctccccgcgtggtgatctgcgtgggagacgtccacggctacatctccaagctggagagcctgtgggcgaacctccagtccgcgctcccgcccgacgccttcgccaccgcgctcgtcgtcttcctcggcgactactgcgaccgcgggcccagcacccgcgaggtcatcgacttcctcctcgcgctcccgtcccgccaccccgcgcagcgccacgccttcctctgcggcaaccacgacctcgccttcgccgccttcgtcggggcgctgccgccgccgcccgacggcaccccgttctcgtccacctggggggagtacatccagaacgaggagaacgaggggtggtaccgtggccccggccacgaggggatgcattgccaggggaggagatggggcgggatcatgaaggagaagaggaatcccaagagggggtcatcgtacatgggctccatctacgacgcgcgccctaccttcgagtcctacggcgttgctcatggatccccagatcttgtgaaggctgtacctgaggagcacaaaaaatttctgcgcgaattggtttggatccatgaggaggaaaatgtacccattgatactaacgaaggacagattatttgtaagcttattgcggttcatgctggcctggagaggtcgattgatttgaatgaacagtttagaattttgagaactaaagatacaaagatatcaaaggttgcaatgctaagcgggaggcaggacgtttggaacataccaaaggatctggctggcaagcagaccatcgttgtaagtggacaccatgggaagctccacattgatggcctccgattcgtcatcgatgaaggtggcggatatgcagacagacctatagctgctattgtgtttccttcgaaggaattgatcaggagcacagaaggaacttcatcccagaatcgatccagatatcatcaggagtgccctgatacagccctgcaggtaattccttactgaggccctcacgtcagctactggatgactgataagtgctctatacaacatctgaaggaatttgaattctgaaacacacctagcgtgcttagatcaaaacaagaaatctcacatgtaaattactgccgtttcctttctatggctgtaccactatataccttgagaccgcaagtccgcaactacgaagataactcattttccccttccttgttgccatgaacagaacagattatatgattctcctgccttttctgttgagaggaaaatgacctggccttttgg

SEQ ID NO: 25246 - DNA, 3417 bp, Oryza sativa
  ref <308>: DATABASE ACCESSION NUMBER: AK100688
  ref <309>: DATABASE ENTRY DATE: 2002-08-28
taatcccaatcaatccctctctccatctggtgctctctatctgaggaatccgaatccgatcaggggaggcgaggcgcggcggtgatcggcgatgacggacacgacggatgacatcgcggaggggatatcattccaggcgttcgaggacgactgccggctgctgggcagcctcctccacgacgtcctcctccgcgagctcggcccccgcttcatccacctcctcgagcgcatcaccatcctcgcccagagcgccgtcaacatgcgctccgccggggtggaggacaccgccgtcgtcgtcgagaagcagctcggcgccgagctggccgccatgtcgctcgaggactcgctctgcctcgcccgcgccttctcccaccacctcaacctcatgaccatcgccgacacttaccacagggttcgtaaagcacgcaatttcgccgacctgtcgaaatcatgtgatgatacatttgccaaattgattcaaagtggtgttagcccggaagaactctatgacactgtatgcaagcaggaggttgaaattgttctgacagctcatccaactcaaatcaatcggcggactttgcagtacaaacaccttagaatagctcaccttttggaattcaacgaacgtgctgatcttagcctcgaggataaagaaattctaattgaagatctggtaagagaaatcacggcaatatggcagactgatgagttgaggcgccataaacctacacctgttgacgaagctagagctggccttcatattgttgagcaatcgctctggaaagcaataccacactatcttcgccgtgttagcaatgctctaaagaagaacactggcaagccacttccgctcacctgcacaccaatcaaattcggttcatggatgggtggtgaccgtgatgggaatcctaatgtcacagcaaaagttactagggatgtttccattttgtcccaatggatggcaattgatctgtacatccgggaactagacactctaagctttgagctatcaattaacagatgcagcgagaagcttgcaaacttagcaaatgacatcctgctcaaagaatcagcatcagaggaccagaagaccaatacctggaatcaaactggaccccagaacaatctaaagcttcagcacagcttggcccttcctgcacagcttccttctggtgctgatcttccatcatgtacagaatgcaacgatggggaatctcaaatcagaatgtcaaaacttccagggaatccaaagcataagttggctctaaacataacagaaaaacgtgaagacagtccattgccgtctcctagtcatcgcccgatgggtcgaactccaagtggagatcaactaaggaagatgttcacagaatcccaaattggtcgatcgagcttccggaaacttctagaaccaagcatatcagagagaccagggagtactccttatagagttgtccttggtgatgtgaaagaaaagctgatgaacacacggagacgactcgagcttcttcttgaggatctaccatgtgatcgtgatacttcagaatattatgatacatcggataaacttttggagcccttgcttttgtgttatcaatcactgcaatcatgtggatctagtgtgcttgcggatggccggttagcagatttgattcgacgggttgcaacctttggtatggtgttaatgaagcttgatgtacggcaggaatcaggccggcatacggaaacacttgatgccatcacatcttacctggatcttggtgtttatagtgagtgggatgaacaaaagaaactggatttcttgactagagagctgaaagggaagcgccctcttgtccccccatacatacaggttactgctgatgtgcaagaagttcttgatacattccgtgttgctgcagagttaggaagcgatgcacttggagcatatgtgatttcaatggcctcaaatgcaagcgatgtcctagcggttgaactgttgcagaaggacgcaagacttacagtcagcggggacctaggaaggccatgtcctggtggaacgttgagagttgttccactgtttgagacggtgaatgatctgcgagaagccggcccagcgatcagaaagttactgtccatcgactggtacagagaccacatcatcaagaaccataacgggcaccaagaggtgatggtgggctactctgattccggcaaggacgccggccgtttcaccgcggcatgggagctatacaaggctcaggaagatgtggtggccgcgtgcaacgcgttcggcatcaaggttacgctcttccatggccgcggcgggagcatcggccgcggcggcgggccgacctatctcgccattcagtcgcagccacccggctcagtgatgggaactcttcggtcgacggagcaaggggagatggtgcaggccaagttcgggctgccgcagacgtctgtccggcagctggagatatacacgacggcggtgctgctggcgacgctgcggccgccgcagccgccgcgggacgacaagtggcggggggtgatggaggagatatcgcgggtgagctgcgcgcagtaccggagcacggtgtacgagaacccggagttcatcaagtacttccaggaggcgacgccgcaggcggagctgggctacctcaacatcggcagccgccccgcgaagcgcaggaccacgccggggatctccaaccttcgcgccatcccctgggtgttcgcgtggacgcagacgcggctggtgctcccggcgtggctcggcgtggggcgcggcctccaggacgcctgcgacaagggccacacccacgagctccgcgccatgtacgaggagtggcccttcttccagtccacggtggacctcatcgagatggtggtggccaaggcggacgcgcccatggccaagcactacgacgacgtgctggtgcacgacgcggggcggcggacgctcggggcggagctccggcaggagctggcgcggacggagaactgcgtgctggcggtgagcggtcacaagaagctgtccgccaacaaccgcagcctgcggaagctgatcgacagcaggctcacgtacctcaaccccatgaacatgctccaggtcgaggtcctccgtcgcctccgccaggacgacgacaaccgcaagctccgcgacgcgctgctcatcaccatcaacggcattgccgccggcatgcgcaacaccggctgactcctcttccctcctctcctctgcaaattaacttatatttcttgcaactatatttccgtctgaactaattaccggagtttttttttctcgttcaattttccctcaaaataagaaagaaaccttgcatgtagcattttcacattggattggatatgtacattgcatggagaatgaaatagcattatagactatagtggtgtggattgatgtatgtagtc

SEQ ID NO: 25247 - DNA, 3206 bp, Oryza sativa
  ref <308>: DATABASE ACCESSION NUMBER: AK100689
  ref <309>: DATABASE ENTRY DATE: 2002-08-28
gccttcttccgcgagcgcctccacggccttcgccctcgccacggccagcctctccagtagcttccccccttcctccgactccatcaccagcctcaccttcgcctccacctcctccgcgctcaccatctcctcgtcgtagccatcgatcaccacgcccaccttcatctcctccacgatgaacaccttgttcatcctctgctccgcgtacagcggccagcacagcagcggcacccccgccgtgatcccctccagcgtcgagttccacccgcagtgcgtgacgaacgcggccgtcgccgcgtggcgtagcaccttggcctgcggcgcccatgacttgaccaccattcctttgtccgccgtcctctccaagaacccctcggggagcagcgccgccaggtctggctccggcagatgctcgagcagattggccggatcctgacgcgggctccgcaccacccacaggaaccggtggccggagctctcgagcccgcgcgctatctccttcagctgcgccgccgagaaggagcccatgctgccgaagcagaggaacaccacgctccgcgccggctgcgcgtccagccacgcgaggcacgcgtgccgcacccctcctccctcctcctcgcctgacgccaccagcggaccgacgcagtacaccggcggggtggggcggtccggggagcaagctccctcccggagcgcacccatggccctcgcttcaagccactcgtacgtgttgagcagcacgccgctcgcctccatggcgcgcgcgtacagcttgacccgcgccttgtaaaaccgaccctctctgtcctgcacgagggacggcatgtccgatgccggtatcggcgggacgccggggaaacggaggagcgccttgcccatgtctctgaggttggtggtagtcgtggagtagtggtgcatcaggcctagggaggcggcaaaggcgcccgcggccgaggtgaagtatatgtaggcggggacgtggagcgccgccgcggcgtcgactgcctcggcgcagaatatgtcgaggacaagcgccgcgacggaggggatcgatcggaggagcgacgcgagggagggcaccgaccggcggagcacgtcgagcatgagcaagagggggttcggatcggggtcggcgcaggacggcggcggcgggaggtggtggaaggtgatggaggggttggaggcggcgatgccggcgatggtgggggatcccgtggtgcccgatccgggggtggccgggacggcgatggtgacgtcgaggccgcgggtgaggaagagcttggcgagctcgaccatggggagcaggtgacccgcgcccatggcggcgtatagcacgacgttgcggctgggcttggactccattagctcaggactcaggagctctcactttcatcgtcctttggaagagagatctcagttgcggtgtggtcactgctacgaaggcgggaaccatttccgtctcccggtgacgaaggcgggaaatttgctgggtaaggctatatttactccgtgtgcgtccacttcggtgtgcgtgaccgcaccatttgcgtcgcggcctcgcctcggcttctccgtcccgcccgcgcaagcagcgcccgcctcctgttcgacggaatggcacagtgggacgcgctcgtggacgccgcgcttgcaaggctggcgtcgaggaacctcctgcgagccacgcgtcccatcgccctcgcgccacctccagcgccgcctgaaaccttcgccggccctggcccatgggaccgcgccgccgtcgagatccagctcgatcgcgcaaccctccaccaatggctcgccgaaggtggtgaagcgactggccaagaagaggaggtggatgagaaactcattctattctccgggaatgattacatgggcctcagctcccatccggcaatccgcaaggctgcagtgaagctcaagagtacggcatgggacctaggggctctgccttgatatgtggctatactacttatcacaaattggtggaggaatctttggcagagttgaagaaaaaggaggattgccttctttgcccaacaggattttctgccaacatggctgtgatgactgctctgggaagtgtgagctctattttgtctgttgggagaaaacctgcagagggtgagagaattgcagttttctcggatgctctcaaccatgcttctatcattgatggaattcgccttgttgagcgacagcaagaagtagtagcatttgtctacaagcactgtgacatgcatcatcttgatttcctactgtccagttgctcaattgaaaagaaagttgttgtcacagatagcctgtttagcatggatggtgattttgctccattaccagaacttgtcaaattacgcagaaagtatgggtttttgttggtcatcgacgatgcacatggaacacttgtttgtggcgagaatggtggtggtgcacccgagctgtttggatgcgaaaatgacattgacataagcgttggtaccctaagtaaggctgctggctgccagggtggttttatagtttgcagcaaccgatggaagaggctaattcaatcgcgtggccgctcattcatattttcaactgctttgccagttccagtagttgcctctgtgtatgctgctctccatgtctcaaagaaggagagatggcggagatcagtgatctggaggcatgtgcagtattttgcttctttgaccaaactcgacttaactagtcccataatttccatagtagttggaagcgaagaagcagcacttagggctggcaggcatatgctaagatctggatttcatgttacaccaattcgaccacccacagtaccacaaaactcgtgcaggttgcgaataactctaagcgcttctcattccttggatgacatcaaaaggctggtagatgcactatcaccctggcttcctgacaaacatgatgagcagacatatgttatggcgtcaaaactttaagcaagtccatcggagaattcagtttcaatatctgatgccctgctagttgatatgaggaaaaggggataagttgattctagttgacgcgattatttgcatatatccatttatttatgtttgtatgattgtatcaccacgatgtgaaacataatttatatgatctcctgatgccctacaagttgggtaaaggaatttaaaaagtattattttatgacctttgctatctataaagaattaagtcgc

SEQ ID NO: 25248 - DNA, 2107 bp, Oryza sativa
  ref <308>: DATABASE ACCESSION NUMBER: AK100690
  ref <309>: DATABASE ENTRY DATE: 2002-08-28
ggccctttcattgcccaaccaacgctcgcctgcatagaagaagctcttcgccttctttgctgtgctcttgttgcctctcgctcgctgctgcggctactcattgatcctgatggaatccgcagaggcagaaccaacaaacaaaagcgtcattcagggaacccatgaactaaccgtatgccagacgacggagagactcgacacatggaagctgaatgagcagcagcaacaattggtcgatgcaagcgggctcggcaacctgatacacacagcaggcctagtcatcgatcgcatcgcgctcatggcattcttcgaactgtggagcaaggagaccaacactgctcagctcaatggctttgaaatggcaccctcactcagggacgccgcctacatactggggattccggtgacaggccgtgtggtgacaaccggagctgtgctcaacaagtcggtcgaagacctctgcttccagtatctggggcaagtgcctgattgcagggactgcaggggcagccatgtgaagctctcttggctgcaatccaagtttagccggatcccggaacgccccaccaatgatcagaccatgtatggcaccagggcatatctcctgttcttgattggatcagccttacttccagagagggacaggggctatgtctcaccaaagtatttgccacttctgtcagactttgacaaggtacaggaatatgcttggggtgctgctgctcttgctcatctctacaaggctctctccatcgccgtggcccattctgccagaaaaaggctattcggtagcgcggctttgctcatgggctggatatatgagtatattccggcattgcgccctgacatgtatgatcctccagaacacatcttcccacgagtactcaagtggacagggagcacgatctctcaaccggccaagaacgtttcagacatcaggaaagccttcggcctgcttcaagtttctgatgtcaactgggagccctacaagggcgttgatcctgcatccattccgaagcattgcgctgctccggataacctctgcttctccagaacatggctggtcagcttcaacctcaaggaaatctacgccccggaccggttcgctcgccagtttgggcaagaacagcatcgcccgctcaacgatgtccccgcgttccagcggcagctgtggaacccggcagtggactggagcctgatgtacgcttcagagatcgaacggttccagcagctgatcaacgctgcagatggtggtgatcatggtcatacagcagatgccgccgccgccgccgccgcagatgttttcactccggcgaccatggcgcgagcttcccttgggctcagcctgatatccgtggtggagggcgtcagggaggagctcccgaccgtcgcgcggtttctggagcaacaccgcctccccgccgagctggcgacgtccctgtccaggatccgtggtctcatcgaggcctcccctcctgctccgccgcttaagcgaggcgacgccgcgccacagccccagccccaggtgatcgcggtgatccctcccctggctgtgatgccaccgcgcgagcaggaagcgccgcatggcacgggggacgcggaggctccggggatcgtgcgcggcgacgccgacgacgacgacgccgtgccgccgaaggagcggtctgatgagcagcagcagcaggatgaggaggaggaggaggaggaggagcagaagtggcggcggcggcggcggcgggaggaggaggacggggcggcgaagggatcaggcggcggcggcggcgcggtgcggcggagcagccggagctgcgtgcaggcgaagaggttcaggcgcgtgggagggaagggctcgcagtcgtccgaccccatcgtgctgtgaatctgcggccgctgctctcatcagctttgctactagcctaccagtagtgctacctttgcagtgaactacggttgtgttcggtgtccatgtgtcatgtgtgttaggcttaggcagacggtcgaagagctctggtactggtacttactcctatgtatgtcgttgatcgttgaattcaggttatgtagcatttgatttgactactatggatttgatgactacgctagattt

SEQ ID NO: 25249 - DNA, 2522 bp, Oryza sativa
  ref <308>: DATABASE ACCESSION NUMBER: AK100691
  ref <309>: DATABASE ENTRY DATE: 2002-08-28
gactactagcggacacaaagccccactaaagtattcattcgttcacaattcacaagccgtcaagcactgtgccattatccccaataagtagtactccaccacgccttctctcttcttcctctcctctcctctcctccgcttcacctccgtttctttcatcgtctatctctttctccccaacacagcgggcgaaccaaatccgtcgtctcgccggggtccgggaccacctcgtcgcatgcgcgctgggtcgtagacttggccgccggcgatcgccggagttggggagcgcggcggcggcggttccgctctcgccggagcgaggggtgggtggaggatggcggcgggagggaaggggtgggtggagagggcgcggcgcggggtgaagacggcgtggttcatggtggccatggtggcgtcgctgctgatggcgtcggcgccggcgctggtggccgccggcgacgtggccgtcgcgctgtggctcgaggtgcggctcgggtgcctccgctgccacggcctgcgcggccacctcgagcgttacggcttccggagctcgctcgtggacataccgcttgtctccatcgctcgatccgtcgtcattacctgtgtatacctcatgtctgatgcttctgggctctcccatggcccgtaccttggaacagcaacttgctgttccctggcttctctgctcatcttgttgattaaggccagcgtttacagtccggcgcaggagattgggcctgagctctcgccgtcattggcggatcacaagctcagtctcaagaagctatcgggaatgccggtgcttttcctgtcctccttggtctttgctcttggccatgttgttgtcgcttacaggacaagctgcagggctcggcggaagctgcttatccatggcattgaccctgaatctattctggcatacaagaatgcatatcctggatgctacaagactcctcgatctcccacaccatacagtggaaaattttattctaggagtgacagtgagacgaagagaaaatctgttgctcacgacgatagggatattccaatcagtttccttgcagacggtgatagcatgttcattgcttgccaggggatcactgtgcattacaaactttccgatccatcgagttgcatatcttcagctacagacacttttccagaaatccatcatgatgttatttcagcaagcatttctcctagaagacagagacatgatagcccaccatcagcctccactaatacccgtcgtcttttgaataggagcttcagccatcaataccatcagacatcgctatatgcaccattgttggtagagccagtgacctctccaactttgtcggatgacacccctgttcttagtgttgatgatggcagtgctgatgtatgtttgaaacctatgggatttgatcttgaggctggagaacaggggaaatttgctgttgttttggtgcatgggtttggaggtggggtgttctcatggagacacgttacaaatttgctttctcgtcaagtgggttgcactgtgctggccttcgatcgccctggatgggggttaacatctcgacctcgcagaaaggattgggaagacaaaaatctaccaaatccatatgagcttggatctcaggttgatcttcttatttcattttgctcggacatgggcttacgctctgtggttttagttggtcatgatgatgggggcctgcttgccctaaaagctgcagaaaagttgcgagcatctggagattcaagaaaggttgaagtgaagggagttgtgcttataggtgtaagcttatcaagagaagtcattcctgcatttgctcgtatactcctgcatacccctctaaggaaaaagcacatggtacggccactgttacgtactgaaatcactcaggtgatcaatagacgtgcatggtttgatgctaccaagttaacaacagatgttctgaacctctacaaggctccactatttgttgaaggctgggatgaagctctccatgaagtaggacgtctttctttctcgactgtcctatcatcaaaaagagcagcagatttactaagatcagtggaagacctccctgttctggttgtagcaggctctgaggatgctcttgtttcttcgaagtcaacgcaagtaatggcttcaaggcttgtaaattctaggctggtaacgatatcaaattgtgggcatttgccacatgaggagtgtcccaaggcattgctttcggctctttctccattcatatcaggactggtgtcatcagatgattcattgcaaagattgtagcatactagttcttttcgttttgccttttgccctgtctttctgtcctctacactgagtagatctctctagttggtgtgagtttgtgtgagccaatgtagtgcagtagtggagcctgacccaaaatctcaagggttcctagagctcctctaattttttgccccatataatgatacctccgaatgatttcaattaagcaagttgaatctgtacagcacaggcttgctgtgttcagttc

SEQ ID NO: 25250 - DNA, 587 bp, Oryza sativa
  ref <308>: DATABASE ACCESSION NUMBER: AK100692
  ref <309>: DATABASE ENTRY DATE: 2002-08-28
gaaagaaaaactagtaaacaacgcacacgaaaagaaatcaaagcaatggcttctcgatggatccgtcctgaggtgtacccgctgttcgcgaccaccggcgtggccgtggggatctgcgcgatgcagctggtgcgaaacatcaccaccaacccggaagtgagggtgacgaaggagaacagggcggctggcgtgctggagaacttcgacgaggggaagaggtactcccagcatggcgtgaggaggttctggctctccaagcgccgcgactacatgcaggccctggacaaccccaccaacccctcaaccaaaaaaatagacgcaaaagtcatacttattcgatgggtacatatatatatatatatcgatttgattctcggcttcaaaatgcctatatataaatgaatgaatcgacaataagttttcaacatggggaatatccatgttaggacttgctactttacatatttgtccatatatctgtctgtttctctaggaatgatcatttccactgtaattccttttattttcaaaaggtaaaaaaaaaaagaaatacactgctagctaactaatattgttctgttctgctg

SEQ ID NO: 25251 - DNA, 1359 bp, Oryza sativa
  ref <308>: DATABASE ACCESSION NUMBER: AK100693
  ref <309>: DATABASE ENTRY DATE: 2002-08-28
gggcggtggccccgggccccggctgggctccgcctccccgacgcttccctgcagccgcggcgctcccctccggttcggaccccctcccctctcgctctcccgccaagcagttgcgtgtggttagctggggcctctctctctcgcgtggaaactgaatctgcagcggggttggggtttcctgaatcctgaatcctttggtttccttggtttgtccgtttggggtttggggctgcgaacttgccatcatttgtgcacattatgttcgtagcttttcatccttttgtaacataggattactacgaggcctctactcataagtcaatttgagatggcatatgtatccctatgcggctatgccccgtatccttcaagtccaaccattggatgtaattttatgtttgccgtcaagagcccatacgccattgtgcgactgtcccattctctctcaatatatgtgcctatgatggatagtgcaaattgcagtatcagagacacatgctcacacatggatgggctccatgtgtttcaataaagtcatgcagctcccaggaggtgtaccattaagttttttgtaaacagcacaattatctgatgtgatccaacacagcatcaatatcaatacagtatgttggaggagaatcttgcttgcattggagtatgcgtagagatcgtctgtcatggattttacttgtgtttctaggctcttgcaggctctatgataacattttggatattctgcatcgccttctatgcttggagctatcaattacaaaagggaaatgaaggagaaacatggattggttcccgggacaagacatgtgagtcattcaagcgttgctggagaagaacatgggcttgcactgaggcacagcctgcagaaacaggggacagacgcaaatgcctccacatttcttcgtcaaccaagcgctcatggatcacaggaaaaatgcacatacatgtggagcgtgcggcatccacccggccatgtcacatactcgatcccttcactatttatgtatgggaagagctagtttagttttctccaactacttcatggagtaattacatgtgtcattcggataatagagaatatggaacatgacagcaaagttagtgagctgacggttcagtagagaatatggaacgtgacagcaaagctagtgagctgatggttccaagctaggtgatgatttcgtctctgttttaaaaaaatatgttggaatattatgtctagagatcggcacatgtttttttttttccatctcctttttgggtcattttctgtaaaataacattgtttgtccactcattgggagcaagcggaatgcatgcatcatttaaaattcaacatttttcagg

SEQ ID NO: 25252 - DNA, 2924 bp, Oryza sativa
  ref <308>: DATABASE ACCESSION NUMBER: AK100694
  ref <309>: DATABASE ENTRY DATE: 2002-08-28
aagttctacatttcacatctcttcattttctttggctcttcagagttttgtccatctctatcttcagagttcttcagagtttgcttaccatatgatcgtgatcaggtaattctcaaaatcggagagatttacaaggacacaatagcgatataagtatgactccctcggagctctaattatatagcacaaggatgattcaggactcatccaccatataactataactctctcagggctcaaatcatatagcacaaaaaggattcagaactcatccataaacagtgacgatgacccgcaaccactgcgagaaaaccttgaccacggacaacgtcagagattttagccacaggataacaaactcacaggaaatggaaggaaagtgagaaatatctgcagccgccgtcagcctcaggcctcagccgctggcaaacgcaccgcatcagcagcagcagcagcagcagccatcccaagcgagagagctttgctttcgcgagtcgcgcgactccgccaggacaggaaaaaaccggaaaaaaaaaccccgcaataaaatttccccaacttccgctttttccttgcctctccccaccacaccacaccaccccatctcccatctcaccatccccctttcccaccctcccgtgcgaacacacccgcggcgcggagcccagatcgggatcgcgacggatcggcggcggcggcggcgatgggaggcgaggcgggggagcggcggctggggagggcgatgagcttcgggatcccggacgtggcgctggggctggtgatggggttcgtggaggacccctgggaccgggacgccatctcgctcgtgtgccgccactggtgcagggtcgacgcgctcagccgcaagcacgtcaccgtcgccatggcgtactccaccacgcccgaccggctgttcaggcggttcccctgcctcgagtcgctcaagctcaaggccaagccccgggcggccatgttcaacctcatccccgaggactggggcggctccgcctcgccgtggatccgccagctctcggcctcgttccacttcctcaaggcgctccacctccgcaggatgatcgtgtccgacgacgacctcgacgtcctcgtccgcgccaaggcgcacatgctctcctcgttcaagcttgaccgctgctctggcttctcaacatcctccctcgccctcgtcgcccgcacctgcaagaaacttgaaacgttattcctggaggatagcataattgctgagaaagaaaatgacgaatggattcgggagcttgctaccaacaatagtgtccttgagacactgaatttctttttgacagatctcagggcatccccagcatatcttaccctccttgtgcgcaattgtcgaaggctgaaagttttgaagattagtgagtgcttcatgcttgacctggttgatttgttccgtacagcagaaatattacaagactttgccggtggttcctttgatgatcagggtcaagttgaagagagtagaaattatgaaaactactatttccctccttcattgctccgcttgagtttgctctacatgggaacaaaagagatgcaagtgctatttccatatggtgctgcactcaagaagttggatcttcaattcacattcctttccacagaggatcactgtcagctggtccagcgctgcccaaatctggaaatcttagaggtgagggatgtcataggggatcgtgggttagaagttgttgcacaaacctgcaagaaattacagagacttcgagtagagagaggagatgatgatcaaggaggtcttgaggatgaacatggtatggttacacaggtggggttgatggctgtagctcaaggctgccctcatttagaatactgggcagtgcatgtcactgacattacaaatgctgctctagaagccatcggtacatacagcagcagtcttaacgatttccggcttgtcctgcttgatagagaagcaaatataacagaatcaccccttgacaatggggtgcgtgctttactgagaggctgcaccaagctccggaggttcgcattttatgtaagacctggggctctatcagatgttggccttgggtacattggtgaatttagtaagacaatccgttacatgttacttgggaatgttggggagtctgaccaaggactgcttcaactctcaacaggatgcccaagcttgcagaaattggagctgaggggttgtttcttcagtgaacgtgcattggctgttgctgttttacaacttaaatcactgagatacctatgggtgcaaggatacaaggcatctcccaatggcactgatctaatggcaatggtgcgacccttctggaacattgagattattgccccgaatcaagatgaagtttgcccggacggtcaggcacagattcttgcatattactcacttgcaggaatgagatcagattaccctcactcagtaattcccctctatccttcggtttgagtgtatatgtctgataccaggttgcgaaactcacactctagtataggccgatattgttccaaattctacagtttgctgctcttattctgtttagcaatgagcacagaacaaatgacaaataaaagcaggatagctgttagttcgaggaacatattataacatcttgggactaagaattttattgcatatctgaggggtatcacttctgcgaaagctcagctcaattggccagcacggatatgtaaacttctccattttgattaggatcggacacacaattttgtaataatgttccttgttcaatgtttagtagtattatttgactctttagctttgtgtcacattgtctcttggaagatcgccgcactgtgttctaataagtcattcgctgtacaatatttttatcatccacagatcacactactggctgtattcttgctgtgacttttct

SEQ ID NO: 25253 - DNA, 1734 bp, Oryza sativa
  ref <308>: DATABASE ACCESSION NUMBER: AK100695
  ref <309>: DATABASE ENTRY DATE: 2002-08-28
ggtcttatcccaattctctcttcttcttcctcgcatccatagctaccgatcaggggcagaatttcctgctgattttcttggaggatttgtgattttgaggtcgcatcgcgtcgccatggacccgtgcccgttcgtgcgggtgctggttggcaacctggcgctgagaatgccggtggcgccgccggcggcgggtgcgggggcgggggtccacccgtcgaccgcgccgtgctactgcaagatccggctcgggaggatgccgtggcaggtcgccgcggcgccgctggtggttgccgatggtggggagcaggcgccgtcgggggcgctggccgccgcgttccatctgtccaaggcggatttggagtggttcgcgcggaagccgtcgctgctgttctcgtcgtcgtcgtcgtctcgcgggccggcgacgctgaaggtggcggtgtacgccgggaggaaggggacgacgtgcggtgttagctctgggcggttgattgggaaggctaccattccggtggatctcaagggcgccgaggcgaaggccgcggtggtgcatagcggctggatctgtgttgggaagaagagcggcggcaagggcggctccgcggcggcggagctcagcctcaccgtgcgcgcggagcccgatccgaggttcgtgttcgagttcgacggcgagccggagtgcagcccgcaggtgctgcaggtgaggggaagcatgaagcagccgatgttcacctgcaagttcgggtgccgcagcaacagcgacctgcggagatcggtggttcagacggagcgggacgccgccgccgccgccgggaaggagcggaaggggtggtcggtgacggtgcacgacctgtcggggtcccccgtggcgctggcgtcgatggtgacgccgttcgtggcgtcgccggggacggaccgggtgagccgctccaacccgggcgcgtggctcatcctccgccccgccggcgacgggtcgtgggagccatggggccgcctcgagtgctggcgagagcgcggcggcgcgggcgcctccaacagcctcggctaccgcttcgacctcctcctcccgggcgtcgaccacgccgtccccttggcggagtcctccatcgccgcttccaagggcggcaagttcgccatcgacctcacctcgatgcagccccagagccggggcggcacgcggggtgcagcccgcggggcagcggcgacttcagccagtggccgctcgccagctacaactaccgcggcttcgtgatgtcctcctccgtccagggcgaggggcggtgcagcaagcccacggtggaggtcggcgtcccgcacgtcggctgcgccgaggacgcggccgcgttcgtggcgctcgccgccgcggtcgacctcagcatggacgcgtgcaggctgttctcccacaagctcaggaaggagctctcccacctgcgctccgacgtgctcaggtgaccaccgctcgccgccggtgagcttcccgcggctcacgagcaaaattgtacataagtagttgagactcttttgacacgagatgttctttagttggttcgttggtgtgttagtgttagtagtggtagttcagttttggtgatcagttggttgagttttagatagatctctctctctctcttttatcccctgcgagtgtgcttgtgttcttttggattggctactttacttcaagccaatctcggtaacttcctttcagatgtctataattgggagaaatttgtgacc

SEQ ID NO: 25254 - DNA, 2807 bp, Oryza sativa
  ref <308>: DATABASE ACCESSION NUMBER: AK100696
  ref <309>: DATABASE ENTRY DATE: 2002-08-28
tttttttccccgtttccttcggatcgcgcgcggccactccaccggactccccgagctcgctagctcctccggccacccatgtcgctggcgccgccggccgccagggtgcacctgcaggaggtggcggtcaatgtcaacaagagcctcttctgcttcgaccacgactccggcgccacctcctccggcgtcttcgccggcgacgaccccctcaagttctacttccccctcttcctctaccacgtctgcaccgtcttcgccctctcccgcgccatcaacgccctcctccgccgcgccaacgtccccctcgtcatctcccagatcctcgccggcacgcttcttggcccgtcgttcctcggccacatcgcgccgcgcgtcggcgagctgttcgcgacgccggaggggtgggtgctcatcaacacgatcggcggctacgccttcacgctccacatcttcgtcatcggcgtcaagacggacctgggcatgatccgcaagtccggcaataaggcgatcgccatcgccgtgctcggcaccgcctcgccgcacctcgccatgtacatcaccggcctcgcgctcaaggcgcgggtgccggcggcgtgggcggcgtcgttcctcctcacaaacctcaactcgtggtggtcgctctcggcgttcatcgtcgtgtgctgcacgctgcacgacctcaacctgctgtcgtccaagctcggccgcctcgccatgtccgcggcgctcatcggcgacttcgccaacaccttcgccatcgccggcgtcacctcctacctcctcgcggcgagcccttcggagaagctgcagcggatcggcatcgcctccgtgatcgccttcacgacgttcatcgcgttcatggcgctcgtggcgcggccggcgatcctgcggctgatccgcgacgtgccggagggcgccctcctcaccgaggcgcgcctcatcgccgtgctgctcatctgcctcacctgcagcttcaccggcgagctcctcggcctgcacgccacgtacggcccgttcatgctcggcctgatgctccccggcggcgcgccgctcggggtgaccatggcggagcggctggaccggctcgtcgccggcgtgctgatgccgctgctgttcgcgcagggggggatgcggctgaacgtgaaaaagatcaccgacgcctcgacgtgcgccctcctcgagacgttcctcgtcgtcggcgtcgtctccaagttcgtcgcctccatcatgccgtgcctctacttccggatgcccgtccgcgacgccgtcgtcgtggggctcatgatgaacttcaagggcatcacggaggtggtgtacgcgtcggcgttcgaggacgcccaggtgctcgacgagcaggtgtacgcggcgttcatgatcaacgtgctgctgatcggcgccgcgtcggcgtcggcggtgaagtacatgtaccacccggaggagaagtacgtggcgtaccggcggcggacggtggagcacaagaagctcggcgaggagctgcgcgtggtggcgtgcatccactcgcaggacgacgtcgggccgatgctggcgctactcgacgcgtcgtcgccgacgccgatgtcgccgctctccgtctatctcctccacctcatgccgctcgccggcctgaccagctccgtgctccggcacttcaagcacggcaagcgcaactgcgtgccgtcggggaccaccgactcggagcgcgtcgtgaacgcgttccagttcttcgtgcagcagcggccgccgggcgcggcgtcgctggtcccctacgtgtgcatcgcgccgtacgccaccatgcacgacgacgtgtgcgccgtggcgctcgagaagcgcgccatgctcatcgtcgtgcccttccacaagcgcctcgccatcgacgggtccgtcgagccgacgtcgcacaacgccggcgcgatccaggcggccaacaccaacatcctcaactactccccctgctccgtcgccatcctcgtcgaccgcggcagcctctccaccgtcgccgccgccgccgccgcggccgacgggttcccgcaccgcgtcgcgctctacttcctcggcggcccggacgaccgggaggcgctggcgctggcggcgaccatggccgaggacgcgacgatcgggctcaccgtgttccggttcatgctgccagcggacaggcagagccgcggcggcgagggcgacggcgaggaggaccgccgcgacgaggcggagctgcaggagttcgtccggcggtgggtcgacgaccaccgcgtcgcctacagcgagaacatggtcggtggctccgacgagatggtggacgtcatccggaagacgagcccggcgttcaacctgctggtcgtcggccggcgatcggagagcccggagtcgccgctgacggccggcatatcggactggagcgagcacctggagctcggcgtcctcggcgacctcctgacgtcgacagacttcggatgcagggtgtccacgctggtggtgcagcagcagaccatggcggcggccggagaatcctgccggttgccggagttgcctgcaaagcacaaatcagatgaacctgtctgacaaatcatgacactctttatctctagttgtaagcatattttactgtgttgtaccactaacatcttggcagctagaatgcaatctgtagcaaccatgccttcctagtcttttctatgaacacgctaatatgtttataatctcatgattggatcaacagactaaacagctcagatagcaacaaaaacagatctactagtagagtagtaagtctccaaagagagttaagagcaagtaccattgcttagtccagc

SEQ ID NO: 25255 - DNA, 3015 bp, Oryza sativa
  ref <308>: DATABASE ACCESSION NUMBER: AK100697
  ref <309>: DATABASE ENTRY DATE: 2002-08-28
tgggggcacttggcagttggcaagcgcgcgtcacctactcagcagcctgagccgccgagggagaagacgacgacgaccaccaccaccaccaccatggaggccgcggcggcgaggcccgtcatccgcgtcgccgccatctgcggctccctccgcaaggcctcctacaacggcggcctcctccgcgccgccgcgggggtgtgcgaggagtccatcccgggcctgcgcgtcgaccacgtccacatctccggcctgccgctgctcaacaccgacctcgagaccgccgatggcggattccctcccgccgtcgaggccttccgcgacaaggtccgccaggccgactgcttcctcttcggatcccccgagtacaactactccatcgcaaccccactgaagaatgcacttgattgggcttctagagggcaaaattgctgggcagacaaacctgctgcaattgtcagtgcaggaggtggctttggagggggtagatcacagtaccatcttcgtcaggtcggggtatttttagatcttcacttcatcaacaagccagaactagccgtaaaagcatttgagcagcctccaaagtttgacagtgatggtaatttgattgatgcgcaaatcagagaacggatcaagcaagttctcttaccccttcaggctttcacactcaggctccaaaagaaagattgaaccagtgaagtgatacataatcttgttaatctgcatttctgaagcatggctccttggatattacatattacagcctatttgatggtattttactttcaatcaagcaatgtgtcgtggaaaaaccgaaaattgtaataaacgcttgtggaattgtttcccctgttcatttgaaggtttaatgttttggtcacatctatacaaaatatattaataaagatttatattttacccgttcccctgtactgtaaccacaatgatacatcaagaccacttggtatcaatcatatcatactgtagccaggtgaatattttccctgttatctcgttctcttcgtttagtattgtcactcaaatttgtgaaattggaattcccatgaattaacatctaattaaggatgtctgaatgcaacgagctaattcagaatttcaaagttttctctaactgcatctcttctctgttgtttatgtgtttgtatccgttggttgtttttcttcacattctttgatggcatatcttcatatggttttgcatcaagcgtaagatatccaatctttttcatatggacttatcagaactattttggttttgtatgacttgtttgtgttgcttgttaggttgatcaggaatggatgacagattgacaggcatatgcctcacactgatgttttattgttgataaatgggtgtccatattctgaaccgaggagaagaagcttttgcactaagcagcgcgcgtgcatgcatccaaataatgcatcaggtgagaaagaagcatttcttccaaaaataactgttaagatgagacatataggtgcaagaggtgcgatgttacagtcggacgcctccgtggttctgtgctaatgtggatattattgcgttttggcgtacactggcattaacatatcgggtcatctgcacggcttctatgcatttgctaatactggttgagaaaaaattagtgtatataatgtactcttaatcttttaggtgataatagttaggttgggattctataccttttgccctaggcctctagcacattgcataagtcagtgtgaagcgtgaacgagatgaactaactcaatgtgaaatgaatcttgccaaaattttagcatcaagcaaagcaaaggccaagttttcaatataagctggagacctttgtcaaaaggaaaaatacaaattttgagagtactaaatttgttgggtttctggaaggactattgagctataaaaaggatcccctgagctcccgtttaaggaggtggacaaaagttgatccagacctaatccaaccaaactctgtacctggtatatgtgaatatatgcttgctgtgtgacccttcagtttgctttgtcaacctctcttggacttgcagaaacacgccgtggtgtggacaagcgtggcaggcacgtactacagattaccagccaactttgccgcatgatgtccggaggtagtgccacttgttttttgttgcatggacagcaaaaggtgtttgcaactttgcgtcgacgtatcatgatccctgccactatctccacttcacaaaaatcacaaaatgggagaccacacacaccatggaaaatggctgactcatctattggacatttgggcctacagacccgctcgatcgtcggtggttggtgctcatcgatcaattaagttcgaattggtgcctttcactgtctagagtcagtgttttccaaccaattcagttgacaaaaggccccatttctccggcacctggctcaatccacttgcttgctgaaaaactgagccacttgttttgccaagtgcaatttctctcttctgccggccagactctgaaaccgagttcagacaaaggagcagtattctacaactcaaccattgttttgtgttctcagagtcaagattatgcatgatatatacggcgcgtagacgagctctgtatggtactgcagcacacatacgtcgcaggagttccttcaggctctggactcttctgcattttgagtggatctagttatggacactctgacacctgaaatcaacaatgacatggcaactggcaaaccacaggttgatggagcttcgcttctagaaggcaaaatgttggtaaaccagtgaagatttatacacacacaattcggagttgagaattctgaggtaattagtcatcatttcaaagaaagttgcttttgtgctatgctctgctttctctcggctggctggcgtccaccttgttacttcgcgcagcagcaatattcctcttcccttcaaccatttcgtcttatgtgacgatatttacaagatcgtgaatatatatggcaacaagattttccgc

SEQ ID NO: 25256 - DNA, 2314 bp, Oryza sativa
  ref <308>: DATABASE ACCESSION NUMBER: AK100698
  ref <309>: DATABASE ENTRY DATE: 2002-08-28
gggtggtagtagcattgcctactttcacatacgcgcggcgccgctggtgctggctggctggcgcgcgcaccggcgggcggagagcgaggtttttcgccggtgttttggttggcctccgccgttccgcgcggtggtggtggtggtggttgctgtggtagcgagggtacgctttggagacggagatggagatcggcgccgttgagaacgggggtgtcgtcggtggtgaagttgtggcaggcaagagggggaagacgccgcaaggttggaagtgcatgccattcatcatagcaactgagacatttgaaaaggttgcgacaattggagtggtagcaaatttgacggtctatcttgtgaagcgcttcaacattgggcaaattgaggcagctaatattaccaacatattcttcggtacgcttaactttgcgccattgctaggcgccttcatctccgacgtctacttgggaaggttcaaaacactagcctatggatgcttcgccagcctcctggggatgctgggaatgactttgtatgcatcacttccagctctcaagccaccgatctgccatgaaaaaacccgactaggcggaggctgcaacagtccatcaacactccagctaagtgtgctatacctttctctaggctttctaattatcggtggaggagcgatccggccttgtagcttgccctttggagtagaccagtttgataagaccgacgaagaaggtcgaaagggactaaacagctattataattggtactatggaacaagtactgctgcccttgtgttatctatgattgtcatcatctacatccagaacaatgtcagctggccaataggatttggcatacccacattactcatgtttctcgccattatcatgttatttctgggtaccaacctgtacgtccatgtacaaccagagggaagcatatttgctggaattgcccaggttttagtggcttcatttaaaaagagaaatctcaagcttccttgtcctcatgatataaaccaacaaggattgatgctctacaaccctccttccaagggcaaccgcgtattcagattgccacttacttcccagttcaggtttctgaacaagggtgcaattgtaatgggtgatgatataaatgttgatggttctgcaagaaactcttgggagctttgcaacgtccaacaaatagaggaggtcaaatgcttaataagaattgtgccggtttgtatttctggagtcttatgctttgtcgcattggctcagcaattcacctatataatcttgcaaacatttacaatggactgtcactttgggacgcactttgaaatcccagcaggctctgttgtatccatatcccttattgccctaactctattcatccccatttatgaccggattttagtaccaatagctagaggattcactggagtggaaagtggtattacacttctacagagacagggtataggattggccatttctcccatttcaatggtggtagcaggacttgtcgaacgtaagaggaggaactcagccttgtcgaatggaggaatatcgcctatgtcagtcttgtggcttgcaccccaacttgttttaatgggtattgctgaggccttcaatgcagttggacaaatagaattctacaataagcagtttccagagaacatgcaaaccctagcaggatctctgttcttctgtactatagctggagcaaactacctgagtactgctctggcaaacatcatgagaaaggtcacgaccagagatggtcactcaagctggttaacagacaacattaatcttggcaaactcgactattacttctattttattgcccttatgggagtcctgaaccttatttattttcttatatgctcacacttctaccaatataaggtaatgtcactccattctgaagaatccatcaaaatacctaccaaggaagaagaagccacagagatcgacattgacacagatgcacctagcaaatgaatagtgcaactgcgagtctaattgatctggcacaaggaatatacttttggacatggtgacatattcaaattccaatttcgaattcactttagaagaggctctaatgtttgtaacatcaaacagacctctgtgtcatcttatggatgtgacaaaaacaagtgtaccatagcaagggggtgacatgttatctagcaaacatgaataaagagtttaaatggcctgtcctgttgtattcgaagtaatggagtgtgagtgatagcttatgaaacttaaacaagtccataatggttatgcgacaagtaagcacaggtcatacaccatctttttct

SEQ ID NO: 25257 - DNA, 2570 bp, Oryza sativa
  ref <308>: DATABASE ACCESSION NUMBER: AK100699
  ref <309>: DATABASE ENTRY DATE: 2002-08-28
gcctgctctcctctgcttctcttctcctctcctctcctcaccgggagagtggagaccctcgagatgcccggcggtcgccgcggcggcggcgggcgtcctggctcggcagcagcagcaacggcggaggctccgggtatagttgggttgagaagaagtcgaagaaatcggagaaatcagttggaaagggacaatgcgcaccatgtacttcttcaaatgctgcacctaaacctgctatggcgtggcaagcacggagtggcaatggatctttacaccctcctggaaatggtcgggttcaacattctgatcataggcctgctgccagaggcagtcctaggtcactgccacaaaataagcatacagaaacaaaattgcaagcaccgtgtccagttgtgactgcacctcttgcaaatggtttgcagtgggtacccaagtctcgctcatctggttctgagagcaatatggatgatgctcctacatcaggttctgaccctgaaatggacaatggtgcaacacacccagttgtgactgcaactcttgcaaatggcttgcagtgggtgcccaggtctcgctcatctgactctcaaagcaacaaggatgatgctcctacagctagttctgaccctgaaacggacaatgttgcaccacacccagttgtaagtgcacctgttgcaaatggcttgcagtgggtacccagatctcactcatctggctctgaaatggacaatggtgaggattatgattcatatgacgatgattctgatgatgatatggttgatgataccagtggtgactttgattctaaggcatctgagaaaaattttgagactcgaaaaaggcacaagctgttgaaaagcatttttgaacttctggagaagttaagtgttgaacagataaatgaaaagactaggcaatggcattgtccagcatgcaaaatgtacgtggtggagttacctggtacaaagggttacagcctttgatgaatcatgctagaacaaagggttctaagagggttaagcttcacagagaattggctgcattactggaagaggagctgtatcgtacgggaatttcaatggcatcatctggcgagttctttggaatctggaaaggattgcgagaaaacactgatcgtcctatagtatggcccccagtggttattattatgaacactcgattggaacaagataaggatggcaagtggaaaggtatgggaaacaaagagctccttagttatttcagtaaatatcacgtgaaggaagcatgccatgcttatggcccagatgggcacagtggcatgagtgcgctaatatttgaaggatctgccgtggcctataaggaggcagaacggttgcataatcactttgttgatcaaagaacagacaagtatgcgtggttgaatcataggatcgtcatacctggtgggaaaaggcaactgtatggtttcttagctgaaaaagaagacctggaggcgttcaatagacatcatggaaaagactatttgaaatacgagatgaaatcttataacgagatggtggttacccaattgaagcagatgagtgaagacaaccaacaactgaattatgtgaagaatgagatggttaagacagagcgacattctaaagaagtagaagaagccttgggtgttgagacccagaaacttcagggagcaattgaagataatattattttgaagagaaaaaccaaggagatgctctcagagtgcgtggaacagatggagtttaatgcgaaattttatcatgaacaaattgaaagacttcgcaaggacaccgaggagaaagagaatgagtttgagaggttgctgcaggaggagctagcaagagctatagagtgtgatgttgactctgaaactacagaaaattgcaagctaagggaggaacagatacaaagaatcatagattgccaggtgaaggatgcggaggagtttgatgctgaacaagatgaattgatcaaaacacacgaagagaagaaggcgaacgtcaagatggagtatatggcaaaggatgttgagctcgaggaggagctttatgccgctctcacaagtctgatggagaaacacaagccggacatcttccaaccgtccagcccttgaagagctgcaggcttgcagctcaccatatatatgccctgctcacaataatctcaagaggtccctctcccaaatgaacttcaatttacatgccgataaattgcttgaaatgctcagaaactctcccgagtggcgtctctgggcaattgtgttgcacccccaatttggtgttttgatctgcaatttttatgcatctgcaaaggtcaatttgattgagttgacaagaatacctgttgctcaactcaaagatgatgtgctattcttgtcaaacatataactctacacggttttgatttcacttgcaagtttgtgaaaataaaagtaaaacagatggttttactttgcaagtaaaagaatttcggaactgccaagtccgtccctaatatttctagagattcagaaacatcacatgtttttgggttactgcaagcatggtttgaagtttggacttcattttggaatg

SEQ ID NO: 25258 - DNA, 3125 bp, Oryza sativa
  ref <308>: DATABASE ACCESSION NUMBER: AK100700
  ref <309>: DATABASE ENTRY DATE: 2002-08-28
gatactgtaataaggttctcttgttgtttattatccgttctgttcttgagttcgtcagtcatctgagcaagattttctttgctattccagtcggtgactgcctaagctagttcaagaatggagcaagctggcaagaaatgtgatctttgatgatcacttcctcttcctgatgatgatttggttactttctggtactatcaacacacatcaaagccttgattcctctgttgcttgtacacactgtccttgatcgtagtagaaggagaaggtgaaggaatcatcagagtacagagattaatttcttgcagtacagattgatttgctctgcttctctgctggttcttgctgatcaagaagcatttgatgagagcttctccaatggcgggtgcaagccatcacctggtcgtcttcttggcagcgctgctcgcgttgctcccgggaagctcgcagctgcagtactcgcagacatggacgctgttcaagatccagcagatgctgaaccacccgccggtgctgagccactggcgccggaccaccgacttctgcggcggcggcggcacggcggcgccgtcggcggccgtggtgtgctacggcgacacggtgacgcagctgcacatcgccggcgtccgcggcgcgccgccgctcccgatgaacttctccatcggcgcgctcgtcatggcgctgtcgaggctccccgacctcaaggtgctcacgctgtccgggctcgggctctggggccccctgccggacaagatcggccgcctcgccgcgctggagatcgtcaacatgagcggcaactacctctacggcggcgtccccggcgggctgtcccagctcaccggcctccagacgctgatcctcgacgacaacctgctcgccggcgagctcccggcgtggatcggcgagctgccgcagctggccgtgctgagcctgcggaacaactcgctgggcggcgccgtgccggcgtccgtgggtcgcatggagtcgctgaggtcgctggtgctcgcgtcgaacaacctgacggggaacctgccggacatgagcggcctcaccaacctccaggtgatcgacgtcggcgacaactggctcggcccggcgttcccggcgctggggcggaaggtggtcacggtggtgctcagccggaacaggttcaccggcggcctccccggcgagatcacctccttctacctgctcgagcggctcgacgtgtcgtggaaccgcttcgtcggcccgttcatgccggcgctgctgtccctgccggccatccgctacctcaacgtcgccggcaacaggttcaccggcgtgctctccgacaaggttgcctgcggcgacaatctccagttcgtcgacctgtcctccaacctcctcaccggcagcgagccggcctgcctgaggccggacaagaagccggcgacggtggtgctcgtcaatgccaattgcctcgaggccaccggcggcgacgcgtcgcagcacccgtcgccgttctgccagaaccaagccttggccgtggggataactcacggcggcaaggtgaggaagaagctcacacatcacgccggcttcctcgccggcattgcaatggcggctctcgccgccgcgtcggccatcgccgtcgtcgccgtcgtcgccgtgaggaggaagaacaagaaaggcgtaatggtgaggccaccggcgatgttgggagaagacaattcttcaagcacgagtggctacccatccaagatgttcgccgatgcacgctacatatcacagacagtgaagctgggagctctgggaattccaccatacagaacattttctttggttgagcttgaagctgccactgacaactttgagaactctttgctactggggcaagattctttcggcgagatgtacagggggagactaggcaatggcacactagtggccatcaggagcctgaaggttaagaggaatcagtcttccctaagcttcagtcgccacattgaaacaatttctaggctcagacaccggaacttggtcagcgctctcgggcactgcttcgagtatgatcttgatgattctactgtcactcagctgtacctcgtgttcgaatacgtgcaaaacgggaacctacggagcaggatttcgcaaggaactgaaggaaggaagcttacatgggcacagagaatatcagctgccatcggcatcgccaacggcattcagttcttgcatgctgggatgatgcctggcctgtttggaaacaatctgaagatcaacaacattcttctcgatcagaatcatgtcgcgaagatcagcagctacaatatcccaatcctaggagaggccatgaaatctgagaagggaggacctggaggcaagcaccatactgaaagcccactgctcaacgataaaaccgacatcttcgatttcggggtgatccttcttgagatcgtgtctggaaagccaatcacatccttatatgaggttgagataatgaaagaactgatgctatgggcagtcgccgacgaggatttggtgaggaggaggagctttgccgaccaggaggtgagcaagggatgctctgacgagtcgctgaggacgatcatgcagatctgcctgaggtgcctggccaaggaggctgtgcagcggccgtccatcgaggacgtcctctggaacctgcagttcgctgcacaggtgcaggacgactgggaaggagataaccggagcagcgacggttcaatggtgtcgtcgtcgtcccggatcacgaaatcctccagattccagaatgagcaaaccaggtctgggcgggaaaaagaatgtgaggattcgtcagctcgtggatcagtgtggctgcaggctgcaacagaagatggaaattttgagacaggcaggaggcaagctgaagatgaaagatattgatggaactgatcctccgggttgtgcttctgtcttgatgcacacaaccttcccctttcctgatcgtgtttgctcactgaatcctttaaatctcagaaacgccttcatttgttttttcttcttttctttcttttttgtctttaggcgtacaataatatgtgctttttaggcgtacaaataatgttgtgctgtgcaagcccctgtatcgttctgtcaatattaaagctggaatagtttctactacc

SEQ ID NO: 25259 - DNA, 2244 bp, Oryza sativa
  ref <308>: DATABASE ACCESSION NUMBER: AK100701
  ref <309>: DATABASE ENTRY DATE: 2002-08-28
gtgcgcatgccccgttttttgcgtgcgtgtggtttccaactttggctcgcccctccgggcgcaaacaccacaacacctcgcgcccatgcgaggacgcagccatccatccatccacccagcccccacactccttcggcgcgcgcgtccgtcctcgatcgcgcgcgcgtcgacgagctaagccggcccgggaaacccaaggcccctctcccttcctcaagcgcgccggcgggcctcgccggcgcgcgacattgagctcaacccccccgtcgtagtcgcacgtcgagcgccaccaccaccgccagcgcgtcgcatcgtacgtcctccacgcgcggcgccgtgctaggcaacctcctctgctgatcgcccgcctcctcatgagcgtgtgacctgctgtcgaatggtgcggcggcacctgctgcgcggacacagcctggacaggttcctgccgatcaggagcctcatcatgtcgtccagctcttccttctcgtcgtcgtctccgtcgccgccgccgccgtcgtcgtcgtcgtcacggggaagcagcagcggcaggtggtgcggcgtcagcgtggccgaggaggacgaggacgatgccgccgtctccgcgacgacgaccccgccactgccgccgctgcagaagcgggtgctgtcgaggagccacgggtccaaggccaagccgctgggcggctccgtcgaccacctgccgccggtggtgccgccatcgtcgaagaacgtccgtgacagtggaccgccttcagagattgatctggtgaaggagaagttcgccaagctgctgctcggcgaggacatgtccggcaccggcaaaggtgtctcctccgctcttgctctctccaacgccatcacaaatctcgcagcttcggtattcggggagcagcgccggctcgagcccatgtctgccgaccggagagctcgatggaacaaggagatcgactggctgctgtcggtcaccgaccacatcgtcgagttcgtcccttcgcaacaggcgtccacggatggaaccagcatggaggtgatgggtacccagcagcgcagagatcttctcatcaatatcccggcattgcgaaaactcgacgccatgctccttgagtatcttgacaatttcaaagatgaacaagaattctggtacgtaaaaaaagacgcagatgagggtgaaaagggcgatgcgccaagacagggcgacaagtggtggatccctacagttcgagtccctcccgagggtctgccagatgcgtcgaaaaaaatggattctgcaccagaaaggccttgtagggcaggtgctgaaggcagccatggctatcaatgctgatgttcttacagagatggagatcccgggagagtacattgaaactctgcctaagaatggaaggtctagtcttggagactcgatatacaaaattataactgatgatcatttcgatcccaatgagctcttaagttctgtagacttgtcgacagagcacaagatcgtcgatctcaaagaccgaattgaggcctccgttgtaatttggcagaggaaagtttccaataagctttcctggggccccggtgttagcttggagaagcgagagcagtttgaagagcgggcgcaaactgtcctactcatcctcaagcaccagttccctggggttcctcagtcatcacttgacatcagcaagatacaatacaacaaggatgttgggtatgccatcttggagagctactccaggactcttgagagcttagcctttgcagttttatctcggatcgaggatgttcttcacgctgatgccattgctagagacccaaagcgcacgaaatcaaggagaaggcccagtctagttgacatccccgagatcattgacaatgcactggaggaagaggagactgtgaacagcatagatgccaattcacaagtgaccaacaactctattcactggcaagagcaagaacacgaggacaaaggcgcgaggctgaggaaagtccaccgcatggtcacaaagaaacttttgcacattgagaaagttgataatttggggggtgggttgaaaagcttttctcataggtagctgtagcctgaaaaaatggtcagacagctgcatgcttggttgtgctaccggggggagcacctgtaaatagctcaaacttcagagaggctggatgggttgtattggcgatttggcggtgtaatctgctcatctcagttgagatgaaatcagtatgcatatttcacggcctcattttggttgg

SEQ ID NO: 25260 - DNA, 2327 bp, Oryza sativa
  ref <308>: DATABASE ACCESSION NUMBER: AK100702
  ref <309>: DATABASE ENTRY DATE: 2002-08-28
gactgctgcactcgcggaggcgaccaggattgctcgtcgtcctccacggagatggcggcattgccggcctatctcctcctcctcctcctcatcctggtgatcctccgaccagcggctgcgcccggcgccgcttcgcagccgcctacctcggagcctcacctcccgccgccgctgcttgctcagaaggtgcaggtgtggcccaagccgacgtccatctcgtggccgtccgcggtgtacgcgccgctctcgccgtcgttcagcgtccgcgcggtgctgtcccacccgtcgctccgccaggcggtagccttctacacccgcctcatccgcgccgagcgccacgcgccgctggttccccccgccaactacaccctctcccgcgtccccgtccgcaccctcacgctctccgtctccgaccccgacgtcccgctcggccccgccgtcgacgagtcctacacgctctccgtgctcccggactccggatcggccgatatctccgccgccacgccatggggcgccatccgcgggctcgagaccttctcccagctcgcctgggccggcggcggcgccgcctccggtggccagccgatcgtccccagcggcatcgagatctccgaccgcccacacttcacccaccgcggcatcctcctcgataccgccaggaatttctacccggtccgcgacatcctccacaccctccgcgccatggccttcaacaagctcaatgtcttccactggcacatcaccgacgcccagtccttccccatcgtcctccctaccgtcccgaacctcgccaactccggctcctactcccccaccatgcgctacaccgagaacgacgtccggcacatcgtcagcttcgccgcctccttcggcatccgcgtcatccccgagatcgacatgcccgggcacacgggttcgtgggcgggagcgtacccggagatcgtcacctgcgcgaacaggttctgggcgccgcacgcggagccggcgctggcggcggagcccggcacggggcagctgaacccgctcaaccccaagacgtaccgcgtggcgcaggacgtgctgcgcgacatggtggccctgttcccggacccgtacctccacggcggcgccgacgaggtgaacacggcgtgctgggaggacgacccggtggtgcgccggttcctcgccgagggcggcacgcacgaccacctcctggagctgttcatcaacgcgacgcgcccgttcgtggcgcaggagctgaaccgcacggtggtctactgggaggacgtcctcctcgggcccaaggtcaccgtcggccccacgattctgcccagggagaccaccatactgcagacgtggaacgacgggccggagaacacgaagcgcgtcgtcgccgcgggctaccgcgccatcgtgtcgtcggcgtcgtactactacctggactgcggccacggcgggtgggtgggcaacgacagccggtacgacaagcaggagaaggagcgcgagggcacgccgctgttcaacgaccccggcggcacgggcgggtcatggtgcgcgccgttcaagacgtggcagcgcgtctacgactacgacatcctgcacgggctgaccgacgacgaggcgcagctggtgctgggcggggaggtggcgctgtggtcggagcagtcggacgagacggtgctggacgccaggctgtggccgagggccgccgccgccgcggagacgctctggtccggcaacaagggctccaacgggaagaagcgctacgcgaacgccaccgaccgcctcaacgactggaggcaccggatggtcgagcgcggcatccgcgccgagcccatccagccgctctggtgctcgctccaccccggcatgtgcaacctgtcgcagtagcagtgtcagtttgctccatcgcttcgcctcgctgtcgcctgcacagtgcgaaggaatgttcagaaatccaagtgacagaagaagaatccgcatcgatcttgggggcgtgacgtcgtacactgattgctgaagaaaccaagaacagaataaacgaatgcctactaaacaaatgttctgttctgatgccctcttccggagggaacccgccgattgcgaattgttcaagaaagtcgcggacttatgccgtgcagaaaagaaagttttctttgtgagtagtttctgcacttgatgctgaacagatttttgcactgtttattccttcattttcacaataacacgggtagatagagtagtagtagtatttggctagtgcaatagatgaacaaggttgtagtagaagtgcagaaccatctggttgtagttttgtacgaagggtatcttaatagaaaaaagttggg

SEQ ID NO: 25261 - DNA, 2410 bp, Oryza sativa
  ref <308>: DATABASE ACCESSION NUMBER: AK100703
  ref <309>: DATABASE ENTRY DATE: 2002-08-28
gagataatagaaaaggtcttctcaagattcagtcatggcgatcgccgcaagcagggccaacgccaacgccaaccgaagccgccaccatcatcaaccgaggcggtgggaaaaaaattcctcccaatgctggcacgcacgcgcactcgctcgagaatccggcgggtgggactgaaaaaacaaaacaaaaaaaagcagatcgattttgtcatctgcggcgcaaagcgggtgtgcatttcttttcttttatccccacatccagtcaccgtgacgtggttcttgattcctcaggccgggcgattattctagctctagttgggatgattggattggatccccagccagcagcagcaagcaattcttggccatcggttgtgggtggctgttgattcatgcatcacgagcactcaataaagtatgcagatctgtgcgcccctctctgatttgttcatccaggcaaaagagtatcttgcttctgtgaggatactaaagcgtgaagtgttgggggttagcttttgattgaagccatcgaaaattttccagtgaactttcaggccctgctgaaagaagaatctactgaaagagggaagattcgtaaccttggaagatatgctgccttactttgatccggagtatgagaacttcagtcagcgcatcaaccctcctagggtatgcattgacaacagcacctgcagcgactgcaccttagtgaaggtcgacagcatgaacaagaatggcatcctgttggaggtggtgcaagttctgagcgatctcgatctcgccatctcgaaggcgtacatcacctctgatggtggatggttcatggatgtgtttcatgtggtggacaagcaagggcagaaggtgactgatgagaagaccattaagcacattgagaaggcgttaggcccagacagcaacctgctgggtggcgcgaagggcgggtcgtcgccggtgaggtcggtggggatgcactccatcggcgaccacaccgccatcgagctcaaggggcccgaccggacgggcctcctctccgaggtcttcgccgtgctcgccgagctcggctgcaacgtgctcgccgccgaggtgtggacgcaccgcgcccgcgtcgcctgcgtcgtgtacgtgaacgacgtcgcgtcggggcaggccgtcggcgacccgtgccgcctgtcccggatcgagcaccgcctccgcctcgtcctccgcggccacgccggcggcgacgacggcgacggcgacgacggcccggcgcacgccaacttcttctcctccggcggcgccgggtcgaacacccacgtcgaccggcggctccaccagttgatgcacgccgacgtggacgccgacgacgacgacggcctcgacagccgcgccatcgtgtcgggcgaggccgggaacgcggcggcggcggaggagaggccggtggtgacggtggagcactgcgaggagaaggactactcggtggtgaacgtcaagtgcagggacaggtccaagctgctgttcgacatcgtgtgcacgctcaccgacatgcactacgtcgtctcccacgcctccgtctcctccgacggcatctacggcatccaggagctgtacattcgtcggaaggatgggcgcacgctacagaaggacgaagcagggagggtgatcaagtgccttgaagcggccatctccagaagagtatctgagggattcaccctggagctgtgcggcagggacagggtcgggctgctgtccgacgtgacgcgggtgctcagggagcacggcctgacggtgacgagggccgacgtcacgacggtcggcggccaggccatcaacgtcttctacgtccgcgacgcctccggcgagccggtggacatgaagaccatcgagggcctccgcgtccaggtcggccacaccgtcatgctcaacgtcaagaaggtgccctcctccccctcctcctcctccgccgccgccgccgccgccgccaacagcaagtcgccggggcagcctgcctccggcgccctgtccaggaccagcttcttctccttcggcaacctcttcgccaagctcagagcatgatataattcacctgaatctctgaagaattatggtccctttttcgggttgcgcaaatcgccataaggagaaggagatttcagttgaaattttagagtttagggggtgagggtgagaaactgcgtgtggcatatggcagaaaaagaaattgctgttgttgtatagtccataaaccataaggagctctacctaccagtgtaggaaatgagaaaaaaatgctggatccatggtgttggttctgttctgtgcaatgcagattgcagaatgcagactgctcttgagttgcatgaatgagctttttgagctatctgttcatcttttgtacagcatctttctagcagaagctcaaagaaatttcagt

SEQ ID NO: 25262 - DNA, 3625 bp, Oryza sativa
  ref <308>: DATABASE ACCESSION NUMBER: AK100704
  ref <309>: DATABASE ENTRY DATE: 2002-08-28
gcttctctctttcttctcctctcttccctcggctctctcgcaccctcccgtcacctctctcgcgcgtcggcggtggtggctggagggaaggcggcggccaaacagcggaggcggcagcggcgcctcctatccgctagatctggccgggagcggcagcccagcaggaggggaggcgggggtggcggcggcgggtggtggctggagggaaggtggcggcctgacagcggaggcggcagcagcacctcccctccgccagatctggccgggagcggtggcccgacatgaggggaggtgggggcagctgcgacgggcggtggcgggagggaaggcgtcggcccggcggcaagggactcggcgataccctgccctggagcgttcatgtgtgtccttgtgttcatgtgttcttgtgtcaacttgtgtgttcatcaaggcgaacctcctccagctcctcctcaccgcgccgcccctcatccaggcgcagctctccgaggccctcgccgccgccgcggcctccgacttccctgccaggtgggagtcgctcctcccttccatcgtctcctccctcggcaccgccctctccgccggggacatcccggcgaccaactccctcctcgccgccgcggcctccctcttctcccgcttccgcaatgccttcgacagcaacaccatccgcctcgacctcaagtactgcctcgagaacttcgccgctgccctactcgaggtcttcctctccacctcccgccgccttcaggctgccgcacccacggtcaccccgcctgaatcccgcccggtgtttgagtgccttcgcctatgctgcgagatcttctattcgctcaactccatcgacctgcccgagttcttcgaggaccacatgcgtgagtggatgacggagttccgtgcgttcctcaccacctcctacccgccagcgatagaggcagacggcgccccggatgcgctccgcgccgccgtgtgtgacaacttgcagctgtacatggagaagtatgaagaggagttcaggggatatctgaaggagttcgttgaggcggtctggggcctcctcatggcaccatctgtctcaccatcccgcgggcagcttgcggtgaccgcaataagatttttgacaacggttgctgagagcgtgcaccacgcgctgtttgggagccctgatgcaatgaagcagatatgcgatagtgttgtaattcctaacctgcggttacgggatgatgatgaggagctgtttgaggggaactgggtggaatatgttaggcgtgatgccgaggggagtgatgcggatacactgaggcgggctgcatgccggttgctgcgggggcttgcggcaaactaccgggagcaggtggctgcacttgtgtcagcacaggtccagcagatgttggctgcatatgcagctgatcggacgaacaactggaaagagaaggatgctgcaatataccttgttatttctcttatgcagaagcctggtgccacaggaggtgggacaccggtggttgatatggagagcttctttacatctgtgatcgtgcctgagctgcaggcccctgattgggaatctgaaccaatgctgaaggcaactgtgctgaggttcttgaaggaattcaaggatcaaatccccaaagccactgcactggcactgcttccaagtgtaataaggttcctgatacacgagtcaaatgttgtccattcatatgctgcgacctttattgagaaccttctgatcatcaaggatatggtaccagtaccaagtgcaaatgtgattaccagggctccacgctatgttgctgctgatatcaacccatatgcccagccgattgttcagaacctgtccaaggcactaagttttcctgaatcatatgagaacccctatctgatgaagtgcctgatgagagtgcttgggattgctaatattgctgggcaaattgttcatgagattactgctcgccttgtgggtattcttatggaagtgtgcaataaccccaagaaccctgattttaaccattacttgtttgaagccctggcagcagtgattggtcgggctggtgagcaggacccagcactacttcctgtgtttgaggcaagcctcttcccggtgcttcagaggatattggttgaggacatctcagagttctggccatatgctttccagatatttgcacaacttgtcaatttgagccgaccacctctctcgcagaactacatgcagctgtttggtgtcctgctcagtaatgctacctgggaccgtccaccgtgtgtccctgccttggttcggttgctgagagcattccttcggaaaattccaaatgagcttaaccaagagggcaggctaccgaatatcttagtgatattccgcagtctcctttcgcggagcagtactgaagattctgccttctacatgcttaacacacttgtggaaaatgtgagttttgacatcatgaatcctcacataaatgagatatggagtgctttgtttactcgactacagacaaggcaggcagtgaagtttgtgaattctcttgtggtcttcatgtccttggtggtggttaaatatggaccaggtgttcttgtcagttctgtcgatgcaattcagccaaatattttcatgacaatccttcagcgcttttggattcccaatcttaaattcatcaaagggactgttgaagttaagctgacatcagttgcatcaacgaagttgatctgtgaatctgcactgctgttggatggtgcagcagcccaaacttggggcaaattgcttgacagtattgttgcattgctgtccagaacggatcaagatggggcacaacaagatcagaatgatggtgctgatgcagatagtcagaggacatcaggttattctgtctcatttgtacgtcttcaatatgctggaaagagtgaagatgatctgttgaaagaggtaaatgatccaaagcagtttctggtcacctccttggctactctttctgcgcaatctccagggagatttggtcctatcattgagcagaacgtggatcctgcaaacaaaggcgctcttattcaactttgtgcagcttacaataccaacattgtctaggagccaatggctttgctgtaaggcatttgcattgtttccatggggttttgtcaaaggatgtctcaggggagtctatcggtcggtcggtctatcgggtcaagctggtcttcggtttcatccttgcaatatttctggcatgtgtaggttggtcttgggagaggaaggatgtcgaaatcatatagtggtggaaaaacatgaacattgtggtggaggatgtctctttgattggaatttggaattttcttttttggtgtggaagaggtttgtttcccccggaaaacatgaacattgtggaggataccccgagaatattgccagcgtaggcatgtgccatcctggtggaactttgctgtaatttttttgcccttgttggctgaatgccttgctctggcgtaggaaatggtatatggcgtgggagtatattgtcatcggtcatcaccctttgttaggtcgggttacaaaaaatattgcgaacctcgattggagctcgcgatcctgctgccatttgctctgttttttgaatgcattgagccgttgcaagct

SEQ ID NO: 25263 - DNA, 1579 bp, Oryza sativa
  ref <308>: DATABASE ACCESSION NUMBER: AK100705
  ref <309>: DATABASE ENTRY DATE: 2002-08-28
tcagccccagatggcgagttgtcagttgccgcgcctagccgccgcccgcccgcccgcccgccgtgacgtccccgctgacgcctctctccgttggacgcgcgcggtggaggcggttcgctgtcgccgcacggctcgtcgtcgacgaccaccacctaccccaccgatgacgccgtccgccacctgcttaaacccgcggcctccacctcctcccccgcgcgcttacttggatcggcgagatggggtggaagggcatcctggggttcgaccacggcgttgtgcaggcgccgctcgggcccgacatctccggcccggagctcgccgccgccgtcgccaacgccggcggcatcggcctcctccgcctccccgactggccggcgccggatcgcgtgagggatctgatacggaggacgaggagcctgacggagaggccgttcggggcggccattgtgctggccttcccgcacgaggagaacctacgggtggtgctggaggagaagctcgccgtgctgcaggtttactggggagagttcccgagggagcgagtcgatgaggcgcacctcgccggtgttaaggtgttgcatcaggttggtagctttgaggaggcagcgaaagctaaggaagctggtgtagatgggatcattgttcaaggctgtgaagcaggggggcatgtgattggtcaggaaggactgttacctttgctgcccagagtggtggatctagtttcagatactgacatttcagttatcgccgctggtggaattgtagatggccgtggctatgctgctgcattggcacttggtgctcagggcgtttgcttaggaactagttccatgaacattcaggttcttgaccactgaagaaagttttgcacatcccttgtataagaaaaggctaatcgagattaattgcacgggctataccaatgtgtttgggcgtgctagatggcctggtgctccccaacgtgtcctgaaaacaaccttctatgatcagtggaagaatctcccagaacaagaaacagaggaaaatcaacctatcataggccacactatcatccatggtgtgcacagggatattcgtcggttcgctggtactgttcctaatgcgacaacaacaggtgatattgatagcatggtcatgtatgctggtcagggtgttgggctaatcacagagatcataccagctagtgaagttgtcaaaaggttagtttctgaagcacagcacgtcatcagagaaaagcttttgtgaatttcctgtactgtccaaggagcagtaaatactatctggtttttgtaagcaaggaccaatgaaaataaaagagtccaccaagctgtccatttccccaaacaagtccacggtgttgttacatagtatatctgcagaattacacagtattgattgcttctacatctgtttgtaagtaacaactattgaaatatagattttgcaaatgtattctcttctttcggcttcaatgttgtactaggagtacaaagtatgtccccaaaattgtactagttgtgttgctttattaccaggacaagctgcccaaacactatgagtaactgagtttattacttct

SEQ ID NO: 25264 - DNA, 4303 bp, Oryza sativa
  ref <308>: DATABASE ACCESSION NUMBER: AK100706
  ref <309>: DATABASE ENTRY DATE: 2002-08-28
gaatttacaagcagtatttatttttctttcctgcccttgatattatttattatctctgtttctattgtcgttgttcccttcttctactggtaacaaggaatccaatcaatcccagtactgggagggagggagtctgtctcaacctgcatttgctctgttccaaaattctctcctttctttgttctttcctccgctggtccatagcatctgatgatccaatcatactccaagatctgaagagaaggagggattgggaagaatcgctctgcaatgaggccggagacgcggcttgattcagcggtgttccagctcacccccacccgcacaaggtgtgatttagttgtgatagcaaatggacggaaggagaagatagcctctggtttgctgaacccgttcgttgcacatctcaaggttgcccaacaacagattgcaaagggagggtactccatcacacttgaggtagacccagagattgatgcaccatggtttacaaggggcaccgtggagaggtttgtccgtttcgtcagtacaccagaggtcctggaacgagtaacgactatagagtctgagatattgcagatcgaggatgccatcactggccagggcggtgacaatcttggattgagatctgtagaagattataatgaaaaattggcggaatgcattggaggtagcaagacaaattacgatcttgatggggataaatcacttattctgtacaagccgggcattcaaccacctccacctgtgcagaatgataatgcaactcaggaggagaattcaaaagttcaattacttagagttctggagactcgcagaattgtcttacgtaaggagcaggctatggcctttgcgcgtgctgtagcggctgggtttaatattgacaacctgggatttttgatcacattcgcagaccgttttggtgcttcacgcttgatgaaggcatgcacacagttcactgagttgtggagaagaaagcatgaaactggccaatggattgaagttgaaccggaggcaatgtctgcacggtctgaatttcctccctttaatgcttctggaattatgtttatgggagacaacatgaagcaaaacctggaaacgctttctatttcgaatggagatgcaaatggtgaagatgctgctaaagctgatcagaggacagctcagcactcaggagctcccagcgaatacctccatggtccatatcaatcagcatatccaccatgggcaattcatccaccatatcccatgcaaggcatgccttactaccctggggtgaacccatactaccctccaccctaccccccaatggatgatcctaggtaccaccactcagagaggagagtatcaaggaagcactcgtcagatagcaaggactcagaaacattggatgatgaaagtggccagagtggttcagagatagagagctctcatggccacaagttgcataaaaagggcaagcgatcaggcaagaagaaacccagtgtagttgtcataaggaacatcaatgtgacgtcaaaaaagcatggctcatcagagagcgagtcacaaacgagttctgatgtagcatctgaggacagtgatgattcacacactgaatacagcaagcgaaagaataagagatctagttcaaagaaaaaggagagcagaaaaatcattcttgagcctggagatgagtatagcagggatgaagtagctcacaggcaagatggagaccaaggaaactggaatgtcttccagagtttcttgctaagaactgaagagaagacaaaagataatgacgcagacctatttgctactgagagaggaccaccgccagcaagaaggaaagaaagcagaaccactgatgatcctcttcttttagtggagcgagattctaccgatttcaatgaagggaagacaattggtttcaattcagcccatgggaggattaggtccaggaaaatgctgtctggtgacgaacttgtgatctcggctgaaggtaggaggtttgtggatggcgatattaaggagatagaagctggaggtggaggatacaggagaggagcaagtgaagacttcatcgtttatggtcaggaaaagccaatggacagtgggagttatttggatcctcttgcagagggacagtacaagagtccaaccctgatggaaaagaacatgcatagtgtggctgatgagtcctttatgatacctgttaggtctaactcacaggataatcttggaccagaaagctgtaccgccattgatatagatgttgagcttcctggaactgttaagaagacaacagatgcaaaggctggagaccaacttttctatgagcccgatgagttgatgccagagcgtgaatatgaagatgtcacatatggatatgatccagcaatggactatgatagccagatgcagattcaacctgccatcatggttgaagatgcaaatgcggatgatgtatcactgggggttgagggtgaagtaaagaagctagagaaagataagaagcttagattacaggaatgtttggataaaaagaaggatgcttcggccaggagattgccatcgtcaaaaacccggctaacagatgcacagaaacgtgcacaaaacctgcgggcatataaagcagaccttcaaaaggcaaagaaagagcaggaagaggaacagattaaacggctggaaaggcttaagcaagagaggcagaagaggattgctgcaagaagtagcacatctaattcaatatcaacaccacagcaggtcaaagtgaaaccttcaccaaagacttctcccagtacctacaagagttcaaagtttagtgatgctgaaccaggatccttttcacctctaagaaagcttcctgctagaactactgcagagagtgaccatcagaaaacaggaaaagctagcaaactaagcgatagtagtacaaatgcagtgagtaaatcaacctcatcattggcagcgatgaagaaagagaaaaatgggagaaatgaattgtccagtgagagattgaagaaacttgctgaacctaaaagtaatgctttgaccgaccgtccttcaaattcaaagtttgctagcatggaccattcacgaaggaaaagcatgccagaagatacccaaacaaagaaaatatctgctataatgcagctcgaccagaggaaatcagcaactctaccagaactcaaagtcaaatctccacgagctccctctatatctgtgaaaaataagacaattgctagagaaataagggatggggatcctggaggtaaatcacctcccactttagaagttacagatggaaagaaagctgatgtagaagtctccaggataagcaacagtgatgataatgtggtggttgagaagactgttgtgattcttgaaaatgaggtggtttcaaccacctcctctcattctacctcctggaagaacatcagagaatgaaacttctagcaatgacagaacacagaagcccagtatggaattggagtacactgccatcagggctccaccttctccagctgttcttcctgaagctgagaaccccaccatccatagacacaatgaccagggtaattacgaggtgatgacggagcatctgaaggatgagactgaggaattgaccttgtctgctgtggagaaaccctaccaggcccccttttgctagggtgacatcgttggagaatgattcagccaccattcatgcttacccccatgcactaccagttgaatctgaaacacctgtgcatgccgagagcattagggctcgagtactagacccagtatcgacagtttcagtggaggagacccctgaagcaaatgaaaaacctcgtaataaggaatcaaaaggcttcaggaaacttttgaagtttggtaggaagagccacacatcaggtacaatggattctgatgcatcatctgttgacggagccttagccggagacgggtcaatgctgaaaaccctcatttcgcgagatgactctggttcttcatctaaagcttctcggtcgttctccctactgtcaccgttccgcaggcagaaggtgattgtactgtgaccgtgagttggctgatcctgatctgtcatgttaatgcagcttgtgcattaactaatttgtttcttagtagtacatacacatacagacatgttagtagtacatacatactattgcctacatctgtgtacgttgcttgtaagctgtgtattttgagtgcgcgtttatgtgactttctgtatatgtagtacttggtatgcatatgtatattatgttacacacaagcacaaaacacattcgtttgatcgatcgattccatttgc

SEQ ID NO: 25265 - DNA, 1072 bp, Oryza sativa
  ref <308>: DATABASE ACCESSION NUMBER: AK100707
  ref <309>: DATABASE ENTRY DATE: 2002-08-28
gaccagtgcactgcatctagccacttccttttccccttttgcagctgcccatggagggagcagcgcaaccttggcctcgtcccctgcgagccgcggcagtgacaccacccggagagcagcgccctcagcctcgtcgagcagcgggagaggcgacagcctcagcaccggtgcgagcagcagccccgacgagtagcgacctcggcctcgtcgagcgggagaggcaatggcctcggcacaggcggcggcgactccggtgagcagcggcctcagcgcgacggcggtggcgctcctccggatccatgctctcaggcgcaacgacagtgagcagggagggagcagctcgtccattgcggcagatcggcagtgacctcgatgggtcggtaatggatgtacgctgaccggtggtccagagagtttatcgagggcgtgtattattttttttgagagtggccgaagctaacaagcgtaacggttttattcgttgtccatgcaataagtgtaagaaccagaaggagtattctacatccaggactattcatttccacttgtttgagtcggggttcatgtcaagctataattgttggacatcctacggtgagcaaggggttgaaatggaagaagatgaagcggaggacgagaacattcccgactgggctcagtacgctagatttgaaggaaatcaagatttacattatgcaattaattaaaatacaaatttcaccatcttctttatggtgatgttgaagaaaataaagacccatgaaaatcaaggtgaaatctgcactgatctgctatatggtaggtctaacatcaccgcattatctagttttggagtggcttgacgaagtagtcatggttgggacgttgggactggctcgttttggtcatgagaccttcacagatgggaacacgtggtcgacaaacgaacaccgaatcggaaacacctgcatgaacgatttgagttgcatgtaatgttgctttgtagttgcacgaatctcaggaacgtgttttcatcagtcatttcattgaattgatctctattttgatgagcagcgacaacgaaatttgaatg

SEQ ID NO: 25266 - DNA, 1105 bp, Oryza sativa
  ref <308>: DATABASE ACCESSION NUMBER: AK100708
  ref <309>: DATABASE ENTRY DATE: 2002-08-28
gacagcttccactccacgaaaaccctctgcctccttcgctcgctgcaccctcgtctcggcgatccatccatggctgccaggaagttcttcgtcggcggcaactggaaatgcaatgggacaggggaggacgtgaagaagatcgtcaccgtcctcaacgaggccgaggtgccctccgaggacgtcgtcgaggtggtggtgagcccgccgttcgtgttcctgccgcaggtgaagggtttgctccggccggacttctccgtcgccgcgcagaattgctgggtgcgcaagggcggcgccttcactggcgagatcagtgccgagatgttggtgaacctgcaggtgccttgggtgattctgggacactctgagcggagagcgctgatgggcgaatcaagtgattttgttgctgacaaaattgcgtacgcactttcccaaggtatcaaggtaattgcttgcattggtgagacccttgaacagagagaagcaggaacaacgatggaagttgttgcagcgcaaactaaagctattgcagagaagatatccgattggaccaatgttgttttggcatatgaaccagtttgggccattggaaccggcaaggttgcaacccctgctcaggctcaggaggttcatgatggtctgagaaagtggcttgtgactaatgttagtcctgcagttgctgaatcaaccaggattatttacagaggctccgtaaatggagcaaactgcaaagaacttgctgctaaacctgatgttgatggattccttgttggaggagcttcattgaagcctgaatttgtggacatcatcaagtctgctaccgtcaagtcttctgcttagtgttctgggttgcaaccagatgatcgtaggagttaatgctgccaattttaagttatgacatgtttgaccagcttgctttgttatatctcgaagtcagtgaactccatatcgttccatagagcatgcagccacctgtggttgctttttttctttttgactttttctcccgagaggatcagatgaactgaaagtgccgttaatgtctgtattatcagaagtttgttgatggcttgatgctataatagttgaacctgatacttcctgagtg

SEQ ID NO: 25267 - DNA, 3589 bp, Oryza sativa
  ref <308>: DATABASE ACCESSION NUMBER: AK100709
  ref <309>: DATABASE ENTRY DATE: 2002-08-28
gaatccttttatttgccctttaatttcccacccttttctgtcgtagaaagaggagggaaaaaaatattccggcgaccgcctcggcggcagcgaaccagcggcgccgccggaggggccctgcctcgcggaggtggaggaggaggaggagaaggagggggaaggggggtgaggaggcggcggcggcggctctccttgggatcctcgctgagaagcttctagaagctgccggggggggggggcgctgagcgagcgcgaggggcagggcgatctagcgagcgcggaggagagggcttctagatgcaggcgccctccgtgatttgaatggagggtagatctcgagagggagggaagcttctagaagcggggtgaggcaaggcgaggcgaggcgaggcggcggttagggcttggtttggtggccgggggagggatggcggggtgctcggaggggggaggaggagacggggaggtggcctgctgcggcgttggggatacctcgccggggaccattgtgtgggtgcggcggaggaacgggtcatggtggcccggcaggattctggggcccgacgagctgccgccgtcgcagatcatgtcgccaaggtccggcacgccggtcaagcttctcggccgtgaggatgccagtgtcgactggtacaacattgaaaaatcaaagcgcgtcaaagcatttaggtgtggggagtttgatgcatgtattgagaaggcagaggctactgaagggacttctgttaagaaaagagagaagtatgcacgtagagaagatgctattcttcatgctcttgaattggagaagaagctgcttgcatcaaagcatcagactcaaggttccagacctgctaacgtttctgtttgctctaaacataacaaagatcttggaagtacccgctacaagagcaaaaagagtaagaaacggaagggcataactgcttcttctgatataaaaaaggaagctgagcaatatgtcctccatgctggctcaaagagaaactttcaagattctcctactcggggcatttctgataatctttttggcaatcacttgggagacatctcgcatgtgaggcatatacaggccggagaaaatttggatagcaaggagaaaatcacaactgcggaaaagattagatcagatggaagtgattttgatgaatctattgaaaaatgtgacagacgccaacctctggttcagattttgcacagcagtccaaaattgcctcatcagtcacagcacaatgatggctatggggatgtcctaactcagggagaaatggatcgatcacctgccaattaccgagctaaaagaagtagatatgtattcctacctactgattctggtgaaactcatagtcatagtgatttaccttccgtacaagtggcttctacaggaggtgattttgagactgaaagttatcttcatcatcctgctttttctgaggagcagacatcttctgatcttgttgagaagcacatatatgagtcttcagagagggaatgctctgagagtgagacagaagatgacgctgaacttttacaatgttcggatttgattctgcatccagcatcacatgcccatgatccttatttcttaccagcttctgacaagttcaggcatgcgaatattgatgctgatgctgatgagctgacctattcttcttatatgtgtcaagtgaatgaatcagaagaggatggctcttctgagttgggcgtctcccaatggcatatgaaaggtaaacgtaatagccgtaatgcacctaagagatcggatatggcagatggaaatccctggttagacaaatcagatggtttcatggaaggatctccgtataaaataaatggtagaaatcccagagaagggagtatgcaaattcccaatcagcaattgctggggcaaaatttttaccaaaacgaagaggtcaattacgattccgaagaaacagatttttttgaggacacaggtcattcagaggttaacttgtaccatggtagaacatattcttcatgtttgaaggctacaagagattttagccgaagctacagctattttaacgactatggaaatgattcttccaaggtttctcccctaaacagggattcagataagatatttcattttgatcggaatgcatattggagcggaccctcattctaccaaaagtacagttcacgtcttcgtggcaggggcccaatgttgtttgatgttgacttgaaggtccaggctagctaccagggagagcatgttcctcttgtttccttaatgagcagactgaatggcaaagcaattgttgggcatcctgttcaaattgaaatacttgaagatggttccactgaccacctggttttttgtggtgatgttagtttggaagggagaactggagggcaacctgcttggtgtacaggcaggaggactgccatgcaaagaattccccgatctaacccctcaggggcattggattgtgatgatgaaggtacccttgcatatccagactgggagatgaaaccagattttagaaagtactcaaattcagattttagaaagtactcaaattcaaatcatcaggttaaggttgataagaaaagcatctcaaatgttaggaggccgtcagcctctaaatctcaaaagaagcaatccaaaaaagcaagcctgtcaagccagaaggtccgaaccctctcttccatttccactggaaaaaagcatcatggagtaggtggtcaagcaaaagcacataagcagagtggcatttttggcggcttgatcaaaccagggggaattccacttgtcacatgtgtccctgcgaaggttgcctttactaggatactggaagctgttggcaggccgcccctggctgttgctcaccgtgttagaatggctagtcctgccttgcgagatccttcataggcgtcaactgtgatgttaaatgtatctggtgttgatttgctagccttggacctgcaagtttcgtgtacattcccagctaatcgaagatgcgggcttttcagtcatttgggctacagtcagtaaagagcaaatggcatggttacttcaatataacttgggaacagctgataactaattagcagtggtgacatgacatgtaaagatcaacagcacctgtatatttctaactggaggttgagaccctttaggctctcatcacgagtgcttcttggttctcacacagtagttgagccaatgactccatggaggggaaattctttgcagagcaacagtgttggtgactataaaaatggcttttggcatagctgtctcctgtaaagtactaacttcagcattttaggatgtctatttagctaatcttatgcattcatctcatagtcaatagttcatagtttctctgatgtcatgtataatcccctcagttatattcagatttgcctgttatttactgtccaaagaattaatagtttcttcgactgtatgttctgtttataagcatgtgtagcaattcgatgtaatatatcataactattacaccagttgatgttaacaatgtagtttttctctgtatcccgttgatgtcaaaaagcactctgaactgttgcctttcctccttgc

SEQ ID NO: 25268 - DNA, 2120 bp, Oryza sativa
  ref <308>: DATABASE ACCESSION NUMBER: AK100710
  ref <309>: DATABASE ENTRY DATE: 2002-08-28
gaacacccgccacaagctaagctagagcacgagggtcaggcaacgcgtttctctctcgctgaaaagtttgctggatttgctcctctccctctctccgccatggaggaggcccagtgtacgtctctgtctcccttctcttctcttcatctgttcatggtgagtttgattggtggtgtggtgtggtgtgggactctgaggctgtgattgattcgattctgggcgctctctctctctctctctcgctgctttgggagtatcgaaaccgagaatcgggatcggttcttgatcctgttctgttctgttatgttctgggtgtcatggggcagagccccattgggatgtgtgatctggtgtttgagggggagaggttgttacaagctgtttgttgtttcttgctgcctgaattctcggatgaatttggcactgttcttcgttagaatgcacgatgctcgtttgagatctcgtggatagccaataatcatgccgaccaaatcaggattagtataaactctgagaattccggtgaccaccgggttcgattctccatatttgtggagctttttctgttgcaatcgttgttcttggggtcccaaatctgaaacctttttgcgctcgcttaatacttttttttaatgtccattttcaccggaatctgccaaaataaacgcacgttggcgactttattagagggttggtggatgtagatgctctttttttttttctttctctttgacaggaagatgcgtgtgagctgtggcaatgtcattagaaaagtacgcctttttcttgcgtgtaggttgttctgttgagagaaagaaaaaactgatgagaagactatctcgggctgggcatcgcatctttagaattgattgagtgatcaaccggatcaagtaggatatccttgtgagttggcatccctatcacgccatataaggcaaatgcagaactcgtgttcggctggaaacaactgaaagtagatgagagcgatgtcatgctgtctaccggttgtcacagtaactctgttctattgatatgcgtgtaccaactggccgttgatgcctttggatggaaagaagaatctgcttttatgtttctctgccttcttggcatttgtagtatgtctttgacaagtaacaactaatctgcctttctggacttcttgcctgatttagtttggggtaaattgcaatactccggatgttcagagacaataagagaatttactcgaattgtcaatcagataacgtttggtagcgatcactatacttttagtacttgttgttaaacttcgttgaaggttctactcttttaggtctctctgcttatgaagttgccaatgatcatgtcctcaatatgtaaaataagctaaaataagttacttttcctgtagttgtggagtcaaaggatggaaccatctcagttgcttctgcatttgctggtcaccatgaagctgtgcaagatagagaccacaaattcttgacaaaagcagttgaagaagcgtaccggggagttgactgcggtgatggaggcccctttggagcagtcgttgtccgtaatgatgaagtagtagtcagctgccataacatggttctgaagcatactgatccaactgcacatgctgaagtgactgcaataagagaggcttgcaaaaagctcggaaaaatcgagctctcagattgtgaaatttacgcgtcttgtgagccatgcccaatgtgctttggtgcagttcatctctcccggatcaagaggctggtgtatggagccaaggcagaagctgccattgccattggatttgatgacttcattgcagatgctctgagaggcactgggttttaccagaaggccaacatggagatcaagaaggctgatggcaatggagccctgattgcagagcaagtctttgagaagaccaaggagaagtttcagatgtactaatgtgcaggatagagtctcagatacgccaaagtccccctgatgatctagggaggaataaaactacaatgttcagcttttccattatttctcaaactgccaattcaaatgtattttcatcctgataacatttcaattgtctgcatgttaatatcattcaatgaatgggtacctacagaaacaattgc

SEQ ID NO: 25269 - DNA, 2407 bp, Oryza sativa
  ref <308>: DATABASE ACCESSION NUMBER: AK100711
  ref <309>: DATABASE ENTRY DATE: 2002-08-28
gatccccgtctccgcgctcgtctcggctccttctttgcccacttcctgccgccgattttgcatctcgcgagcagagcagggcgcgcggctgcttccgccacatcctgggggtggaatgcttgccaagatgcagtcgtgccgatggatcttggcttacttgctcgtcgttctcgtgagcctgcacggtggtgccaatggcttctacctcccgggcacattcatgcacacctacaccccaaatgaggtgatctcagccaaggtcaactcgctcacctccattgagactgagttgcccttcagctactacagcttgccctactgtaagcccccggaaggcgtcaagaagagcgccgagaacctcggcgagatcctcatgggtgatcagatcgacaattcgccataccggttccgagtcaacgtgaacgagtccgtgtacctatgcaccacggacccactcaccaaggagcaggccgagctgttgaagaagcgggcgcgagatctgtaccaggtcaacatgatccttgacaatctgccggtcatgcgattcaccgagcagaatggggtgactatccagtggaccggattcccggtcgggtacaacccgatggggagtaacgaggattacatcattaaccatctcaggttcaaggtcttggtccatcagtaccaggcgcagggtgatgttgtgatcaccagtgaggatggcgttgccatggtggagtcggatcgcaagagcggattccagattgttggcttcgaggttgtgccttgcagtgtgaggcgtgatcctgaggcgatgtccaagctgaagatgtatgacaaggttgattctgtcaagtgcccattggagcttgagaaatctcaggctatccgtgagaacgagaggattacattcacctatgacgttgagtatgttaagagcaacattaagtggccatcaaggtgggatgcatacttgaaaatggatggtgccaaggttcactggttctcgatcatgaactcgatgatggttgtcttcttcttggctggtatcgtgtttgtcatattcttgaggactgtccgtagggatctgacacggtatgaggagatggacaaggaggcgcaagctcagatgaatgaggagctctcaggatggaaacttgtggttggtgatgtcttcagagagccttgctgctcaaagctgctatgtgttatggtcgctgatggtatccagatcactggtatggcagtggttacaattgtctttgctgctctgggtttcctctcacctgcttcaaggggaatgctcttgaccggaatgatcatcctgtacctcttccttggaattatcgctggatatgtcggtgtccgtgtttggaggacaatcaaaggaacctcagaagggtggaaatctgttgcttggctgacctcctgcttcttccctggcattgttttcgttatcctgactgtgctgaactccatcctgtggggcaagaagagcactggagctttacctatctcactgtttttcacactcctggccctgtggttctgcatctcagttccactcacacttattggaggtttgctgggtacacgtgctgcaagcatagagtaccctgtccgtaccaaccaaattccacgagagatccctgagcgcaagttcccgtcatggctgcttgttttgggtgctggaacattgccctttggcaccctcttcattgagcttttcttcatcctgtctagcatttggttggggaggttctactacgtctttggcttcctgttcattgtccttttcctgctggtcatagtctgtggtgaggtttctttagtcctaacctacatgcatctttgtgtggaggactggaagtggtggtggaaagccttctttgcttctggttctgtcgccttctacgtcttcctatactcaatcaactacctcgtgttcgaccttaggagcctaagtggaccggtctcagcaacgctctaccttggctattccctgatcatggcccttgccatcatgctgtctactggtgctattggcttcttgctgtccttctacttcgtccattacctcttctcatctgttaagattgactagaggcacccacactcttgctgcaataggatcacctgagcatggtgatagttatcccttagaaacatatcacacaataatattgaattgaaaagaaaaatgtaaacatggcaacgcccatggcttttggccctgattaattctatcatttagcatagcacagtttctttaagttcatgcttatgttttgtaggcatgtctgcaatgtttcagctatgttttttgactttgtaatactattatgttttgttttctctgggcatttgtgagcagcctttgttggaacactttgacagatattcaatattaaagagctattcgatc

SEQ ID NO: 25270 - DNA, 2296 bp, Oryza sativa
  ref <308>: DATABASE ACCESSION NUMBER: AK100712
  ref <309>: DATABASE ENTRY DATE: 2002-08-28
tttcttccaccatccactaacccccatctcaacgcaaaccaccctctccgccgcgcgcgcgaggcagatctcgacggggagcgcagccgccgccgccagatcccgccccgatcgcccccgcctcgtccccacggtcccgtggatacctctctctctctctctctctctctctctctctctcggatcggtgcgattgcctttctttttgcgcggcggggatcgggtgtgttttggggacggtgaaggagaggagtgaagtgtggaggcgaatcgaatcgatctgattaggagacctgccatttctgtgcttgattttgtttcgatctgctccttgggctgtagatctggaagggcttcgtgggatctgctgctcgagcttcgtgagttgcacaggaaagtcttgggcttttgcgctcagctccaccaccttcacctgttcctcgggccatggctgctctcgtcatctcgaagcagcgcagtcaccagcagcagtcatccgatcgccggaggaagccatcgtcgcacttcgcgtcaccccagtccatgcgtggcttcaatgctgtcaactgccgagccttccactccagcgtcagcattggcatcctgccatccccgcctccacccccagcgcgcacctactcctccccggagccgaagacgcccaagtcgcagccacaccacgggaagaagcggagcagggcaatatctataagcccttcaacgtctccgccatcccggcctgagctctgggctggccccgctttctcaaactctccgcctcccagctcgctgccgatacccaagttctcactccaccagaagcgcagtgtttcactcgagttgccacctgctggccgatcagatgatgtggtggtgcctttgcatgctaagtcagcgccttcgtcgccaaccgcaggctcaggtgtcagcttctttagtgatagtgatactgctatcgcgactgagaatctgaggagaatcctccacctgaaaatcgctgatcactgaatggatgatgggcaggtccttgtacataggctatctgcaaactaaccttggtagtgtgtatagagtaaccgagaatggccatctttcacctggatggtggttctgcatagttcatcaacaggaggtacttcaggcaggcaaagcacctcaagtatgcatggcagcgtgaaactgcggtgaatgacttggtggtgagactgttggttgtctggatgagagcacagcagtttctgggtagcctttgtagcttgtggtcacctctatgttactaatgttctttcagccttttgggtattccttctttaggttttagatcaccattatccatggtctcacatcattaacctttagtcgtagtctgtccttgttcctggtagttcatgcctggcagggtatgatagtgtcttagtactgttcaaatgcttagatgtctgcatctgattatctggcagctatccatgtgtgaaatatctgtaggatagcaatatcttgcagtgcatgcattttgcttcaccttgtagacattccttggttcctctggctcactctactcttgcttctggtgttctgcaaggaacattatgatctctcctagatgtctcttctgttttttggaaggaagaggcgcagtgggatttcatgaagctccaatcttccatgttcttgctccatatgacactactaattttatccatgcacctttccttttctttagtttgttccatagctaccatgtgagacctctcctatctttctttcatgcctctacaactagaattgtgtctagtagtgttatgccttttttagggcaccatcaataattcctagtccttgtttatgtccaagaaacgtatttggagttctactctcttctatatgatggacaagccagacttcagagacctttgagcatgcagacccaaatacggtttgcttatcacagtgcgcttcatggtattcatccctggagctcgtagccaccatcaagtttgaataatcttcgtagtcgacgggcagcacatatgctagaacgtcaattcagtgtagtgcctgcttggctagttgtacctggtactgtttttgttataacattttgtcgatgtcttgatacattagcgtagtgtctatttgggctggcagtgtagtacctgcccggctatttgtatcagcttgcttaatacttaaaagtagacctttttccactgccttccgagtttttatgatatatttggatgttaatgttgtagcacttaacttcttatatgtgcaatgtgaactgcttttcacc

SEQ ID NO: 25271 - DNA, 2988 bp, Oryza sativa
  ref <308>: DATABASE ACCESSION NUMBER: AK100713
  ref <309>: DATABASE ENTRY DATE: 2002-08-28
ggttggttgtttccatgtttgttcagacaaggggagatttgcttgctagggaagatggaaataatcgatttttgcgtgcaatggaatgcatataattttttccttttttttggggcattgttcaattggtgtcactgatgggcagatccagtgtttccttgtttggatctactgatcgggtttaatcttttatacacttcgagtttctgatgatatgttgtggtttgctgtgctctaggtgtgagagttcttgatcgggtcggcataggggttttgttctgcagtacatgcgagagtgtgattgatggcatttggccgaggctcgaagatggacggcaggcggtcgtcgccgtcgtcgtcgctctgcacgacgaccaccgtcgtcgtgttcgtggcgctctgcctggtcggcgcctggatgatgacgtcatccaccatcttcccgctggagataacctcgaataagaaggcggcggtgaaggagcagccggcgagagttaactacggcgcgtccgaggaggcagcggcggcatccggcaacagtgctgaaggtgtggacaggtttggggacacggacaacaacgataatgcggttccggaggagccgaataacacggtcccttctgaagaagagaagttcagtgagaacacagtggagaagccagtggagagcagtgaagagaaggcgccaccgaaagaaaaggaggagagtaaggatacatttgatgatgcaaatgggaaaacagaacagtcgagcgccaaggaggatggggattctgaatcaggatctgggcagtcggatggttcaaagaatggcgacgacgaggagaagagtgaggagaagaaagatgatgagcaatctgatggtgagaggaaagatgatcaagaagagaaggctgaaggcagtggctcaaaggacacgactgaccagccacaaattgaggagacagtggatgaaagtggggagaagggtcagggtgcaaagtccaatgaggtattccctgatggggctcaatcagagcttctaaaggagtcaaacaccgagaacgggtcatttaaaacacaggatgcagagtcaaagaatgagaaggaatctcaagcagcatcaaattcttcagatgatgaaaccacatataactggaagttatgcaataacaatgctggaacagattacataccttgcctcgacaatgagaaggctatcaagaagcttcgaaccaccaaacattatgagcaccgtgagaggcattgccctgtggagcctcctacctgtgttgttccacttcctgaaggatataaacgcccagttgagtggcccacgagcagggacaaggtgtggtacagcaatgtcccccacactaagcttgctgagtacaaggggcaccaaaactgggttaaagtttctggggatcatctcctatttcccgggggtggcactcagttcaagaatggtgcacttcactacattgatactattcagcaggcattacctgatattgcatggggcaaacgaagccgtgtcattctagatgttggctgtggagttgctagctttggagggtacatgtttgagagagatgtactcacgatgtcatttgccccaaaagacgagcatgaagctcaagtacagtttgcacttgagagaggtattccagcaatatcagctgtcatgggcaccaaaaggctcccataccccagcagggtctttgatgtcattcattgcgctcgctgcagggtcccttggcacattgaaggtggcatgctattgctggaactgaaccgcctattacgccctggtggttacttcgtctggtctgccactcctgtttaccagaagctccctgaagatgtcgagatttggaatgccatgtcttctctaacaaaggccatgtgctggaaaatggttaacaagactaaggataagttaaatcaagttggtatggccatatatcagaagccaatggacaacagttgctatgagaaaagaccagaaaacagcccaccgttatgcaaggaaactgatgatgctgatgctgcatggaatgtacctttgcaagcatgtatgcacaaattgcctgctggccaatcagtccgagggtcaaaatggccagagacatggccacaaaggcttgagaagaccccctactggatagatgactctcatgttggaatctatggaaaaccaggaaacgaagattttgaggctgattatgctcattggaaacgagtcgtaagtaaatcttatgtgaatggcatgggaatcgactggtctaaagtaagaaacgtcatggacatgagagctgtatatggaggtttcgctgcagctttgagggaccaaaaagtctgggttatgaatattgtgccaacggattcagcagacacgctgcccattatttatgagcgtggcttgtttggtatgtaccatgactggtgtgaatctttcagcacttacccgagaacatacgaccttctgcatgcagaccatctcttctcaaagctaaaaaagagatgcaaattgttgccggtgtttgcggaggtcgacagaatattgaggccagaaggaaagctgattgtgagggataatgcagagacaataaacgaactgcaaggcatggtaaagtcgcttcagtgggaggttcgcatgacctacaccaagggtaacgagggtcttctatgtgtccaaaagtccatgtggcggcccaaggagatcgaggcaagcatgtgaaatatacagatgttcaagagaactgttactggttagtggtacattagactgaattttggctctagatatgcatactattcttgttgattctgaaaaggcataagccttgatgtaattgtagaatcattttttttctttcttgccaaacaaatgcactctatattctcttcttgctgtgctcttgctccattgctgtaaggttgtattggaacctggaagtgtcacaagtgtgacaagtgtcacaggcaaattatgttcaatcc

SEQ ID NO: 25272 - DNA, 1696 bp, Oryza sativa
  ref <308>: DATABASE ACCESSION NUMBER: AK100714
  ref <309>: DATABASE ENTRY DATE: 2002-08-28
ggttcttttcctcgcggggcacgcaagggtgcggtccaccccctcctcgcggccattgcgcctctctctctcgccgaagtggtagaggcaacgcagcagcagcagcagcagcaagtgtccctgtgtccgtctccgcttctcctcctgcctcctgcagtctcgtctccaccgactgcaactaaaaccctcctcctccggcccctctcaactgcagagcgcgaccaccacctcagacaaacccgaggtgcgtttcgcgtgaagcgggttttaaggatggttctaaacaaggtgctcgagctgttttgtgtgaagaagaaggattccaagaagaaaggcaaagccattaatcctctttgtaaagttgccgctccacaccccactgcaaatgtcagtacaaacaacagccttttggatcccttttcaagtgggaatggtactgtgctattagtgcaaaaacatgagcctgaatgttcaagtgttgtatcatcaatgacaaggacagaatatggatctgaaagtgatggctacaatttgtttaaccaatttgatgttgtgcaagatttttctgatcattactatgcaaagaattcaccagggaagacctccaaagattgggtgaagacaatccaaaatgaatggaagcttctacagaaagatctacctgaatctatctatgttagagcttatgaggataggattgatctgctgagggctgctattgttgggccagctggaactccatatcatgatggtctgttcttctttgatgttcgctttccttctgaatacccacaatctccaccgaaagttcattaccattcgggtgggcttcggctaaatccaaacttgtatgagagtgggaaagtttgccttagcctgctgaacacctggtggggtactggatgcgagaagtggggcaagtcaaaatcaaccatactgcaggtgctggtttccatccagggtcttgtgttgaatgataaaccatactttaatgagccaggcaacaaaaattcggctaatacagctcctggagaaaagtactcgttggcttataatcagactgcctccctactatcctgcaggacaatgatgtattcacttcggaagcctccaaagcattttgagtcccttgttgcacgccacttccatgagcgtgagcgcgtcatcctggatgcgtgcgacgcatacatatctggcgcagtcgttggatcatcctctgcgaagggcaccaagcatccccgcgacaacaacagatcgtttgcagatttcaagaagtcactggagaagtactctgaactgctcaggaaggacttggccgcgaaccgcacacacttcctgaaactgacaagagactcgccggctgccgcagatgagatcgttgagtgtaccagcagctagaatcgtcagagcatttgaccattgcagttcacctgcctaactcaaaagtgaaaatggtgtatagatcatagcactcgctacacatactgtgtaggttttttgtttggaggcaagatcgttcggattaattatgcaagaattcgggttgagttcagtgctagccattttgtttagtagctgtttctggtgatacaccaattggatgatcgaaacgtggtccaattctgccagcctaggctttgaacctgctgcattttaaatttttaatagaacctgttgcactagtttatatatgcct

SEQ ID NO: 25273 - DNA, 2259 bp, Oryza sativa
  ref <308>: DATABASE ACCESSION NUMBER: AK100715
  ref <309>: DATABASE ENTRY DATE: 2002-08-28
gactccctccatctgcacagccgccgggcaagaacaaccttcttgcagatcttgctcggcttccaaaccggccacccctttgcttccctcccaggagcaagacgatggcgcctgggaggaagatgctcggcggcaagaacaagcctccccaccctccttctgtccttccagatcctgcggcaaccccttgcctccctcctaggagcaagacaatggtgcttggtggcaacagcacacattcccgccatccttcggtccttccagatgaagcggccgccatggagatgctagaagaggaagacatggacttaagcacgtcgagggcttggaatatcatgaggaacaatcgatttgctaatcagctgggtatccgtaaactagcacaaatattccagagttcagttgcaaagaagaaagctgttggcaaaaagtcaaaggctttgttactaggggaagatgtggccatcactggtgattgtgtcacaactggaacaggaagagcatctaagagagtgctagcacttgaaaatctagaagaaacaatgagatgcactaggcaaagggctatgaaacaagtgtccaccactagcctgattgaagccacagaggttggactcgaacctgatttgtctgcaaaccagaatcagggtgacaccaacaatactggacaaggcaacctcactttaagtacagaactagagccaatgggattgagcactactcaacaaggcaccctcactagcagtatacaagtggagacaagggggaagagcatgggcaaagagattgattccataagcaaaggtttagggaccatgataccaatcattgtcaaggaagggaaaaaaaggccagaggctcctatgcaaactgcaaagctggcctcagagagtgggatcataatcaggcagcatataccaatatatccaagttggacagactacaagaatgatagtagtcaacttgataacttaaagggcaaactgaagggaaaattctccattgatatccacagcgatcctgtaatagctgcaatggaagacatcctaaggtgtggaacacgccatatgaggtataggctcaaaaagaagtactttgatggggtacctgctaatcaagtgaggactacatcgcccttgaagtgtatgaccgatgagcaatggacaaaattggtagatatgtggtcaagcccagagcacaaggacaaatgtgccaaaaccaactgaatcgtgaaaaagttcagtttcaacagcgtaccggatctcggtcttacattgcacatgcctatgtcgtgaagcaagaaaaatacaaagacagtgagcccactgcaattgatctctttaaggagttgcattgtagcaaaactaaaggttttagtgaacctgtgaagaaagctatagaggatatgcatacctgggaagccctcacttcaccatcagtagaagatgggcagcaagctaagacttctattgaagctgtttccaaagtgttgccgaagtcaaacacatttttgcgcaacgtcggaattcagcagcccgctgccaagacaaccaatgtgatgaaagagatacaagctgaactagatgcaaagaagctagagtctgcagtactttcaggaggagcttgaaagattgaaggcgcaggcacaagaatctgatgcgaaagtggaaaaacaagctgaggagattgagagcctgaggaagatggcagcagatactcagagcctccttcgacaaatgatagcatttggacagggtcagatcagtcctccctaagctagttgtatgctcaggaatgaggtggatgagcttggaatttgatggctggtgttagtgtagttgaacttggtggtgtatgtggctgctattgtatggtgtatgttgctgctagaacttggtgctagctgctggttgcttgcaagttggcgcttttggtggccggagttttttttttcgttggttgctggaacataggattttttggcactagttgttggctgctgcaggatgcagtccagaagtgtagtgggtgcttggtggaatttttttgctggctattggcaagatgcaggctgagacttagtagtggctgctaggtggagttttttggtgccggaacttggcactacctgtagtaactttggtagtcggctgggacttgtgtagttcaatggtggatggatcattttgtattcatgttctgtgcttttgtatggaacatgttggaaactatattctggaacttgcttttgtatgggct

SEQ ID NO: 25274 - DNA, 2688 bp, Oryza sativa
  ref <308>: DATABASE ACCESSION NUMBER: AK100716
  ref <309>: DATABASE ENTRY DATE: 2002-08-28
gacgcttttgaccaaccgctccgcactagcggccgcgccgcgcgcccaccgccaccgcataccacctgcagagctgtgacgcgccacgccacgcccacgcccacgcccacgcccacgcctcgccaccaccttccgcggcgatgtccggccccggcgggcgggagcgggaggcggcggggcccgcgttctccttctccgtcgacctcgtggcggccgcgcgccggctgctcgcgctcctccgctccggggacggggagcggggtggagctggggtggtggggccgcggtccgtgcggaggtacgaggagctgtggatgccgctcgtggcggcggagggggcgggaggggaggcgccgatgctggtgccgccgcccgacgtgcggctcgtctggctctgccactgcttccaccatgagagctatgctgcttactgtgcatcaaggtttggacgcctcatcaaccgtccgtcgatccttgatgctgataatgaagaatatgccgctgaccactgtcgggatgtctgggctgcacactatccatcggagccatttgatcttgaagataatgaaactgaaggaaacagtagtaatgacaaatctgctagtgaaattatcgaaatggttcaaagatatactggcctagcagcccgctttgcctcacccttcatctcagaaggtgtctatcatgttgctgctaggcggagatacatgcgtttccttgaacttatcaagaaaattgtgagtacaacccaaggaaacacgcggctggtgcctagcctggacatactgctaatgtggcttgctcaccagagtttcccagtgagctattacgcagacatggcagcgatggccgtcaaggataatgttgcaaaaatagttgtgggttatggggaagtggtgagtgaagagatggtggagagaacaagggtattgtgggaggaggcatacgatgaaccatacgatatggctggatcagagattgataaagcagaagttgatgcagcgagagaagcattctattgggagacagcagcatcagaagaggatgctaatcgactgtacaaagggctgcaacctaggttcattatggaggtatatgtgttcctgaaaggagaatttgacagtgaacacaccagtaaggaattcttacgtttgcggacacagaggtgttacagatcactaaagctcaacataccactgttcaatttatcctgcaaaaactggcaaaaaacatggcacctatattgtgagttttcaacaagaggcctcatcattgaggtcagacgcagcacaagtgggtgcttcaggaacagcaagctcatcaagaacatctcattctcatggagtgatatgttgcatgagaaatccctcatgcttacagaggagcttgatgttaggatgaaagcaatggcatcaatcacccctccggttcaagcaccatacttgttgaagtgcgtacctgaccgagttaccgatgatggtggggctatgatttctgatgtcatattgcggacaaaaggttaccgtccacaagaaggacgatggctgactcgcacggtgcttgatcatagtaggaaagaatgttttgtcattcggataaggcagagggatttggcggagaggtgctgaaactcccatagcagtgaaatgggaggacagaatcattgagattagagagggttcatggtcatacattgcaaatgcaagctccgtcggttatgctcctgagaaggtggtgggaacagcaaccccaggaaaagatcaacaggacagcaaggtggtttggcgcttttcaactggagatgtactgacggtaaagttgggagatgacttaaacttccatattcgaaatgaaagctcaggagaagaggcaaggcttcttgtagggaggagattgaactacagaataaacaaggaaagcacattaaatgaccgcaatgatgaggaggaataccttaccctagttcgtacatcacctgatcatctaggtgacagagcaactatgctcctcaactggaaactacttgcggtagaattcttacctgaagaggatgcagtttttgtgcttctcctgtgcatggcaatcgcacgaaccatgacagagattaggagagaagatgtatctgggcttttggtacgacgaagaatatgtgaagcgaaggttgggcagagagactggggttcagtgatgctcccaaactcaccttctcttgatcctcatttgcaaccgtggtatcggaatgcagcgcatgtattaagctctgcagaaacagcgtctaacagggtgatgcttatgaagtattcacctgctgatggcaaggatgagttgtacaggaaagctcttataccttaagccccgatggagaattggagatgattcctatcatggcttgtacaggattagttttgagttgtcatttcactaatggtgttgatctttgatacagatctgattatggttgtaaaatatggtttataacaacagaaacttaacattccaccacaaaagggcttgctttttgtttgttcttttgaccaaggatgtgcagtttttttgtactttttgttgagtaaaagtttccattcctttgtgtacattgtaattctgaagggttcaccggttcagtggtgcaaacttcagttccagaatacacatgtttcacttcactgataagattcatcttgtgct

SEQ ID NO: 25275 - DNA, 2378 bp, Oryza sativa
  ref <308>: DATABASE ACCESSION NUMBER: AK100717
  ref <309>: DATABASE ENTRY DATE: 2002-08-28
ggcgtatctcccccctttccctcggcgtaaaagaaaatctcccggtctctcgtctcctccgctccttgcgccatctcgccgccgatctccatcgggcgagcagagcagagcaggggatcctgatctggaagaagctccttctcttaatttcagagccttaaaaccttaatacgagtaacagtttgttgtttgttcatccaaaagtttggggttgaactgaatccccatgccctcacctggtactaatagcagcagcagcttctgtttaggaggaggctaggaaaaaaaaaaggaggatttttttttttgtttttttgcgggggttcagctgaacaacccccatgcatcacgttaggtccgggctgggaagcccagatgcttccagcaattctagtaagcggaagaggggctcctgcttcgcggagcggaatatggatggtaggaattcgatccggataaagcccgacgtcagcgtcagagcgcgggagaaatgcggcgggggtggcgggcatcgctacgtgatcgatttggagaagccggcgacgtccgacgatgatgtggagtttgtttcttatgccgggtttggcaaccggtctcaggaccgctgctatgcttcggcggagaattgctcgaccgcggtatccagtcagctctgtgtggagcggaatgcttcgcgtgtaagccctggttcagttggttcgagtgatactctggactgccagtcacctatcaagcctgataattcagaatccaggcatttgctgatcgacctgaatgtacctcaagaagaaagtctacatgttttctatgctccatctcaaataacttgtccaactttagttaattcttcgtcatcacaccctggagaattttggaatggctccagcaatgtttacaaaaaggaatgtggttctggtgttggatcatcaaaaggatcttccattacggtggttgcacccagctctgctcctgatagttcgagggaagttgtggctgcataccaatttcatgatcctaagaatttgcatggtaatatacatgcaagagaaaacagccagcatgaacatgcagtggataagttatgtggatcaagcagtcaatatttcttgccacagcaaagattttctgtcagttcctgtggcagaaatgactcatctttggccttacaaaaatcaggtgacaaccatgttgcctgccaatcaggacaaccacctctggctgtgcatactgagctccaacatgacacttctattgtaatatccagtggtgaagagaaggtcctttttgaccttaatgtgccagctgaaagcattgacatggaatcaacaataaccagtaatagttttagagataagctagtgaaaaatgatggaagtgaagaaacagtaaccgatcattctttctccaagagaaacggtgtgcatgctgaaacttctatagaagaacgaactgttggagaacatcatatatcagtcagcaaggatggaaacaccacatttttccaagaatcaataaataatgaaattgataaggcgcagtcttcagaccttataagtgttagcagcaaacatttgattgcagaaactcctcatgttgacaatattgtgtgtccagaactgcgagcatctcctgatggagcatcaagtcctcaagagaccttgataggcaattgtgacaaaatggtttgtattgcagctgagacactcgtttccattttctcaagttctgcatgtactacagattgcccaggaactgacagtcagacagcagctgaggatgtaaacgatgaaccgcagcactctttggattcctatgaggaaattgtattgaatgtagaagagatcagagatgacggggaatccatccctgtgattccacctgataaggatggaccgtcttgtgggatcaagctaagaagaggaagaggactgagaaattttctgagggagataatgcctagacttgtttctctttcacggcatgagatatgcgatgatttgcatgctataggttacgagccccggaaaactcgatctaggaaaacttttggggctcaaggttcatcttcaactagaggaaggccgcccaaacatcgtcccactgccaggaaatgatcaacagcatttcaagttcatactaggatgccacgagacgagcaattcagaagatgaaatataattttaaccttgtgaatattcatgtgtgttgtgcgcatcttcaaactcggtttgttactagtcactaaattgaggatattttctttattccttttacctcttgggagtgctgtgggccgttagcttcaaatttgagttcagcattggcaatgaaggcatagtcataccattataaaatctcagaattttgatcttttaagt

SEQ ID NO: 25276 - DNA, 1241 bp, Oryza sativa
  ref <308>: DATABASE ACCESSION NUMBER: AK100718
  ref <309>: DATABASE ENTRY DATE: 2002-08-28
gactactgattttcccttcgtcaagcgactccaaaacgtgccccatatctaatctgtctcgcacgcggccggcggcggaagagcagagcatcaggcgcgtgtggatagccggaggacatggccacccacttcacgctcaacaccggagcacgcatcccctcggtgggcctcggcacctacaaggccggcaccggcgtcgtcgccgacgtggtctccgccgccgtcaaggcagggtaccggcacatagactgcgcgccgctgtacaagaacgagcaggagattggtggtgctctgaagaagctcttcgatgatggggttgtcaagcgggaagacctcttcatcacctccaagatatggtgctgactgctgctgtcttgttccttctattgaccgacctcaacttctgaacgctactagtagtgcaagtttattctgctatttcgaattatgttctatcccttcctcttgaagacgtcccaaactctgcaggtgcagcgacctcgcacctgaagatgtcccactcgcaatggatagtacactgaaagatctgcagctggattacgttgatctgtatctgattcattggccgtttcagatcaagaaaggcacggagctcagtccagagaacttcgtcaagcctgacatacccagcacctggcgagcgatggagcagctgtacgattcaggcaaagctcgcgcgatcggcgtgagcaatttctcctccaagaagcttggcgatctgctctgcgtcgcccgcgtccctccggccgttgatcaggtcgagtgccacccgggctggcagcaggcgaagctcagagcgttctgccacaccagtggcgttcatctctctgcgtatgctccattgggcaggatgaagggcatcgccgttgattcggtgttgccatcggtagccgagatgctaggaagaactccggctcaggttgctctgcgctggggtcttcagcagggtcagagtgtgcttcccaagagcgtcagtgaggcgaggttgaaggagaacatggatctgtttggttggtctattcctgaggaactgtgtgccaagctctctgaaatcgaacaggttaagcaaatcagaggagatggatttgctcaccccgagagtgtctacaaaacctacgaggagctttttgatggagaaatctaaaagaatggaaatcacctatgtgaaacaaaatgtgccattactgtaaaagaacgatgaaaaataacaggcatttcac

SEQ ID NO: 25277 - DNA, 3978 bp, Oryza sativa
  ref <308>: DATABASE ACCESSION NUMBER: AK100719
  ref <309>: DATABASE ENTRY DATE: 2002-08-28
gggttgtaacgaagaaaactagtgtattggttatgtggtcaagagtgctgtgacatcaacaaggcgaagtattacaagaatatgaggcctaaccgctggagaaatggagaggcgaatctcatcttcacagccttcgtattacttctagcatcgctgatctctcaatcatcggccgctcaatgcgtgtggtacgggcaatgcgccaaaaacgaccgcggccagccgctaaactgcggctacaacggaccgccgaaacctttggacgacgagggactatccatcctgcagaaacgatgtccccatctcgtggacagcgatggccgcgcaacaacttgttgcgatgcagcgatgctgaaggagctggacgtcaacgtcgcgaaagtcgccggtctcttccagaggtgtccatcgtgcatccgcaacctcctcgggtacatgtgcgacatgacgtgtgcgccggatcaaagtctcttcatggaagtgaccaagtttggggtcggtggttcctcaaaggtcgtggatgcggtcaacattcacatagatcaagaatatttgcaagcgaccttcgactcgtgcaaaggcgtggtcatgccttcgagtgggaagtttgccatggatatggcttgtggtgcccatgatgctcagtcatgcaccccacagagatggttcgacttcatgggggatccaacaagtcccttcgtcccatttaaaatgaacatcacatcgtcaactgggacttttgatgacatgattccgcgaaggccaaaattcgtctcatgcagtgaatctttcgataacagttcgaagccctgctcctgtgtagattgtgagaaggcatgtccgaagacagattcaggcttgctccctcctgaatcgaaactaaagtggtcgttcttgggtctcaacctcatagtaatcattgatatcggtatttccgccgctctcatagtagctgccctcatatgggccattttcgccggccctcaaaaaccgtggttagacgaaacagatgaaataacggagccgaacaagttggaaaaaatcggagacagctggtccagattcctcgagcggtcattccgatggctaggcacagcttgtgctgctcaccctgttatggttctctttatatcatcgtggatcatagctggcctttcttacggagtccagtttctccaagtgacaacagatccagtgcagatttgggcggcaccaaatagcttagtccgacaagagaagacatactttgatactcgcttcgaccccttttaccgggcagaacagatgtttatcaaagccgttggtcttgatgaggtcaagcatcaaacgcccaatggagaaatcacttttggtccggtatacaacaaagaattccttctggcgcttcgagatttgacgatgaagattacggagctagggaaagcagagggtgccggattggagaccgtttgccttgcgcctttagcaagcgatttcctgggacctgtaacaacatcccaatgcactgtcttcaacatctggggctacttccaaaactcattggaagagttcgagaaacctggacggaactacctggatcaaataaacaaatgtctgaggaatgcttatgatccagattgcctcgcttcgtacggcggtccggctgaaccccccgtgatcgttggggattacttggagaagggacaaagtgtccgggacgttaacgccgatccgaagaaggcccgagccgcgatcctcacgttcgttcttcgtaacagcttgaatccggacgaaattgagaaggcaatgaaatgggaaaagctttacgtcgactttatgcagaactggactaagaccgaaaagcccgatttcatggatgttgctttcagttcagaaagatcagtacaggatgagatcgaaagggtttccaagtctgaagtcagcacagtggttatcagttacactgtcatgtttctgtacatctcgttttccttgggccggtttactagctggaggacgtatctggtggagagcaaaatgacacttggagctgggggcgttgtggttgtcatggtatcagtggtttgcgcgctaggcgtgttcggttacattggaacgccaacaactatgctcacagttgaggtaataccattcttagttctggccgtcggcgtggacaacatcttcatcatggttcgaactcacagggcgatgagagactcggggttattttccggcgtggacactgaagcagaacgcatcgggcggactgtgggcaaggcagggccagctgtgctcctcagctccctttctgaatctgcttgttgcttgataggcgccttgagcccaatgcctgctgttaatacatttgccctcttcgccgccactgcgctggccatcaactttttagttcaaatcacaacgtttgtcgcgttgatgacgttggacgaaaatcggtatttgagagcaagactagacgtcgcatgctgcatcaaaatgaatcaccaacgatctctgaaagtacacccaccgctcgtccagaggttaatcaagcgatgtatagctccttatcttctgggtgatcgccgtgtccgagttgtcaccattgtgctatttgcatgtggagtgatcatttcaagtggacttgcgactcaaatcaacctcggaatggagcaagagtacgctatgccggacgattcccatgtactcaagtacttccggttcatgaaggatgtcttctctctgggtccacccgtctactttgtgctcaatcccaacgacgccatgaacttcagtaaccgtgagcaccagaacgcagtgtgcggaggcatggggtgcaaagacacgtccatcaacacactcatcttctcggctgcacgatcaccggagcgatcctacttggcgcgccccgcgtcatcctggctagatgacttctttgattggtccacgctagatggatgctgcaaggtcttcaagaacaacggatccttctgtcctcacaaccgaggaccggaggaatgcgacccctgtgatatcgagaccgacggcgagcgcccgactccagaggctttccggaagttcctcccgttcttcctccaggataacccggatgccacatgctccaaaggaggtcatgccgcttacgctgctggagtcgacgttgtcacagatatgcatgcgcttgcagacactcgagacacgtatttcatgggatatcatactccgttactcatatctgacgactacgttggtgcgttgagaggttcgaggaaagtttccgaggctatcaataatgagttgaaaaaagcatttccgaaggctgagaacccaccaaacgtattcgcctacagtgtgttttacgtattttacgaacaatatctgacgatggctgaggatactgcctggtccttgttcatgtcactgtcagctatatttgtggtcgtctttttccttaacggattggatatcatagcggctctaatgattatcgtcccggtggcgatgatcgaagctaacatgttgggcatcatgatgatttggggaattcaacttaacgccatatccctcgtcaatctagtcatgtcaatgggcattgctgtggaattctgcagtcacatggttcacgccttccagtattctacggctaaaggaagagtagcacgggcgcaggatgcacttattcataccggaagttcggtggtctctggaattactctcactaaaatagggggtatcgctgtcctcgcctgggcaaagtcacaaattttccagatcttttatttccggatgtatttttcgatagtcgctgttggggctcttcacggtttggtctttttgccgtcactgctagcagttgcaggtcctcggatgaacagagccagggcaaagcgaataagggaacaccacgaaacactggaggacagagaaccctctcaagaataaatctaattttatatttatttactgtacagatctgggcttcataattatatttataag

SEQ ID NO: 25278 - DNA, 2875 bp, Oryza sativa
  ref <308>: DATABASE ACCESSION NUMBER: AK100720
  ref <309>: DATABASE ENTRY DATE: 2002-08-28
gttggggttggactcgaccatcggagactcactcgagactcgagagtggtagacacggagaatctcggcgggtgggcggtcggcgaggggctccgctcccgccgccggccttgctccggcaacgagcacacgcgcctccacacgatcgccgccgctgcgccggccacgatgtacgtgaggctactcttcttgtgtgcctgcacccccagagcgcaaatcgctttgaagcgtatgttccttaagctctctgcatctacactacagttacttccatttggttgcttgcaggtttctgttcatgcctactttgatcactgatacagcacaggctgttgcttatcagatctgttcttcctctgtgccacatcccacatgcaggcaaattgctctatcccggtagtttactgaatgaacagtggcgaatctggcattatgcacctttgcaatcgcaacagatttaagtaaatccattggctgtaccgcctgtacctttactattgcgttctaattatggtttggggggctgattagacgtttagtttttttcttatcttccaaatggcacggaatggcatcagattcaagaagagcaggacgactttggtttttttaaatccattttggagaacccccattgggtaaagttcgaacagagggttcagaaaacaaacaatacttctgccgtggtttggtagtccttcacttcactgtctgctcgctattcaccattcccttctctactactcctggactgctttgttctctcgcagtccacagctcttccatccctcccactctcctcagcttagctagcggagtagagaccagacagatcaatggagtcggcggccgtgaacgcggcgcggtgggtggttggcaaggcgctgagcccgctgtcgggagggttcgtggaggcgtgggcggccagcacggagctcgggccaaacgtcggcgccatcaagatggagctgctctacgcgcaggggatgctgcacaacacccgtggcagagaaaccagcaaccccgcgctgcagcagctgctcctggagctccgtggcctcgcctatgatgccgacgacgtgctcgacgagctcgactacttccgcatccaggacgagctcgatggcacctacgaggccgccgatgagcatgccagcggctgtctccttggccttgtgctcaacgctcaccacactgccagaaacatcaagagaaggtacctctctgcctcttgctcgtgcggtggtgacgaggaagcgagtcgccacgccaacgaagaggaggctgttgctggcagcggctgcatgcgcatcctcgcttgcagtgctcagagcaccatccatctcgttggtaaacaccttccatgcttcccttttgcacctggtcttgacaattgtgatgactccggtgccttgcacatatctaccatgaaaacaccaaagctgaagttcgatagggtggatctgtccacaagaatgaagcacatcgtcgaacaattgaagcccgtatgtgccaaagtctctacaatccttaatctagagctgttggaatcatgcattgccatcagtatcaatgctgaattttcaaggaaaccagggcaaacgctagttcatccaagcaacgttgctatgaatcgtcctgtaactacttcagggattatagaccctgaattttatgggaggaagggtgatagaagtagaattattgaggacattactcggggtgattactgtgacaaggatttgaccgtcattccaattgttggtccagggggaatagggaagacaactctcactcagcacatatacaaggaagtacataaccattttgatgttaaggtttgggtatgcgtctctctcaatttcaatctgtatagattgaaagaagagatctcaaagtggatacctaaactcaaggatgatgagaaatatgtcgacatggatgattcaattgagcaaagattgaaatctaagaagcttcttcttgtcttggatgatatgtggaagtgtgataatgaggatgagtggaaaaagttcttagctcccctcagaaaagcaatgacaaagggaaacataattctagtcaccactcgatttccagtggttgcagaaatggtgaaaacatttgatcgaccaatacaattggaagggctagaacctgaagagttctgggaattattccaagcatgtgtttttggtgatgacaaatcaatagatgatcatgctaacttacttgagacaggagaaaagatagtgaaaaaacttaagggctctcctttggcagcaaaaacggtgggtagattgctgagaaatcaccttgatttggatgattggatgagggtcctagaaagtaaggaatgggaatcacaaactagtgaaaatgatattatgccagctttgaagcttagctatgactatctatctttccatctacaacaatgtttcacatattgtgctttgttccctgaagattacaagtttgatagtgaggagatgattcacttgtggatagggcaaggcattttacattcccaggatgaaaacaaaacaattgaagatattgggttgagatatttgaatgatttggttaattatggatttttcataaaagatgtgaatgaagatgggtcaccttactacactatgcatgacctactacatgagttagcattgaaggtttcatcatatgaatatctttctataagtaatactaaagtaatgtctatgcaaattccgccatctatacggcacttatctattgtgatagatgacatggacgtaaacgacagagcaacttttgaaaatattaagaaggattttggcacactaagtaagaggcttgatgtcgaaaagctacactctctaatgatatttgg

SEQ ID NO: 25279 - DNA, 1876 bp, Oryza sativa
  ref <308>: DATABASE ACCESSION NUMBER: AK100721
  ref <309>: DATABASE ENTRY DATE: 2002-08-28
ggtccccaatccattcgagcttctcttctccaatcgattcgcgatttccaatccatggcgactctcaccatgcagccgatcggtcccctaccgtctactaagcaagaaggcacaagcaggggagagaagcctgcggagggtggtgccgatttgagtgacatcgactcggggtatgtggctctgcccaatttattgtattgtctcgcttggttcttggcttataattagttgatggatttgttgttgtggtggcgattctgggcagctgggttgttcttgggaagtcggatatcgtcccggcggatttggcagcccagagcctgcgctcatctccgaagacaattcctacatgggctcggtgggtgattggaggtgtgctgcacacagtggtgccattctacgagagagcacggtatgttgaagatgagacggctcgaaatgtggagactgctgctgaggttgtggagcaaatagctgaggtcacagagaaactggcttctaacgtggctgatcaccttccagagaatggatgtctgcagaaagtagtggagaagattgaatacatagctgaggtagtggatgaagatgcagagaaggttgaggccattactgagaaggtgggctccatgtcactccctgttttgcctactatattttatataggatacataatgtcatttgaatttcagaatattttgaaagcaaattagcagttggatatgctgtatgagttgattggtagtgctaaagataagtgggtagagggcaactctaagtgccaactgtgaacaccagttttcaagtgccgttatatatttctgttggctccacataaattgtagtattgtagtaaccacatgcatcaagaatatatctattcaactttcttttgtataatagtgttgtaccttcattgtgtgctacatacattttaccattatagtgtttatattgatgataattaactttgttagttgtttctgccaaggattgtttcgctatttctgttttccactacaaaaattctgacaattcaattgttaaaggattttgcttaattggtaaatctttgtaggtattgttgaagacttcaaggtcatagttccacttcaaaagtatattgttgacattaaatcaaaaaaaattaatgcaattttactgtgccacaatttgccaggacatctaggaataacgtcctattttcttttgtatttaaaaagagtctactactatgcagccttgtggcattgcactagttttagaaaatgtatctatatagcaagtagaagagtacaataacagtgaacaaaatgccggattgtaccaatacaaatcaactagtattgttttatcctaataaaactgaatcaggcaaagaaagaaaggattcctacaggtatagagtcattttgcgtaaaactgttgagatatctgcactgttttggaagtattgtgaaagacaaccaaagatgaagctattaacactttattgatcttctcgctaatacagattgagaatttcagcgacaagattgatgctaaagtagaacctatcttcacggagattgagaaggaattcgaagactcaacatcaaatgatggagtaaatgcaaatatataatcactagccctacgtagaaggaaatactctcagctccccattgtgtatagcatatgcttttttttgaatgattcgttgtacatatgtgtacctttctgtatgagttataccatgcttattgtgacgcatggtggtgttgtggctggtgctcgaaactaaagtagagttagcattgactattgagactgttgagctgtgaaatttcatagactggtacaaaatagaatggttggtactggtaaatgctattatatc

SEQ ID NO: 25280 - DNA, 2354 bp, Oryza sativa
  ref <308>: DATABASE ACCESSION NUMBER: AK100722
  ref <309>: DATABASE ENTRY DATE: 2002-08-28
gggtggcgtattttccccctcggccaccgaaacctctctctcctcgagctagaccaccatggcgacgacggtggcgacggccatgcgacgccgacgaaatctcactccctgcgacagccgcctcgccaccgcagtccccctgctcgtggcgttcctcctcctcctccacgcgccgccgctcgcggaagcgcagccgctgccgtggcagatgtgcgacaccgccggcggaaactacacggaggggagcacctaccaggccaacgtgcgcgccctcgccagcgctctcccggtgaacgcctcctcatcgcgcgccctcttcgccaagggcgccgccggcgcggcgccggacgtggtgtacgccatcgcgctctgccgcggcgacaccaacgcctcctcctgcgccgcctgcgtcgccaccgccttccaggacgcgcagcagctgtgcgcgttcaacaggcgcgccaccatgttcgacgacccctgtatcctccgctactccgaccaggacatcctcgccaacgccaccgacggccaggggaatttcatcgcctggaactacaacaacgtcagcgcggcgagggcggcggcgttcgacgccgcctccggccggctcgtcaacgccacagccggctacgcggcggcggacccggtcaggcggttcggcacgggggaggtcgggttcgacgacgcgacgtacccgaggatcttctcgctggcgcagtgcacgccggacttgtcggaggccgactgccggagctgcctcggccgcataatcaggtgggtgccccagtatttcgccgggaagcccggcggcagggtcttcggcgtgcggtgcaacttccggttcgagtcgtactcgttcttctccggccggccgctgctgcagttgccggggccgccgccggcgccggcgccgtcgccggccaacatggcgccaccatcaccaccggggaccatgggaggaagaacaagacatagaacaggacgtgtcttggccattactctgcctattgctggagcaatattagcactcattgtcctgacatgcttgtttttggagaaggagaacacctgcaaggaaggcctcaccagtgccatactcaacaaacccagatgacattcagagcatcgactcgctccttctggacctatcaacgctacgggctgcaacagacaacttcgctgaaagaaataagcttggcgaaggagggttcggtatcgtttacaagggagttcttcccgaaggtcgagaaatagctgtaaaaaggctctcacaaagctccagacaggggatagaagagctgaaaactgagctagttttagttgctaaacttcggcacaagaaccttgtgagccttgttggtgtttgcttggaagaaggcgagaaactactggtgtacgagtacctgccaaataagagcctcgacaccattcttttcgattatgagaaaagcaaagatcttgactgggggaagaggctcaatattgtaagcggagtcgctcgaggcttgcaatatctccacgaagactctcaactgagggtagttcatcgagacctcaaagcaagcaacgtgctgctggacttcgatcacaacccaaagatttcagactttgggttagcgaaactgtttgagtgggatcagacgcaagacgtcaccagtcacatcgctggaacatatggatacatggcaccggaatacgccatgcgtgggcagtattcagtcaagtcggacgcgttcagttttggtgttctgatcatagagattgtcacgggaaggagaaacagcagcttctccaactcggagcaatccattgacctcttgagtcttgtatgggagcactggacaacggggacgatcgaggagctgctggatccggcgataggcagccgtgcagtgaacgttctgctgaagctgatcaacatcgggctgctctgcgtccaggacaacccggcggacaggccggcgatgtcggcggtgaacgtgatgctcagcagcgacacggtctccctccaggccccgtcgaggccaacgttctccattcaggagatggacggcgccgccgacacggatctctacgagtcgggagcgtacccccggagcgcgttccagcccaccggcgacggcaacacgagagcagcggcggcggcgtcgccgaatgagttgtcgctctcggagctggaaccaagatgagcgtttcgaatttggagcgatttgtgcggatgaccgcagggtttttcttcaataacgaaagaatcaacacgtgtggcctctgcacttgtttgtcgataataataaataaatgccctcgttgacggttggttggagctctgcatatagttgcaagattgtttt

SEQ ID NO: 25281 - DNA, 2939 bp, Oryza sativa
  ref <308>: DATABASE ACCESSION NUMBER: AK100723
  ref <309>: DATABASE ENTRY DATE: 2002-08-28
gtatcggtcccgtcccggctccctccgcgctcacgcttccctcgatgcgcctgttcgtctgccgccgccgcacgcgctcgatcggctcgtgggtgtggaaattggaaagctcctattgcgtgcccctggattacgcggacttggagtgagacgtctcatcctgcgccccaagatcacggccaaaatcgccggcaaccgcagcactgcagcagccatggcaggacaagtctccacgggcaacgcagctgcatcagcttccatggcaggagaagggcaggaggaggaccctgcagccgccgggacatctcatctcgtgtcgttttcacctgccctagcacatggcaaggaaggacatggatttcaatcacctgcgcccatggatgccgaaatcgccggggatgttggagccggcggcgagcggataacgcagaaagtggatgataaagttgtgcaaactttgattgttcctcaagttggaatgtctttcgaatcaaaggataaagcatatgagatgtacaacacctatgccgggaaggttggattcagtattagaaagagtaatgtaaagcgccgatctaatggaactatatatcaaaagcatatggtttgcaataagcagggacagcaagaaactagctcatcactggacactaccaggacatgttgcaaggctcgtgttcagtttagtgtttgtcgaaaggaaatttggatggtgcaaaaagttgtacttgaacacaaccatgatcttgtcagtccaaataagtcgcacaagctgaggtcccaacgacgtgttatagaagcggataggcaactaattggccagataagggaagccggaatgaagccagcccaagtgtatggctttatgaaggagtggtatggtggagctgacaaagtgccattctcaaagatggattgcaataatgagattggtcgtgaacgcaagaagtacttagaatccaatgacacacaaacactactggaatacttgaggaataagcagttagaggatcctacatttttttatgccattcaagtagacaaagaagatggccgaatagctaatttcttttgggcagatggtcaatctatcatggattatgcatgctttggtgattttgtatcatttgacaccacatttgacaccaataagtgtgaaatgccttttgctccactccttggaaccaaccatcacaagcaaacaataatttttggggctgcattgttatttaaccaaactattgaatcatttgtttggctctttgaaacctttctaacagctatgtcaggcaagcatccaagcacaattttcactgatcaagatgcagccatggcagcagcaattgcttttgtatttcgaaatacaagccatcgtctttgtttgtggcacatttatcttaatggtggtaaaaatctcagccatgtaattcataagcatcctaacaagtttctagctgattttaagagatgtgtctatgaagacagatcagagtattacttcaacaagatgtggcatgaattgttgagtgaatacaatcttgaggataacaaatggatatcaaacctatataagttaagggagaagtgggctattgtcttccgtaactcttttacagctgacataacctcgactcaaaggagcgaaggtatgaataatgtctacaagaaaagatttcgtaggaaactcggtctttcggaactccttgtagaatgtgataaggtttcagctactctccgtgaaaatgaattggatgcagattttaagtcccgacactcgaacccggttacttacattccaaatttacctatgttaaagattgcagctgaatcatatactaggagcatgtattcagagttggaggatgagtttaaacaacaatttacattatcatgtaaattgttaaaaactgagggagcaaccttgacatttgtggttatgcctatggaatatgatcacgaagcgactgttgtattcaaccctacagagatgaccatcacatgttcttgcagaaagtatgaatgcattggcttattgtgcaagcatgccctcagagtcttcaatatgaataaagttttcactttaccatctcattatatactcaatagatggacaaaatatgcaaagagtggattttacattcagaaacaaggaagtgagaaggaaactttgaaagcacatgctgcacgtatctctcgacatgcgacatccgttgagttgaagtgttcagtgtcgaaagaacttcttgatgatttggagcaagccataaataagttggacttggaagcagacaattctttaagcaagatgcaagaaaaatcctgtgaggttcctctaaattcaaatggttgtgtcaaggacacattaaatggtactatatcgtttttagttcctcgggtggtgaaaggcccaaaaagtcgacgatcaaaagatgtagttgaaaagaagaaatggcagaagaaatgtgttgatcctacccattgtagcatgttatttcctgttctcttaatcttgtttgttttcatcctcttatatgctacatccatgtgacctatagttgaagatccaaataatgcgtcagaaaatagagatgaagatgctggtgatgtgtatgggcaatcttcaaccatggatgcaaatgatatgtatgggcaatcttcaaccatggttgcaaatgatgtatatggtgaatcttcgaccatgcctactcctttgatccaaggcggatatacaaatcttttatttgaagtccaacaagattgcacattttcctcgtctgctagaaagttacattttccaatgaatagtaggccttttcagaatggatttgggtgtgtgcattaatctgtactcatttacttcttttactgtgttgaactcgattttatttccaattgggtgtagaaagtttaggcattcagtaacagactgaatgttaccc

SEQ ID NO: 25282 - DNA, 2148 bp, Oryza sativa
  ref <308>: DATABASE ACCESSION NUMBER: AK100724
  ref <309>: DATABASE ENTRY DATE: 2002-08-28
ggcttcgctgccttttgccttcttcctcctcctctccaccaccaccgccaccggccgacgcatctccgattcgatttcgccttcccacgaatctatctccccccgagtccccagcgagatggccacgtcgttcgaccgctgggagaaggaccccttcttcccggccgccgaggaggtgcaggagtccgccgaccggatggagtcggtgtacaggaggtggttgcaggagaggaaagaagtaggtggcggcgcggtggagacggcggcggaacgtggtggtggtggatgggggcgagccgctggggatctccgccgcgagctgcacacggcgctcggcaccgccaagtggcagcttgatgagttgcagcgggctattaaatcaaattatagtgttgtgttagctggcaaagatactagagctcggcatgatgactttgtttcagccattgggcatcgtatcctagaggtggagaagttcttgaaagaatccaatactactgaagggcgtggccctcttagctgggttcgcttggatgagggtgaacgtgaagagttagctcatttcctttcagcaggaacttatcaaaaacgtgatgaggtggttacaattacatctgctggtgacattgaggttggtagcaatgcaagaagggtgaaaaagggtgtttcaattgatagttcgaatgattcttcgggctcagcagagtcaggtttagtgtcaactaaggaggagacagctccaggtcataggagaacggcaagtgcctatgctgatattggatcatggactattacaattcctgatgaggccaatggcatcgatgaacaatcatttgatgatctgcccaaggtacctttggttaagagccctagctcttctgtattaatgaatgccttccaatcaaagacaagaatgaagacaaagaatggagccaagaagttggctggagctgaccaacaggatgttgtggaaactcttcctctgacaaattctcgctcgtgccaggggtttgatgggttgtttcaaagaagcaaaagttgcttgagcacctctgatgatgaggataactgcaataagaaactttatggttgccttggtgcattccgtcggctacttcagaggtctcagtatcaagttcaatatggacgtcctattcagttacttatcctagcaattgttgttttactagtcttaatttatgccatgaaggcaattttgtgacttttttgatcaactagtgtctcacgattgacttgcacttcttcatcagcagtctgtaaggtgtatgacaattcatagctgatgaaactaaaaggggaagtggtattgtttctctagctagttgaatgccagtgacagtgaacactgttttgtatgttcgaagggattctatcataactcgcaagattgtcttggctatgaagaaacaacctgacatgggaagcacaacatttagcaacccaatatagcaaaatcagtgaaggattgattgtatggaccggcagatcatttcgtgtgccttaagcccagaggaactgaacaatcatcttcatataccagttttgctgatgctgcatctgcaacattttaaacagtctggtgcagtactgcagccttgttaacctgtgcaattcagcagtacatagagctagaatgctgatgctacaactggcaaacaacagttttgtgcacgcagctgtggggtttgcctggataattgagtggcatctccatgtactgtattccaattactgatgtctcaagtatagtgctaggtggcatgaactttgcggaagaatttgagtacctatattttgatgctatagattggcttggagaaggctgaaaattcatctattaacacaagtatcgcaagagctgcaggactacaggtcttgcagcctgtacagatggttgtgttttgtacactagaggtgcagtttagaagaacagaaaaattcttctgttcttagacattggagtaacttttaccacacgattggcttgtaacctgtaaataactactgcttcaaatgagcacctgttcttacaaatttgataatgttgggtgtcggtctgcactgcaacatccaaaaaacctttgtaagtaagcacatgtcaacagcttgaaattcaacatacttctg

SEQ ID NO: 25283 - DNA, 513 bp, Oryza sativa
  ref <308>: DATABASE ACCESSION NUMBER: AK100725
  ref <309>: DATABASE ENTRY DATE: 2002-08-28
gacttggaaatcggtggatcggggaggcgacggagccgcgatccatcagcgactcaggaggctgcggcgttcaccagtggcggcgatggcatgcatgtccaggcgatgggccgagcgcggccgcggcgtctgcggtctgccggaggacaacaacaacgatccatcggcaatcctgtgcgcgcggccgtgcgtcaatggtgtcgtgatgtctgcccgtgtcgccgttcggcgatatttgcccaggtggtggacggcggagtgacatcacggtgcaatgggaaaatggctttgttcagagattgtcgttgcctcgttggatcgttaatctgtctgtagcagtagtttgagaatccggaatatttctcagggaaataatctttgtgattctcgttggtattctacttttttatttttaaagtatgggcggggtatatgtatgaattaaatagcgtatacttctagtattctgattatgattgtacattatttttaatcagcatacgcttcaatctg

SEQ ID NO: 25284 - DNA, 1834 bp, Oryza sativa
  ref <308>: DATABASE ACCESSION NUMBER: AK100726
  ref <309>: DATABASE ENTRY DATE: 2002-08-28
ggaaggcagagaagaggaacgagtcgtcttctccaaggcgtccgaaaaatctctccgttctctcgcaagccacagtacttcctactcctcctattcatgcccccggccccgaattggatacgctggttatttcagaacaaaagtcagtttagattcgactggaggcctaactggtggtaatttgaagcattttggttcgctttggggggccagtagaggcaaaaggtctgattttttttatcgaattggtcgcccttttgattggagaatcgtcaagctcggcgtgagagtttctttggcctgtgctcgcctgagagtagaaggctgtggttcttgctcggcaaaatttgggcttatccttaaatcggaaggcgtgggcagctaaattcacaaggaaagcttcagttacccacggaagaaggatttcccttctctctcagagactcggattggtgatggcccggcgctgaattgctctgaaatctgccgaaagcatcgatctttgtctccgaaagatcagggattgggccctcgtatccccaattcgccccacctccaagacggcggtcgggcttgtagatggggtcggggtcgagcatcctcggtgcggacggggaatggggggtgacgtcccttggagacatgccggagagctgcgtggcggcggtgctgctctaccttgatccgccggagatctgccaagtcgcccgcctcaaccgcgccttccgcggcgctgcctccgcagactgcgtctgggccgggaagctgcccgtcaactaccggtacctcctagcctttgcagctgccgctgatgacgaaggtggtgacggcggacacggtaatggcaagcgcagctcgcccagcagcaagaaggatattttcgcgcgcctatgtcgaccgactccattcgattttggcaacaaggaattctggattgacaagaacaagggaggtatttgcttgtctatctcctcaaaggcaatggtgattacaggtatagatgaccggagatactggagccaacttgccacagaggaatcaagattccaccatattgcctatcttcagcaaatttggtggcttgaggtagatggagagcttgatttttgcttccctgctggttcatacagcattttttttcggcttcatcttggacgaccatacaggcgcatgggccgccgtatttgtggaactgaacaagtccatgggtgggaagccaaacccacacggtttcagctctcaacttcagatgaacaacatgctacatcagaatattatctagaacaagaaggaagctggatactttatcatgttggtgattttgttgtactgaactcggacgagcttatgaagctcaagttctcaatgttgcagattgattgcacccatacgaaaggtggcttgtgcgttgattcagttttgatatatccaaaagggtatcggcatgaaaaggcaaatatagtgcacatgtagtgctgcagaatggttgcaatactccagcaacatgagacaattcagtggggtgtggctagctttttcctgtccgttctttcctgaaagtccatgtgtatatttttttccccttgagttttacatgatgtaaggccttttgtattcttttatagtgttagggtagggaagtaaagggcgagttttttttttaaaaaaaagaacttaaattggcatgataattgttgagtacagagtcctagtcgtttaaaagtagggacagatgccatcttcatatgtaatttttcatcagtgcaatgatgtttggcgatctggatattcctctttgcttattcccatggcttaaagctgattttatcttctc

SEQ ID NO: 25285 - DNA, 2924 bp, Oryza sativa
  ref <308>: DATABASE ACCESSION NUMBER: AK100727
  ref <309>: DATABASE ENTRY DATE: 2002-08-28
gttctgcggccgcgccatctctatccgggctcaagggtgtggccggggggcgacgaacgccgctctctctgccttcctccttgaccgatcgctcccttctgaccgccttaatattctggaaagatcggttcttgccttcttgggctgcttcaggggcgtgggagaggtttggggttggttcatctcgcgggcttgggcggcgggaggaggagaggggttttgctttgtctcctgttccgactctccggttgattcctccgactgagttcagggggagttcttcaatcaggaaggtcttgactctcgacgaggagttcaaggttcttggattaaagattggcagtcattcatcgtggatggagaataggaacaaagaagatatgggtccatcccagcgtaattcttgccctaaggttcacagctcaatatgcagtgagctgacaatgatgttagataaagtctcctctattcttccattaattgaggcagctcgaccaggatgtaaagcaggtatacaggaattatgcaacctatacaatatagttgagaaagggaaactcataattcagcactgcgttgaatgtagcaagctctacttggctattactggagaggcgattgtatctcggtgtgaaaggatcagagactcacttaggcggagcttgttcctgattgagaacatggtcccaccagcactagctaatcagattgttgacgtccatgatgatcttggggacataaaatttgttattgatcccacagaagaagaggctggcaaaaccattttagagatgcttcggcaatctgatgtgactgaagaacttgaacttgagacattcctgcaggcagcttcaaacttaaacctgacatctcctaaatctatgctaattgaacgaagggctatcaagaaactgcttgacaagattagcggtactgatcccaaaaaggagggagttcttaagttccttctataccttgttaaaaagtatggaaaaaacatcaaaccagaaactggtgagcggaatgaaaacatgcaatctgaaagccagtcttcgactccaagctcaagttttgttagtgataccagcactcctggaaagtggtacacacccacagacatccagaggaatgaggatcagactagtatgtcaggagcagccacaccacctgcagagttctgttgcccaatatcaacaaagttaatgcgtgatcctgtcataataacatctgggcagacttatgaaagagaaaatattgagagatggtttagggagggatatgatacctgtcccaggacacatataaagctagaaaatttcgcgatgattccaaatacttgcatgagggacctcattttcaattggtgcaaagagcatggtttcataatctcagatattctccctccatccaaaaatgcatacagttacttgccggagcaattgcatggttactccatgtcaagtctgcacaatgtttcagtacctctaattgctggaaaagtcagggattttgtgattgaccatagcacttcatctgttgcattatctgaggccagttatatgtcagattcatatcatgtgcgggacatggaggaaccgaaagatagtttttctcagttctcttggagtgcggactatcaagagtgtttgtcttttcgcaacttcaaccaggacaagttcctaaggttcttttacgagctgtcgaagctcccattggaactccaagacaggtccattggtgatttgaagatcattctcaatgaggaaaatgaggcttcatgtgctatggtttccaatggatttgtagaggcattctttgatttcttaatgaatgaagatggaagctacagtatgcaagctcagaaagttggatttcagttctttcgtgtttttctttccaatagcaggactaatattctacacatgaatgaagaagcattccgtctatttgcatcctttattgattctgagttaaaaaccgaagctttgctgacacttcacgagctggttcaacacctgagttgtcgacaatcccatttgatggcctctattatcactcctttattggagtctgaagatgccgagggtctcaagctttgcctgaagattgtctgcaatctttcatctgattcggatgtaaaaccatacctaatttcactgggaattgtctcaagattgtcacccattctttctgaaggaacctttgctgagtgttgcttggagattttgcggaacctgtgtgatgtggaagaagccacagtgcttattacaaaaactgatcgatgccttggttccgttgcagaatatctggacactggaagccctaaagaacgagagcatgcagtggttatccttttagcagtatgttcccatagttctgaggattgtttacttgtaatgaaggaaggtgtaatgcctgcccttgtggacttgtcagtaaatggaattgatgaagcaaaaggttgttcaatgaagctacttcatcttctcagggatctgaggcgaaccgaccagttgaacaactcatgttcacaagaagtggttgtcacagatgtagtggagggtcctcctgacagttcaattcacaagcagccaataccaaagtcatctcgttttttccaaagaaagttgaacattttctcaaagccccggtcacttacgctattctgaaaactgcgccaggatgattcaaggtggtgccggctcctatcccgttggatccttacggagagaggggaggaggaagaaggagaggaaaagaaatagggggcgttgaggaagagaaggatccttatggagcttatggagagaagtaggggcaccgaggaagaagaaggtgagcctccctttcatattaatcctgtaaatgacggttatctaaatataatctttttccatgttatatcaaggatatacaaacaaccc

SEQ ID NO: 25286 - DNA, 1436 bp, Oryza sativa
  ref <308>: DATABASE ACCESSION NUMBER: AK100728
  ref <309>: DATABASE ENTRY DATE: 2002-08-28
gcaggagaaaccaaaccagtggctaagccatcttcgatcgcagaaacccgcggtgcgtagcgatggcccggccacgcctcctcctcctccctctcctcgccgtcgccgcggcggtgctctcgtcgccgctcggccgcgcgctcgccaagacggccaagaagagcaacgacatcgtcaatggcccactgctcacctccaagatcaacgccaagcgcacgctgatcgtcggccccgaggacgagttcaagaccgtgcagtccgccatcgacgccgtgcccgtcggcaacaccgagtgggtcatcgtccacctccgctccggcatctacagggagaaagttatgatcccggaaaccaagccgttcatcttcgtgaggggcaacggcaagggccggacctcaatcaaccacgagtccgcttcctcccacaacgccgagtctgccgccttcaccgtgcacgcggacaacgtcatcgtcttcggcctcagcatcaggaacagcgcgcgcgccgggctgcccaacgtcccggaggtgcgcacggtggccgccatggtcggcggcgacaagattgccttctaccactgcgcgttctacagcccccaccacaccctcttcgacgtcgccggccgccactactacgagagctgttacatccagggcaacatcgacttcatcttcggcggcggccagtccatcttccaatgcccggagatcttcgtgaagcctgaccggcggacggagatcaagggctccatcacggcgcagaaccgcaagcaggaggacggcagcggcttcgtcttcatcaagggcaaggtgtacggcgtcgggcaggtgtacctgggccgcgccaacgaggcctactcgcgcgtcatcttcgccgacacctacctctccaagaccatcaacccggccggctggaccagctacggctacaccggatccaccgaccacgtgatgctcggggagttcaactgcaccgggccgggctccgaagcgacgaagcgcgagccgtggtcgcggcagctcacccaggaggaggccgacaagttcatcaacatcgacttcatcaacggcaaggagtggctcccggcgtactactactgatcatatccaaccaaaaagagaaacgtagtaacatgtatgtgcgtgtgcatgcatgctctgggccggctagccgtaaccatggtgtcaagagttctaaacttctaatcgaaacggaagcgcactggaacgattggtgtctttgcagtaggaagatggcagatttaatttgttgatcatgagctcgaaatgaacttgcgcattttattgcttacaagttagaactgaggcacattgctcggtttatgactgtccagtgcatagaacatcacatttaattttcatgtgtatattatatgccctaaatatattatttctgctacttttaattcggttcct

SEQ ID NO: 25287 - DNA, 1959 bp, Oryza sativa
  ref <308>: DATABASE ACCESSION NUMBER: AK100729
  ref <309>: DATABASE ENTRY DATE: 2002-08-28
tcctttcctcgcgtcgtccccttcgcggagcctccccttcgtgggcgcgctccattgctctctcccctcccacccaatcctattatgacattacgatgcctatccccattgccttcctcttcctcctccccctcctcctcgccgcctcctcccatgccaccgtctcctcccatgccaccgcctccgtcgtcccacaacctcgagggttctatataaactgtggatcggagaaggaggagcagatagggagcatcaagtggatacaggatgaggggttcatcgccgtcggcaacatgtccgccgtcgacaagccgaacatcctgccgctgctcgccaccgtgcgctacttccccgacgcgacggcggggaagtactgctaccagctccccgtcgtcaaggggtcgcggtacctcgtccggacgacctacttctacggcgggttcgacggcggcgacgttccgccggtgttcgaccagatcgtcgacgggacgcggtggagcgccgtgaacaccaccgacaacttccggcggggcatgtcgacctacttcgagatggtggcggaggcgcaggggaagacgatgagcgtgtgcctggcgcgccgcgccgacacccggtccagccccttcatctccgcgctcgagctcgtcagcctcgacgactccatgtacaacaccaccgacttcgacaagtacgtcatgagcacggtggcgcgcagccggttcggcgccaagggcgagatcgtgagctatccagatgaccagtacaaccggtactgggcgccgttcacggacgcgaacccgacggtggagagccactcggcgatcacgccggaggagttctggaacgtgccgccggcgaaggcgctccgggccggcgtgacgacgagccgggggaagaagctgtcggtgcagtggccgccggtggagctgccggcggcgacctactacgtggcgctctacttccaggactcccgcacggcgagcccctacagctggcgcgtcttcgacgtcgccgtcaacggcaaggagttcttccgggagctcaacgcctcggccgccggcgtcatggtgtactccaccatgatgcctctctccggcaagatggagatcgtgctcacgcccaacgagacgtcgccggtcggcccgctgatcaacgccggcgagatctaccagattgtgccgctcggtggccggacggccaccagagatgtggttgcaatggaggaacttgccaggagcatcaagaacccgccgccggactgggccggcgatccttgcctgccgcggcagaattcgtggaccggggttatctgctccgagggatcacccgtgcgcgtcgtatcactggatctaaaaaatcatggtctttcaggatcgctccctgacagtattggaaatttgactgggatgaaaaatatctatttcggtggcaacaaactcacaggctccatacctgatttgagcagcatgcacatcttggaagaattgcattttgagggcaatcagttaagtggaccaatcagcccatcgctgggaacactcaccaatctcaaggagctatacctgaacaacaacaatctcaccggccagataccagagagcctgaaaaacaaacctgaacttgacatgaggactgaggggaacaaacttaattgaggctggaaaggaaggaatatctgagatgatcatttccaatctaatgttacatttatgtacagaaagatacagtttgatgatgaagggagaagagcgaaggcttcagaaactgtaggatgatattcatgtatgatgctgtatgtgagttgaaagattgatgtgatatttagcatcatccttttgatccattttgtgttattagtatttgttgtacatgctgcattagatggcattagtgtaggataattgttaggtcaaagaagcagttcataatctaaccaatctaaacgccaaaagttgtacc

SEQ ID NO: 25288 - DNA, 2393 bp, Oryza sativa
  ref <308>: DATABASE ACCESSION NUMBER: AK100730
  ref <309>: DATABASE ENTRY DATE: 2002-08-28
gggagctcacccacgcacgcagccgtctcgtctcccttcttctctctcctctcctctcttctccggcacaccacaccccaatcctcccccgatctccccaatccgagagctccggaggagcagcgcggaggcggagatggcgctgcggcgagcgctgctcagatctgccgagatctcccccgatcgcaaggctgcacttgagtacctccattatctatcgagagcacagcctactcgttctctaacaggtgctggcctttattctgctggcaaatcattcagcactcaggctgctactacatcaagcacaccacaacctccaccaccacctccacctccggagaagactcactttggtgacctcaaagatgaggaccgcatttttaccaacctctatggtcagcatgaccctttcctgaaaggtgcaatgaagaggggtgactggcatagaaccaaggatttggtgcttaaaggggcagactggatagtgaatgaaatgaagaaatcgggacttcgagggcgtggaggtgcaggattcccttctgggcttaaatggtccttcatgccaaaggtatctgatggacgcccttcttatcttgttgttaatgctgatgagagtgagccaggaacttgcaaggacagagaaatcatgcgtcatgacccccacaagcttctggaaggctgtttgattgctggagttgggatgagggcatcggctgcttacatctacattagaggtgaatatgtgaatgagcgtctcaaccttttgaaagctcgggaggaagcatacgcagcaggtcttcttggtaagaatgcttgtggatctggttatgactttgatgtgcatatacattttggtgctggtgcctacatttgtggtgaagagactgccctactggaaagtctcgaaggcaagcaaggtaaaccaaggttgaagcctcctttccctgccaatgctggcctatatggctgccccacaactgtcacaaatgttgaaacagtggctgtgtctccaacaattctcaggcgtggtccagaatggtttgcaagctttggacgcaagaataactcgggaactaaactattctgtgtctcaggtcatgtgaacaaaccttgcactgtcgaggaggaaatgagcatacctcttaaggaattgattgaaaagcactgtggaggtgtgagaggaggatgggacaacctgcttgcaattattcctggtggttcatctgttcccttgttaccgaagcatatatgtgatgatgtgttgatggactatgatgcactcaaggctgtgcaatctggattgggtactgcagcagttattgtgatggacaagtccacagatgttgttgatgcaattgctaggctatcgtacttctacaagcatgagagttgtgggcagtgcacaccttgcagggagggaacagggtggctgtggatgatcatggagaggctcaaagtaggtaacgcgaagcttgaggagattgatatgcttcaggaggtcactaagcagattgaagggcatactatttgtgcccttggggatgctgctgcatggcctgtgcagggacttatcaggcacttcaggccagaactggaaaggagaatccgtgagcgagccgaaagggagctactggcagcttcggcttaggacactgtcaatgacgatcctgcactagtttcctgatttctttcacagaaataatgcaaactgatggagctcatctctgtatacgaaatgcagctcccctgatttgtttaaacctttatgtggatgtttatttaatgcactcagaagctggtgaattttgatggactgatgaaaacttttttaagtagaaacaaaatgcagttactgtaccatgtatgtcacatgagccagcaaaatatgatggtggatgtggacgtgtaccctgcttgtttttttttcactgttaaactatgcattgtttgaaattgtctagagttcgtgtgagctggttgaaaccatgtctacatctggggcctatgtttgcatctaatgagccagcataatctcatctgcatggcatattgttgatctgcatacttctatagggccaccggccctggcatgcatctgttcgtgattaaccaccggatgcttcatggtggttgggatatctacaaatgtattctggacctgtgtttattgtactgtttggtacagcacgtatccatcagctggtatgccgtgccgtatccagtagttgccaccgtcagatatctctggaatagttgggcttgccggttactgttcttccattttgtctccaggaatctgaatttgcaatggaacagttgagttgactgtgtccagaagatgtgtaataccaaactattttataatctctgttaagtaaaacatgagcatt

SEQ ID NO: 25289 - DNA, 1481 bp, Oryza sativa
  ref <308>: DATABASE ACCESSION NUMBER: AK100731
  ref <309>: DATABASE ENTRY DATE: 2002-08-28
gaggcagcgaggagagagagagagagagaagaggagaggttggtggcagaggaggaggaggaggaggaggaggagaagcttctagaaggggagcggggcggcatgggggactcgagccggtcggtgtccatcgacgtggagcggatctccttcggcggcaaggaacaccgagtgcgaaccagatatggctctgtatctgtttctgtatttggagatgaagacaagccggcgctcataacatacccggatgtagctctaaattatatgtcttgctttcaaggattgttcttctgcccagaggccgcgtcgctgttgcttcacaatttttgtatttaccacatcactcctcaaggtcatgagttgggagcggctccaatttcatccgatgtgcccgtgccatctgttgatgagcttgtggatcaagtcgcggatgttcttgatttcttcggattaggatctgtgatgtgtttgggtgtcactgccggtgcctacattctcaccctctttgcaacaaaataccgggatagagtgattggccttatgctagtttcgccgctatgcaaagccccttcttggagcgagtggttgtacaataaggtattattaaacttgctttactattatgggagtcgtgggctagtcaaggaatgcttgcttcagcggtattttagcacggaagttcgtgggaatggacaagaccctgaatcagagattgtgcaagcctgtagaagtttacttcatgagcgacagggatctaatgtatggcgattccttcaggcgataaacgagagacatgacctgacggaagcgttgaagaagcttcagtgtcggacactgatttttgtgggagagaactcacagttccacgacgacgcagtccatatgaccacaaagctagaccggagatattgcgccctagtcgaggttcaggcatgcgggtcactcgtcaccgaggagcaaccgcacgcgatgttgatccccatggagtacttcctcatgggatatgggctctacagaccttcccagctggatagcagcccccggagcacactgaacccattctgtatatcgcctgaacttctgtcaccggagagcatgggagtgaagctgaagcccatcaagactcggatctcgctcaaagtttagcaattggcaaatgaatgaatccttgatggcctgacaatacaagctcatgaaggtggaacactgcatgggctagtctgaattcagatggtcactgccagcaagttttggtacctccagtgatgcagctaatggcagttttttttttcttttcattgtggttaactgatataatctgtatcgatgtgttattaggcagaggtgggagtgagtttgtaggggagaagggtgggtctgtttgttcatatgtttgtagtcagaaacacatgtatatctcatcacatcgttccatacgagaaaaagaagagagaaaatgatagaagcagaattttgttgtg

SEQ ID NO: 25290 - DNA, 4000 bp, Oryza sativa
  ref <308>: DATABASE ACCESSION NUMBER: AK100732
  ref <309>: DATABASE ENTRY DATE: 2002-08-28
ggatttctttcctcttccgtttcttcactagttcatttcacgccgcccccgcgcgagcggcgacaaggcgaaaccgcttcaatataagatcaccccaatcccccaattcggcaactccaatccaattcaattccccacccccgatccgcctctcgcaaatctcccgaaaccctagccgccaccgccgccgccgccgcctcgagcgaggcgtgatggggaagccggggaagtatggcgacggcgacgacgacgactcggaggaggagcagctctccccttcgtcttccgccggcgaggaggaggaggaggaggtagaagaggaagagggggaggagcagcaggaggagcagggggaggaggaggaggggtttagcggggacgaggaggagcaggaggtggagggtgaggcggatggggagcaagtggaggaggaggaagaggaggagtctagtgtcggggaggaggaagcagaggcggagggtgaggaggaggaagaggaggtggaggaggagcagggggctggggaagaggaagaggaggaggttgatgaggaggagatcgaggcggtcaccaccggcgccggaggggacgacgacgacgaagaagtgggcgatgacgggggcgcggaggaggagtcgcagtccacggaggacgacgaggtcgccgccgggaaggatggcggcggtgaagatggcgacaagttggaagatgctactggaaacgcagagatcgggaagcgggagcgagcaaagctcagggagatgcaaaagctgaagaagcacaaaatccaggaaatactggatgcccaaaataaggccattgatgctgacatgaacaacaaggggaagggacgtctgaagtatctcctgcagcaaactgaaatatttgctcattttgcgaaaggaaaccaatcgacagagaagaaatcacgtggaaggggacgtcatgcatcaaagatgacagaggaggaagaagatgaggagtatctcaaggaggaggaagatgcccttgatggtgcaggagggacccgtctggtttcacaaccatcatgcataaaaggaaagatgagagattaccaactagctggacttaattggctcatacgcttgtatgagaatggcatcaatggaatattggctgatgagatgggtcttggaaaaacccttcaaactatatcactgcttggatatttgcatgagtttagaggaataaccggtccccacatggttgttgcaccaaagtccactcttgggaactggatgaaggaaatacaacggttttgtcctgttctgcgtgctatcaagttcttaggaaaccccgaagaaaggaaccatatccgggaaaatttgttagtcccagggaagtttgacgtctgtgttactagttttgaaatggcaattaaagaaaaaactgcattgaagcgtttcagctggcgttatattattattgatgaagcccaccggataaaaaatgaaaattcccttctctctaagactatgaggatttacaatactaattatcgtctcctcattacgggcactccactacagaataatcttcatgaactttggtctcttctcaacttcttgttgcctgaaatatttagctctgctgagacttttgatgattggttccaaatctcaggggaaaatgatcaacatgaagttgttcagcagcttcataaggttcttcgtccatttctgcttcggaggcttaaatctgatgttgagaaaggtttaccaccaaaaaaggaaactatacttaaagttggaatgtctgagatgcaaaaacaatattatcgtgctctgcttcagaaagatctggaggttgtcaatgccggtggtgaacgcaaacgccttcttaacatagccatgcaattgcggaagtgctgcaaccatccatatttattccaaggtgctgagcctggtccaccctataccactggagaccatctaattgagaatgcaggaaaaatggttctgttagataaattacttcccaagctaaaggaacgtgattccagagtacttattttctcacagatgactaggctcttggacatcttggaagattatctgatgtacaaggggtatcaatattgccgaattgatgggaatactggtggtgaagatcgtgatgcttcgattgaagctttcaacaagccagggagtgaaaaatttgttttcttgctttcgactagggcaggtggtcttgggataaatcttgctactgctgatgttgttattctttatgacagtgactggaatcctcaagtggatctgcaagcgcaagatcgtgcacatagaattggtcaaaagaaagaagttcaagtttttcgtttctgcactgagtatacaattgaggaaaaggtgattgagagagcttataagaagcttgccctggatgctttggtcatacaacagggtcgattggcagagcagaaagctgtcaataaggatgagctattgcagatggtcagatttggtgctgaaatggtattcagctccaaggatagcacaataacagatgaagatattgaccgcatcatcgctaagggagaagaagcaacagcacaacttgatgcaaaaatgaagaagttcacagaagatgctattaagttcaaaatggatgacactgctgaactgtatgattttgatgatgataaggatgaaaacaaacttgattttaagaagttggtcactgacaactggatagagccaaccagcagaagagaaaggaagcgaaactactctgagtctgattatttcaagcaagcacttcgccaaggtgcaccagcaaaacctagggaaccgagaattcctcgaatgccacacttgcatgatttccagttcttcaacactcagagactcaatgaattatatgagaaggaagtcaaataccttgtgcaagcaaatcagaaaaaggatacggttggtgagggtgatgacgaagatcaactggaaccgttgactgtggaggagcaagaagagaaagagcagctattggaagagggcttttcgacatggacaaggagggacttcaatacattcatccgtgcttgtgagaagtacggtcgtaatgacataaagaacatatcctctgaaatggaggggaaaacagaagaggaggtgcagcggtacgctaaagttttccaggaaagatacaaggaattaaatgattatgaccgagttattaagaacattgagaaaggagaagcaaggatataccggaaggatgagattatgaaagctattgggaaaaagctagaccgctataagaacccttggttagagttgaaaattcagtatggccagaataaagggaagttatacaacgaagaatgtgatcgttttatgttatgcatggtgcacaaactcggatgcggaaactgggatgaactgaaagcagcctttcgcatgtcgcccttgttccgatttgattggtttgtgaagtctagaacaacccaagagctagctaggaggtgcgagaccctcattcgtctagtggagaaggagaaccaagaatatgatgagcgtgagagattggccaggaaagataagaagaatatgtcgccagcaaagcgttcttcatcaaggtcgctcgatacccctccacaaagctcttcgaagaggaggcgccagtcctacactgaagccaatgcaggctcgggaaggagaaggcgagggtgatctgattattgttcgttcctccccccatatgcatttagggagctcatttggaggttgacatgaaacccaaggggaaaccccagatacatcccaattgtctagcagtagctttagctcaaaaaaaaaaaaaaaaaactagcagacataactctagtgagatggttagcttgtataccggttaaagtggttgtgttttaaagttttaaattggacgggcaacattacaaattttaggtgatcataactataacaagtagttgatctctcttttggagacatcaatcaaataaaacaaagttgcttttacctgt

SEQ ID NO: 25291 - DNA, 1119 bp, Oryza sativa
  ref <308>: DATABASE ACCESSION NUMBER: AK100733
  ref <309>: DATABASE ENTRY DATE: 2002-08-28
ggcctgcctacctgtcctgtccgtccaccttgctgtgttaaatgcgtttctagcgtagcgtagcagatccaacaaacacctagcagcagcagcattggtacgtactcctcctagtcctagctagtgagtgagcgtgaggagcagtgagcatggcgtcgccacagctacagctgcaggtactagcgctgctgctgctgctcgccaccacggccacggccacggcgacgccgacgccgacgctgatattccttttgggcgggcagtccaacatgggcggtcgcggcggcgccaccaacgggccgtgggacggcgtggtgccgccggagtgcgccccgtcacctcgcatcctccggttgtcccctgagctccggtgggaggaagcgcgggagcccctccacgccggcatcgacgtccacaacgtgctcggcgtgggcccggggatgtccttcgcccacgccctcttccgcgccatcccgccctccaccgtcatcggcctcgtcccctgcgcccagggaggcacgcccatcgccaactggaccaggggcacggagctgtacgagcggatggtggggcgcggcagggcggccatggccaccgccggtgcaggtgcaggggccaggatgggggcgctgctgtggtaccagggggaggcggacaccatccggcgggaggacgcggaggtgtacgcccggaagatggagggcatggtgcgcgacgtccggcgagacctggcgttgccggagctgctggtgatccaggtggggatcgcgacggggcagggcaagttcgtcgagcccgtcagggaggcccagaaggcggtcaggcttccttttctcaagtacgtcgacgccaagggcctccccatcgccaacgactacacgcacctcaccaccccggcgcaggtcaagctcggcaaattgctagccaaggcctacctatccacgctctaattatatcatttgcgttcactgctggctactaagtactgattcattcctcaccttcccctctatgcaaaatctgtcatatggagcgcgtgctgtatgtaggggatgagtatcttaccacttcttccttcattccggattaaaatataatgttactgattttctttttccc

SEQ ID NO: 25292 - DNA, 604 bp, Oryza sativa
  ref <308>: DATABASE ACCESSION NUMBER: AK100734
  ref <309>: DATABASE ENTRY DATE: 2002-08-28
gatctcgcgaccatgcgaagagggaggaggagtttagcgaccacgccgacgatggtggcgcggcgcgacacgacggtggtggggtcgcgcatcgcggccgcggtcgccatcggcgtcgcgctcagttgtgtgtgagccttcatctaccccgacgggctcctctcccgctcctccgacaccgccctccattggccttactaggtaaaccgcctctgcgcctatctcccccatcctcggcggcggtgggcgcggtggcgctgcagcaggaacagctgccgccgccgcagtagatggcggcgccgccggtgatggaggtggactcaccgacgaccggagatgaagaagatgaaggtgtgtttattttgttgaagaagatggagacgggtttgtttagttggagtttagggatgttacatcctactgttttagcttgttgcactctgttgcattaaggtgtttcactttattttgatttgatgttgcattgcaatctattgtatatgtttgttgcactctattttattcgtgtgtttcatcggatgttcaacatgatgtacgatgtgttttcttcgatgttgcagaatagagtcttgatgttgcaagc

SEQ ID NO: 25293 - DNA, 1813 bp, Oryza sativa
  ref <308>: DATABASE ACCESSION NUMBER: AK100735
  ref <309>: DATABASE ENTRY DATE: 2002-08-28
tgatcctaccccccgttctctcctccccatctccaacgcacgcacgcgccatcaccaccacctcgacgccggcggcgacgaccacggcgacggcaacggcggcggcggcagagaagccctcctcatccccaagatggacagccataactcagcacctccccagattgctgaagtgagaatggacatctcatcatctacttctgtagcagctgggaacaaagtttgcagaggtgctgcttgtgacttttctgattccagtaatagctcaaaagatgcaagggagagaatggcgtcaatgaggaagctcattattgctgtgatcctttgcatcatattcatggcggtcgaagtggttggaggtatcaaagcaaacagtttggcaatcttgactgatgcagcccatctcctttcggatgttgcggcctttgccatatctttgttctctctttgggcagctggatgggaagctacaccacagcagtcatatgggtttttccgtatagaaattcttggtgccctggtttctattcagctcatatggctccttgctggtattcttgtctatgaagctattgtaaggctcattaatgaaagtggtgaggtccagggctccctcatgtttgctgtctcagcatttggcttatttgttaacatcataatggctgtcttgcttggtcatgaccatggacatggacacggacatggtcatgggcatggacattcccatgaccatgatcatggtggttctgaccatgaccatcaccaccatgaagatcaagagcatggccatgtacatcaccacgaagatggccatggtaattcaattaccgtcaatctccatcaccatccaggcactggacaccaccaccatgatgctgaggaaccattgctcaagagtgatgctggttgtgacagcacccaatctggtgccaaggatgccaagaaggctcgtcgtaatatcaatgtacacagtgcttatctgcatgtgcttggggattcaatccagagcatcggtgtgatgattggaggggctatcatctggtacaagcccgagtggaagattattgatctcatctgcaccctcatcttttccgtgatcgtactcttcaccacaatcaagatgctgcgcaacatccttgaggtcctgatggagagcacgccccgcgagatcgatgccaccagccttgagaatggcctccgcgacatggacggtgtggttgcagtacatgagctgcacatctgggccataacggtggggaaggttctcctggcgtgccatgtgacaatcactcaggacgcagacgctgatcaaatgctggacaaggtgattgggtacatcaagtctgagtacaacatcagccatgtgaccattcagattgagcgcgagtaggcttgaccgcttgagacaggtaggtagtgttgatgatagaacggatcatcttcatctcatctcatgggaccaacttatcaggaacctgtttcactggttttatgcagttactgttagctctgcagtgcaaatcagatcagcagagtccaacaattcctgcaggttcatctgaatgttagcttctgatgctgtttattactataagtacgtgttattagtactatcttagtcaattaggtgagttgatgttaatcagtttcgtagtcggttgtattcacatgggtgcagttttcagacaagttttcaggcacctgtgagtacgtcaacctgccttctgcgtctgtagtctagcgcccagccgtactagtttttatgtaaatctgcactggcatgggaaataataaccaagtttcgtttggcctt

SEQ ID NO: 25294 - DNA, 2169 bp, Oryza sativa
  ref <308>: DATABASE ACCESSION NUMBER: AK100736
  ref <309>: DATABASE ENTRY DATE: 2002-08-28
gaggggaacctctccgccgaggagcgcctccgccgcgagcgcgcacgggagcgcggcctcggcgtcacgcgctacgagtggcgcgcccgcctccccggcacccccgcctcccgcgccggcattgtcgtgccgctcccctctggggtttacttccaggatttgtctggtgctgaacctgtactcaagctgcaaagttcagccacatcccccatcattgacccacatctgtctccagatgggagcatgattgcgtatgtgcgggatgatgagttgcatacagtggggttctctgatgggcaaactacccagttgacctatggtgcaagcgaaagtgggaagatccacggacttgctgagtatattgcacaggaagagatggaaaggaagatgggattctggtggtctcctgatagcaaacaccttgcatttactgaagttgactcatctgaaatcccactgtatagaattatgcaccagggtaaaagttcggttggtccagatgctcaagaagatcatgcttacccctttgcaggggctgctaatgtcaaagtgcgccttggagttgtttcttcccatggaggagaaataacttggatggatctcctatgtggagaaccaaatagtatccatggtgatgaagaatatcttgctagagtaaactggatgcataatagtgctattgctgttcaagttctcaatagaactcactcaaaacttaagctacttaagtttgacatcgcttcaggtaaaagggaggtcatactagaggaagagcatgatacgtggataacattgcacgattgttttactcctctggataaaggagtgaatagtaaacatccaggtggatttatttgggccagtgagaagacaggatttagacacctgtatcttcatgacaagaatggtgtgtgcttggggcccctcacacaaggtgattggatgatcgaccaaattgctggtgtcaatgagagttctggagttatatattttacaggcacattggatgggccattggagacaaatctttactccaccaacctatttccggattggagccttcccttgcaagtccccaagaggttgactcatggcacaggacgtcattcagtaattcttgaccatcagttgctgaggtttattgatgtgtatgactcaataaaatctccacctgtgatcctgctatgctctttgcttgatggaagtgtgataatgcctctatatgagcagcctctgactgttcagccgcttaaaaagtttcagcagctgtctccagagatagtacagattgaaggaaaggatgggactgctttatatggaactctttatctccctgatgagaaaaaatatggaccacccccatacaaaacactcgttaacgtttatggcggtcccagtgtccagcttgtaagtgactcatggataagtacagttgacatgagagctcagttcctgcgtagtaagggtatattagtttggaagatggacaatcgaggaaccgcaagacgcggtttgcagtttgagggacagctcaaatacaacatcggtcgtgtcgatgctgaagatcagttagcaggtgccgagtggctaataaagaaaggcctagcaaaacccggacatataggtctctacggctggagctatggtggctttctctcggcaatgtgcctcgcgagatttcccgacacgttcagttgtgcagtttctggcgctccggtgacagcatgggatgggtatgacactttctataccgagaagtacatgggtctgccctcggagcagcgcgacgcttacagatacgggtcgatcatgcatcatgtgaagaacctccgagggaggctgctgctgatccacggtatgatagacgagaacgtgcatttcaggcacacggcgaggctcatcaactcgctgatggcggaggggaagccctacgatatcctcctcttccccgacgagaggcacatgccgcgccggttaggggaccggatctatatggaagagaggatctgggattttgtagagaggaacctgtgaatgtgaagagaggaagagagagagagaactacctgtggtgtataaatcttttgctcgctgtgggcatgacttgggatgttgttacagtatgttgaagctatttcatttccatcatcatcatctgtagttatccgc

SEQ ID NO: 25295 - DNA, 2292 bp, Oryza sativa
  ref <308>: DATABASE ACCESSION NUMBER: AK100737
  ref <309>: DATABASE ENTRY DATE: 2002-08-28
gaccaccaccaccaccaccgaactcgatccgccatgtgcccgcctcctccagatccgatctcgtcgccgccgccgccggcgatggactccgcgctgccgtccgccgtcctcgccaccatcctctcccgcctcgacgtccgctccctcgtcgccgcctccgccgcctgccgctgcctccgctcctgcgcctcccacgccctctccttcctcccctccttccacctctccgaggtggcgctgacgcacgagctgctccgcccgctgatgccgctgaacccgagcctgcggagcatccgcctcgactgcgctaggctcgaggacgccgccatcgactgccttgcccgcccccgacctccatgagctgatgctcctcaactgcgataacattagcggccgcctgctctgcgagcttggagccacctgccaagaactcagagtgctttccctgaatgcccttgctgagcgtaggggactaccgataagcttctctgatctgcagcaattgcttaatggctgttctcaattggagtctctcaggttggcccttgatttctcaatgttcgatgaccccaattttagccatgtgtgggcatctgcttcagaagccctgacctccctagaaatcggatatattccaatgacaatgttgcttgaacttcttactgtggctatggaatcgcaacgatgcatgcatcatgtaaaggaacctgttttctttcctagcctccaaaagttatgcctcaccgtggacttcatcactgaccatttgattggttcactatcaactgcgcttccatcattgacacatctggacctgcaggatgcacctataatagaacctacaacatcatcagatctcaccaatgctggtcttcagcagattaatccaaatggtaagttgaagcatatttctctcatgagaagtcaggagttcttattcacctctttccgccgagtaaatgatcttggaatcctgctaatggctgaaaagtgctcaagtcttgagagtgtctgtcttggtggtttctcccgcgtgacagacacaggttttagggctatcatccactcttgttctggccttcataagcttagggtgtcccatggaagccagttcacagatcttgttttccatgacataattgccacttccctttgcctgacacatgtgagcctgaggtggtgtaatctccttactgacgttggaattgagaggttgtcattcaacaaggatctcaacgtattggatctcagggactgcaggagtctgggtgatgaagctgttagatctctaagctgccttcccaaattgcagatattattcttggatggaagtgatatcagtgatcaggcattgaagtatctgggccttggaacatgtccactagcttccttatctctgaggggttgccgaaagttaacaaatggttgcataccactcttgtttgctggttctgttaaacagagcttacaggtgttggatctctctagaataccaggtattactgatgatggtatcatgttattagcaaggagtcgaactcctgttattgaactccgaatgagagagaacccgaaaataggagatgctgctgtgatggctcttgcgtctatgctagttgatgtggaacccatggcagtagcttgcagctgctggatctttatgattgtggtgcgattacaccacttgcaatccggtggttcaagaaaccatatttcccaagattgcgatggctaggagtaacgggcagcttgaacagggttatggtggatgcccttgttcgaagccgtccattcttacatatggcttgccgtggtgaagaattggggactttcaattgggatagatcctccgattggtatcgacatgatgatgatgatcttgatgagcttgaacagtggattttgaatggtgaacctgtatctgacactgaaaccatcactgaagaataaggcatcactctttaaggtttcttgacccacaataatctccctgttctagcctgctagtgttcatctcctgttgtacctccaccatttcatttttctttcttataaagctattgtgtgattgtctctaccagttgaggtattttcttgcggtgtatgcatatgcaaacctatccgttgctgtatacttgtatcacgcaacacgcatacacgatatgcatgttgcattcagattccctgggcttatgtatgtacattgtttgctttcctgacctgatgttgtactggtatctttttccaggtttcagcttttctcatagttaagttatttatcgaccttatgcc

SEQ ID NO: 25296 - DNA, 3378 bp, Oryza sativa
  ref <308>: DATABASE ACCESSION NUMBER: AK100738
  ref <309>: DATABASE ENTRY DATE: 2002-08-28
gatctgcatttgtgttcttttatttttcattcaatgacattttttatgttcctatgatccttttgtgttctcgggtgtaatttgttgccaactatatcataatgagcttttgttggtgtttgggtgaccattgtgatgtttgaactatgatcatatcattcatctttttcttaaaaaaaaaaacttgtttgcagttccagcatgatgttagcgtcgttttgagacaaaatcaggaaaggctctttcacaacatcaagcatgtcaatttctatgaaagatgtagatccggctttccgtggagttggacaaaaggatggtttggaggtatggcgtattgaaaacttcaagcctgttcccgtgccaacatcttcacacggaaaattttacatgggtgattcatatatcatcttgaagacgacagccttgaaaaatggttcatttcgccatgatctccactactggcttggaaaggatactagtcaggacgaagctggaactgctgcaattctaactgtggagcttgatgctgcccttggagggcgtgctgtccagtacagggaagtacaaggcggtgaaactgaaaagcttctctcctattttagaccatgcatcatgccacagccaggaggggtagcttctgggttcaatcatgtagaggtcaatcagcaagatcatgttacccgcttatatgtgtgccaaggaaagcatgttgttcatgttaaagaggttccttttgttcgttcatcccttaatcacgaggacatattcattttggataccgcgaacaaaattttccagttcaatggctctaactcatgcattcaagagagagcaaaagctcttgaagttgtgcaatatatcaaagatactttccatgagggcaagtgcgaagttgcagctgttgaggatggaaagttgatggccgatactgaagctggtgaattttggggtttgtttggtggttttgctcctctcccaaagaagacatcttcagaggacaatggggatgataaggaaactgtgaccaaattgctatgttttaaccaaggaacgctggagcatattagttttgaatctttggagcatgagttacttgagacaaacaaatgctacttgttggactgtggagctgaaatgtatgtttggatgggcagaggtacttctttgcaagtgagaaagggtgcaagtgaggctgctgagaaattgctcattgatgagaaccgaaaaggatcaaatgttatcaaagtgattgagggattcgaaacaatcatgttcaagtcaaaatttaacaagtggccgcctactcctgatttgaagctgtcatctgaggatggccgaggcaaagtggcagctctactcagaagtcaaggattggatgttaaaggattgatgaaggctgctcctgaagaagaagaaccccaaccttatattgattgcactggtcatttacaggtctggcgagtaaatggcgatggcaagactcttctttcatcttctgatcaatcaaaactttacaccggagattgctacatttttcaatacacatacactggagatgataaggaggaatgtcttattggaacttggtttgggaagaagagtgttgaggaggacagaacatcggcaatttcactagctagcaagatgtttcaggctgcaaaattccaggctgcccaggctcgcctctatgaagggaaagaaccgattcaatttttcgtcatatttcagagtcttcaagtttttaagggtggacttagctctggatacaagaactttattgctgtaaatggtaccgatgacgacacttacgttgaaggtgggcttgctctcttccggattcaaggctcaggatcagaaaacatgcaagcaattcaagttgatgcagtgtcttcgtcattaaattcatcctactgctacattctacacaatggaaacactgtgttcacatggactgggaaccttacaacctcactggataatgacttggttgagagacagctagatgtaattaagccagatctgccatccaggtcacaaaaggaggggagagaaaccgaccaattctgggaactcttaggtggaaaatgcaagtattcaaacaaaaaaaataggaaaagaaaatgaaagcgaccctcatcttttctcatgtatcttatccaaggaaaatctaaaggtcaaggaaatacaccactttactcaggatgacctgatggcagaagatattttcgttctagactgccgcaccgacttgtttgtttgggttggacaggaggtggatgccaaattgagatcacaagcgatggacatcggtgagaaatttcttctacatgatttccttatggaaaatctctcgcaagacacaccaatttttattgttacagaaggaagtgagccacagttttttactaggttcttcacttgggactcagcaaaatcgctgatgcatggcagttcataccagaggaagcttgcaatagtaaagggtggagcaactccatcgcttgataaacctaaaaggcgaacaccagcgttttcaggaaggaacgcaggacaagataaatctcagcagcgcacaagaagtatgtcccacagcccagaacgtcaccgtattcgaggaagatctccagctttcaccgcaatagcttctgcctttgagaacccaagtacccggtatctttccacccctccccctgctgtcaagaagcttttcccaagatccggagggtctgaattgccaaagacatcatccaaacaatcagctatcaatgctctcaccagtgctttcgagggtcctacgaaaagtacaatacctaagtctgtaaaagcgagccccgaggcagagaaggcaatacaggaggaaggctcaacgatcggtgaaagtgaaaacgggccagaagatgatgagaacagcacaatctacccatatgaacgtttgaccaccacatctgatgatcctgctcctgacattgatgttaccaagcgagaggtctacttatcatcagttgagttcacagagaagtttggcatgacaagggcatcattcaaaaaccttccaaaatggaagcaaaacaggctaaagtctgatctccagctcttttagctcaactctgaggaacagccccttgtcctcgccttgaaggcatcacccatttttgagggcacgcaatttccgtgccattctcgagttcttctcttcacctattttggtctgctattgctctaggatcaccctgctctttctgcagtagcaagtaggtcttttggtagtgtttttcttttccctttattgatatagagtgctcatgaatgtttctgttgtgagcctcgcatttttgtgccgctacaaaatttttttaagaaaaggtctatttattgtct

SEQ ID NO: 25297 - DNA, 1868 bp, Oryza sativa
  ref <308>: DATABASE ACCESSION NUMBER: AK100739
  ref <309>: DATABASE ENTRY DATE: 2002-08-28
gattcagcaacctgacctctcccgttctcctgcagctagcctccggcaagtctccagcgcgtcgccctggaccgaaatattatgccacgttcttctcgtatgaatctgtggccgcattgcttcccgtgtttcgacgatggcgacagatcaggcaacaggttcagtactgtatgcaacttccccgatgatctcctcccgtcgctcggtgctaccgctcaccagcctcccaagctcaggaaatacctcgtctcgccttatgacccgcgttacaaggtctgggaaacatttctgatcatcctggtggtgtactcggcgtggatctgcccgctggagttcgcattcctgaggtacctgcccagcgcgccttttgtcgtggacgatgtcgtcaacgggtttttcgccgtcgacatcatgctcactttcttcgtcccgttcgtggacaagaagtcctacctcctcgttaacgatccgaagaaaatagcagtcaggtacctgtcgtcttggttcgtcttcgatgtatgctcgactgttccattccactccatcagcctgctgttcaacgagcacgggcatgaccttggcttcaagtttctcaatgttctcaggctctggcggttgcgtcgagtcagttcgatgtttgcgaggcttgagaaggacatccggttcaactacgcggtgatacgctgcacgaagctcatctcggtcaccctcttcgcgatacactgcgccgggtgcatcaactaccttatcgccgacaggtacccggacccgaggaggacatggatcggcgccgtgatgcccaacttcagggaggacgggctgtggatccggtacgtgacggccatgtactggtccatcacgacgctgaccaccacgggctacggcgacctgcacgccgagaacgccagggagatgctgttcggcatctgctacatgctcttcaacctctggctcaccgcctacctcatcggcaacatgaccaacctcgtcgtccacagcaccagccgcacccgagactttagggatgtggttcaggccgcctcagaattcgcggcgaggaaccagctgccgcagcaaatagaggagcagatgctgaaccacatatgcctccggtacaagaccgatggcctcaagcagcaggagacgctagacgtcctcccgaaggcgatgcgatccagcatttctcactacctcttcttccgggttgttcaaggagcctacctgttcaagggagtctcctcaaggttcatccagcagttggtaacagagatgcaagcagagtacttcgccccaaaggaagacatcatactgcagaatgacagcccatcggacttgtatcttcttgtatccggagcagtagacattctggtattcctagatggaacagaacaggtttacaggagagcagctgagggagaactgctaggggagataggtgtactgtgcaacaagccacagtcgttcactttccggacgacagaactatctcagattctgaggatcagtaggaccaagctgttgggtatcatccaggagaacagagaagacggcgacatcatcagaagcaaccttcagcaagtgaacgtataagtgggctagcttcgctgggcgtgctcaacgcaagacagatgcctctgttggaaaatagcatttaagttttgagcggatagcatctaatagtttctgtacaaaaaactaaaaatggaggaaagatcatgcggtggaactggtgaaaactgaaaagattatctgtactagaacatcatgcagtgtaactggtgaaaaaacgatctgtgttcggacagatcttggacgttgagacaatatcacctgcctgtcaaagaaaactactactacctttaccaatc

SEQ ID NO: 25298 - DNA, 4244 bp, Oryza sativa
  ref <308>: DATABASE ACCESSION NUMBER: AK100740
  ref <309>: DATABASE ENTRY DATE: 2002-08-28
aaaaagctcttgctgtgtcttgcgccgatccgtctttggtctctgcggccttcaccagtgctcttccaacttccaagttccgatagctgggttcgtatcttcattgggctgcgattttctcgataccgtccaggatgaatctcatccaatttgcttttctctatattgcttgatacaagcagctcgggatggaggccccgcccctcgccgccccgatttgtgcttcacagggagccatgggatcccttcttgggaagatggaggagctgcttgtggctcccgatggcagcaggctacccaagggggtgaaggatcggatgctcctcctgggaggcgaccttggagtggtcgccgcgtacctcgccgatctgtcggagctggaggaccctcccccgacggccaagcgctggatgagagaggtgcgcgagctgtcctacgacatcgaggactacatcgacgagttctgcgcagcgccgcggcctggccgccgcgcgaacaccatggccagattcgtctgcagaatcggccgtgtcaaggttgctcgtcttcccaagaggctcaagaggcaccagcagatggggaagatggtgtcgcagttcaggatttatgttgaggaggccattgagcggcatgggaggtatggtctggattgctgcgaccacaggcggagatatgtgtcatttggccctatgttgccatctaggccgtatggggaagaagatgcccagctagtgattgatggccgggtgagcgagttcatcgagcggctcgccaatgatgaggatcagaagctcaaggtggtgtctgttgttggatcttcaggtattggtaagaccacacttgccaaactgttgtacaacagaattgggggacaatttgactgtcgagctttcgtccggatctcccggaagcctgatatgaagagggttttccgcgagatgttctttcaactccagcggaagcagccacctgacgattataaggagcttgcgcttattgacagcatcagggagtatcttcaagatagaaggtatttaattattattgatgacttatgggctgcctccgtatgggatcttatcaatcaagcttttccagaggtaattctgagcagcaggatagtaataattacacaggttgaagatcttgcattaacatgttgctgttatgacaccgaatatatttttgagatgaaacccatggatgatgagcactcaacaacgttgtttcttcagagattttttggttttgtaagtgattgccctcaacaattcaaagaagtttcaaacaaaattgttcaaatatgtggtggtttgcctttagcaacaatcagcctagctagccttttagcaagtcagcctgtcatcttaatggatctatgtttatacatacgtaattctttaagctctgcttttaggacaaattcttctatagaaggaacgcggcaagtattaaacctcagctacaataatcttcctcattacttgaagacatgcttgctatatcttaatatgtatccagagggttataaaatatgcaaggatgatgttgtggaaaaatgggtggctgaaggttttattgatcaaatagagggccgagacttggagaaagttgcagggagctatttcgatgaacttattgacagaagattcctccaacctagcagactcaactacaacaatgaggtgtcaacttgtacaattcatgatgaggtacgagatcttattgcatacaagtctgtagaggagaactttgttctggtattagatttttaccggaaggatgtggaactttctgataaagttcgtcgactttctgtccactttggtgacataaagtatgcaaaaataccaacaaacatcagaacatcagaagttcgatcacttacattttttggattatgtaagtgtatgccttctcttacagagtttaagcttcttcgtgttctaaaccttcaattatctggtcatgttggtgatgaactcttagacctcagtgggatttctgaactatttcaactgagatatttgaagattgcatgcgatattcgcacggaactaccaagccaaatgcgagggctaaaatatttagaaacgttgcagatggatacaacactcactgctgttccttgggatattatctttctcccgtgcttgttacacctccatcttcgttttgatatgaatctgattgatttgatgggccacatgacacctcccagcgaactaggatcaagcagtagtaactcatcacccagtgggggcatcattagcaatctgaacaacgtacgggatattcatctcaccttctgtgcactgccttccaaacatctagagagaaacatggaaattttgggctctttgcttggaagacttggtaatctgaaaaatctaactctagtttcttcttcctctcaaaagaaaattgcggcttcaggagcctcagaagtaactattttgtgggataatttggcacctccacctcttctccagagatttgagtggttgctgcacagctgcatcttttacagagttcctaagtggattggagaacttggcaacctatgcattttaaggattgcagtaagggagcttgtaaagaacagtgttgatattctcaggggattgcctgccctcatggctctatctttgaatgtgcacagagcatctgtagaaaacattttctttgataaggtaggattctcagttctcaagtacttcaagtataattgtagtgtaccttggctgaaatttgaggcaggggcaatgcctaatctcaggaagctcaagttaggtttcagtgcccttggggatctatatggtactgcacctatcaggattggacacttgttaggcctcaaagaaatctcagtaaaaattcatggtgcaagtgtcgacgcagagtctgcattgacatctgctgttagcaatcacccaagcaatcctagaatcaacgtacagttggtggataagattttttatggtgatagagtgacaaaagagaaagatcatgggtctgaggaagaacaaaatgctatcatgagcgccaacttcgatgaatatcatcaaactcaagataaagagtcaagtgatgcgaacaaacaagttggaagtattgtgcctctgccacgggagcaagaacatgggattttagaacatgatgagtatgcaccaaaagacccagataagtacaaacaatctgatatcaggtctgtatcatcaatgtatccgtggcatctgaagtttctaggtgccttatcaatccatggaggcacaagacttgcaacagcaccaagaaaggcagaagatgcatacatctcatatgccatgaaggggaatatgcaagactcggtgcacatgcctgattctagctgctacctctcaatgcttgtcctacccatggcgttggacatgaagtcacatctatacgagtccttcgaggtcaccttggctcgtgccaacacatggctctatgcctcgcaggcctctggtgtccccatcaagttgatgagtgtgcagagtgatgatcttctcaccaagatatcgagagttggagacgccacatctgcaactgtcaattcagggttgttgcctgatctgtcaaatgcaaccttggaggattaccaaggctataacactgaggtggtgaaggcagcccgactttggtacagctccataggaggagaaatgccactggagatcactcctaaagtaggtgacacaaaactaggatttgcaatcagccgtactgaggagggttttatctacatatcttcagtgttgcaagatgacaatgacagcgagacaccgtcaacacggtcagggatgcacaatctgttcaaccgggcaagagaggcatcgaaattgctggtcatctcaagggtgtccaatgagaaggtcctgccctggatgatctctagttcaggggcaatccgctgctttgacactctctcgatcagccaaaagctttccttgagccgatacccattgtgctccttccagctgcatctactcatgtgggagaagcctattcatcctgccgagagaagcattcatcgcccaaaaatgcctttttttttttgaaagaagaaatgccttattcattgatactcgatccagaacctcatcaaattatacctagagtagatgctgaagagggcagagtggcgcacctgaaacacaggatgtcatcatcacttgttacaacttctccagaaatgaaagaaacataaaacaagatgctgc

SEQ ID NO: 25299 - DNA, 2846 bp, Oryza sativa
  ref <308>: DATABASE ACCESSION NUMBER: AK100741
  ref <309>: DATABASE ENTRY DATE: 2002-08-28
gggtccggcgggccggcgacgagcatggcaggtgacggtgccaagtgctccgacgaggtgaacgacggcacctacttcatggccggcgtgatggccgtgaccggcctcatggcgaccgtcctggcgctctccggcatcttccattgcgcgcttcgacgcgttgggcagccaagcataatctcgcacatcctggccggcgtggtggtcgggccgacggtgctcggccgcgccgtggacctgcgtcctctgggcatgcaggacgccggcagcgcgctcagcgacaccatctacttcgtccgcatcatcttcatgttcttcatcggcctggagatggacctccggtacctccgccaccacctgcgccgctccctcgccatcgcctgcggcggctcggggctctgcctcctgctcgccgccctcgcggggcccttcttctacggcctcctccaccccggccagggccccttcaagcccgagaagctctacgcctccaccgcgctcttcatgctcgtcctcaccaccaccgcctccccggtcctcatccgcatcgtcaccgagctcaagctcaccggctccgaggccggccagctcgccatcggcgccgccttcgccaacgacatggctagcctctccgtcttcagcatcatggtcgtcggcaccaccgcctacggccccgacggccagcccaccccatccttcccggacatgtccatcgtcatgtccatggccttcacggcgtgcctggcggtgctcgcggccgccagggcccgccaggctgctcaacaggctcaagcgcgggccgccgctacgtcagcaagtacgagctctgcgccatgctcctgctcatcatcgccctctcgctgctcgagcaggtgttcggctacagcgcctccatgaccgccttcctcatcggcctcgccatgccgcgcgacgggcccacggcgcgcacgctcgtcgaccgcctcacctatcccgtgcaccagctcgtcatgccgctctgcttcggggccatcggcgcaaggctcgacttcgccgccgtcggcagcttcacagccatgcagttcgccgtcgccgtcgccttcacgacgctgctcggcgcagtcgggaaggtgggcggcacggtgctcgcgggccgcatgctgggcatctcggcgagggagtcgctggtgctgggcttcctgctcaacgtcaagggctactgtgacatcctcgccatcaacttcggcaaccaggccggcatctggggccagacggcgcaggtggtgctgctcctctcctccatcctcaacaccttcatggcaggcccggctgccgcggccatcgtccgacagcagcgcgccgcctcccgataccggtcgcgctgccttcaggacctcaaggtcgaccacgagctccgcgtgctggtctgcgtccacggcgccgggggcgtccacaccatgctgacgctcgcggagctttccaagggcaccgcgccgctggccgtctacctcctccacctggtggagcttatggccgcgcgcaagtacgccatcacccatctgtaccatgacgccgacgccgacgacgacgagtggggttatgcccgcgagatcgagcaggtggccgcggcggtgaacaccttcacctacgacgccggcgtgccggtgcggcagatgaccgccatctccagcctggggtccatggacgcagacgtgcgcaacggcgtggaggactcgcgcgcgtcgctggtgatcgtgcccttccacaaggagcagcggtacgacgggcgcatggtgtgccggcgagaggggaggcggcagctgaaccagcggatcctgcagcgcttgccctgcactgtcggggtcctggtggaacggcgcctcggcgggggcggcgacaagggcgcggaagacgtggtgaagaaccaggtggtggcggtgttcctgggcgggccggacgacagggaggcggtagcgtacgcgacgcggctggcggcgcacccgtgggtgagcgtgacggtggtgagattccttccagcgcgacaggatgatattaccattggcattgatgaacaattattagccaccaccaagagccatggcggtgagggcgccatggaggtggcggtggaggacgaggaggcgatggcggatgaggagttcatggcggacgtgtacgcgaggctggtgttggcgggacaggtggagtacacggagaggtacgtgagcaacggcgcggagatggtgaattcgttgagcgccatggtggggacgtactcgctgttcgtggtggggaagggcggcggcggctcggcggcggcggccatgacgagcggcatgggagggctactggaggacgagtgtccggagctgggccccgtcggggaggtgctggcctccgacgacttcacggcctgcggctccgtgctggtgcttcagcagcacagcgcgcatgtgcatcgcaggatgaggaggtggaatcccaacattcacatcaccaccacaccctcgtcgtccgatcatcatagccacccaccctagctatatactacttcatctccgacgacaacatcatccatggcgccatgcatagaacaaattaattaagaggagtacgtgtggcacgcaatggctagctggttggactggatcgacctagctagaacggggccgggttgacattgcaccgatcgatcgatcgatgatctgcatctaattgccatgggaaattcagttggttttagggtaaaaatcatatgcacccgtgtcacgcatatacgccatgaccccatgtgtggggatagatgagtgagtatatgtaccgatcgaaataaacagactcgattttgaggttggaatgtttttttt

SEQ ID NO: 25300 - DNA, 4404 bp, Oryza sativa
  ref <308>: DATABASE ACCESSION NUMBER: AK100742
  ref <309>: DATABASE ENTRY DATE: 2002-08-28
gaccaccacccaacccagccaaaatggccaacgagtccatcctcgtcctcctccacctccgcctacagaaccctgaccggggtcttccccaaaaccctcgccgagtcgccgggctccgccgccgtccccatcgcgaactactcgcaggctactcctccggccatgaggggctcggatccggaccggggcggaggcgagccggacatctccaagctcttctgccactacaacgccctctacttccacgactccctcggcacctgcgccgtctcctgggccaccgacgaggatccactccccaatcggtaaagcgtcgccactccgaattctcgccgttctcggtgttatatggggggggggggggggtccggtttactgaatactgcggatttaggtcttgtgtggatgttgagttgtgtgcggtggttgcaagattgctccgttcatgtcctgccactaagcatgcgtatcttagtagattcagtgcagtatgatggctttatagggggaacagcacacgagaacaatcctgttctgtaggggttctgattcggacattcggtatatgttggttcaccccgcatcaaatccactcattcatccaccagtggatcaatgccaaaaggaagtgcttaacccatatatcccttgttcgttagaactagaacatcaatcccctaaaaatgaattagggcatcaaaggggattatccatattcgggtattttgatctaaacgttcagccagaacataggtgatccatattattctacacgattatgccttgtcattatctgcagttctatctgttaacctctaaatctttgcgtcgttctcttgttcattgaccgtaaaaactacactctttgagagtatggatcaatgcctaggtctaaaccatgaaaaagtggaaagatttaatgtatgcttttggcatgctttctagaaagaaatgggaaaatagtgtaaaaacatttacttttgggaaggagtgaacaaatttatctagacagtagaatgaaaaagtcgcttgaactcttagactgattacatagacatctctgctccagttgttttgaacttcgaagacactggtatcatatctatgggcctattcattctgttcattttgttgccacgttctaccattgctattctaccaaaattggtagttctgaaagtttcccattcccactcataatgacacaaccaaaatttggaaagaaatctaacaaaacacatccaagtatccaacgctaccaaaacttgccacttcctaccctgccaaattttggtaaggttgtttttggcaccaaagtgaacaagccctatatacttcccaaatatgtttgatttgcaaatctattggtgaatgtgcatagcattttgaatggaacacagtgactgatgtattgctatgcacaattatgaagtatgtcagccacatttatggcactgtcatgtgcatatttttctagcaagcatgttcaacaagattcgtgagttgtctgtcatagtgtcatttagctcataatcgtcaactataattgactggaaatgatgctgaccatccgacccttccatattttcatcttaacactatctttttcacataaactctgtactattggataactttgtgagttattgcctataattgttttcttctatagttattctctgaaataagaaactttcatcaaagaccatagtacctgctattaccagtatgattgttttgaaactttccatttttaatcattttgatgcagtgaagtaggtggctgtgaatattatcctggtggtggtggctgtattatacttctttccagatccttgtatgaacaccacacagatttggatttaaagaatgcgctgcttcatgaaatgattcatgcttatatgtgcatcaaagatagtaatgataaccataggtactttttagtaccatgactggcctcttcttgtattacacctgaatttctgtctacttttttttttctcgttttgactaatttaaaaactgtgatcaagcagtgaccatgggccaaaattccagaaactgatgaatacaatcaatttaaactctgtagccgatcctcatcgtcctcttggtggctacagcataactgtgttccatgagatcagaaagaaattttatatacacaaagtaagaacctgatctttaaaagtaaatcttattttctaatttcagattggcagctaacaatctctgtagtgtgaaagctgtggagatttgatcaagtcaaccaaaatcaaaggaccatcacaggatgactgcattgaggcaatgggtgctaatgacttgtgtgacagtttaatttgtcactggcattggtattagctatatatttctttgcattttttttgttccatgcatgccttattggtatatctctaaaggtgtgttcggaatccccagttcccaactcatccatctcgttttccgtgcgcacgcttttcaaactgtaaacagtgcgttttttacaaaaagtttctatacgaaagttgctttaaaaaatcatattgatccattttttaaaaaaagattagctaatacttaattaatcatgcgctaatgaaccgctccgttttccgtgcggaggggataggttcccatcctccattactgaacacagcctaagagtgcacataaatattcatagaaatataagctagatgtacattttaaagctaactgtgtaatttccaaaatgtgtaatttattactctctgccttgttagtgtatccttgcaatgtgggaggtaggatgtaaacctcagtttgtgatgaacaaataaatcaactattattattgttaaatttgacaaagagagatgttaaactaagaaggtaatgatgggtgtctgcttcaatatctaacattttctttgtgttgtcctgtcactttggcaattgcataatctaaaaagtggtaaatgatctgacataaatttttctttattggaggtgaaatcgacatgtccagcagccaaacaagattagtaatacctgaacaactatcatgctctttctcctccttggggtcctgggatgcaacttactctaaatttagtgtcattgagttcatggatggagtcatgatttggctttctgtattaatatatatataggcacaagaagcggtgcactggtagctatcacagagttcaaggatcatcatcaggttgtgtagagggttcaaaaggtaacatttggcttaaaaaggaggttccagttatgataacattttaagaccataaaacagtctattttgttgaaatgccttgagatgactctttactgcagatatacattttaaactcttagtatgcctactcatacaaattgatgatactgctaatttttgttggtagctttatctgtagaagcacctgattgcaaagttgaagaatcagcccctggaagttggcacaatgcgcatgcatcaattaagggtggaaaaggcaataagcatgaactggaagaaacctctgctgggtttcctcctgatgactctattggtatttctggaatggagtcctcttcaagagacacagctaataagaaaatcaaattgtcaaaggatattggtttggaccgtctaaccgccacaactgttcaggaagcaccgaagcgtccaagaacaacctcactaaagaagaatcaagagtgcagcagacagaagaaaagaaaaataagcaagtgggatggttcctactctgtaatcattgaatggttgaattactattctgtggatgagtcagatgaagatgaggtgcctttgataaataaaagaaccgaaagaagaaagcggcagaagttactgaaacttgttcttgctagggaatccaatagtggcagtgaaggtgctagttctacatcttttgtagaaaatggcagaaattctagcagtgctggctcttaccccctaagccagggggacaatgacaaatctgaaaatgtgcaagctaatcgagttgatgtaagttcagtgccagatcatcctgtaagtagtcatgtagcagcagaggatcaagctggccaagctgcatcgtcaccattgaactcaccaactagaggtatcgttgttgacatttcagatggttgatggccagagttccattagtttctttcagctgaggcctggacgtacaattatccagactacagttgtaacacttacttttaattccttgcacctgtctactgctagacatgcaacgggacgatcctgtgaagcatgtgtcttgtacatgtcttcgtttcttcctttctcatttcaccttttcttttcttagcatagatcagttcagtatacttaactctgtcaggttgtgtgacccatcagtttctctccgtactagtctcttgaagaacagc

SEQ ID NO: 25301 - DNA, 962 bp, Oryza sativa
  ref <308>: DATABASE ACCESSION NUMBER: AK100743
  ref <309>: DATABASE ENTRY DATE: 2002-08-28
gggtttggcatttggaattgacagcgcaaatgcagttgtcctggaggatatcaaccaaataattcccctccatccttcagtaattggcctccaaacacagagcccgaatgagcatggcaagggagcactttgtgcttattcatggagaagggcatggatcctggtgttggttcaagcttcgttggctccttgagagctctggctaccaagtaacatgcatagaccttgctggagctggtgttgaccctaccgaccccaacacagttcaatcgtttgagcagtatgacaagccgctcctggacctcatctcagctataccagaggatgagaaggtgattttggttggacatggttcaggagggttgagtcttattcatgcaatgcaccaatttgttgacaggattagacaagcaatttttgtggcagctacgatgctaccatttggacttcaaactgacgaagataagaaagatggtttaccaacattgcctgagaatgagatcaatttgatattcggcacaggagcagatgatcctccaacaactgctgccctgagaccagaattccagagagagagattatcccaacagagtcctgaagaggaatcagtactcgcttcaatgctgatgcgtccatggcctgtgacagctattagcactgcaagctttgaaggagacgatgagagactaaatcgaatcaaacgggttttcataaagacaggacgtgaccacatgctggaccctcagcagcaagattccatgatcaagaagtggccgcccagtgaggttttggaaatagatacggatcatagcccctttttttcagcaccagaacagctctttaatctaatagtcaaatccctatgatgtaaatctgcatacaactcaaacatccaaggagacttctccaaattattgtaccactgcatatacacaacaactttaaactgatttagagccacg

SEQ ID NO: 25302 - DNA, 1862 bp, Oryza sativa
  ref <308>: DATABASE ACCESSION NUMBER: AK100744
  ref <309>: DATABASE ENTRY DATE: 2002-08-28
gacacgcacacacaaaacacaaacacaacgcaacacaacccaaccgcatcgcctcctccaccacccgcccgccacacgcccaaaaaacgccccgaaatcccctccaaatcgcccaaaaccaccgtacgccgtcgctacatggagaacggcaagtgcaacgggtcgtcgaccaccaagtgcaacggtgcggcggcggcggcgatgcacgtggcgatgctggtgacgccggggatggggcacctgatcccgctggccgagctggcgaagcggctggcggcgaggcacggcgtgacgtcgacgctgctcacgttcgcctccacggcgtcggcgacgcagcgggagttcctggcgtcgctgccgccggcgatcgagtcggtgtcgctgccccccgtcgacctctccgacctccccgccgacgccgccatcgagacgctcatgtcggaggagtgcgtccggctggtcccggcgctcacggcgatcctgtccgggatcagggagaggcggcggctggtggcgttcgtcgccgacctgttcggcgcggactcgttcgacgccgcgcgcgacgccggcgtgcccaggaggtacctcttcttccccaccaacctccacgcgctcacgctgctcctccacctccccgacctcgacgtctccatgccccggcgagttccgcgacctggagcgagcccgtcaggctccccggctgcgtgcccatcccggggaaggacatcctcatgccgctccaggacaagtccagggcgtgctacgggtggatggtgcaccacggcacgcgctagccgcgacgccgacgccatcctcgtcaactcgttcgacgccgtcgagcccgacgccgccagggtgctccgccacccgaagcccggcgtcccgccggtgttccccatcggcccgctgatacagacgcactgcgccggcgacgacgacgccgcggcgcctccctcgccgcgcgccgcgtgcctcgactggctcgaccggcagccggacaggtcggtcatcttcgtctccttcggctccggcggcgcgctgccgacggagcacatgcgcgagcttgcgctcgggctggagctcagcgggcagcgattcctgtgggtggtgcggagcccgagcgacgagggcgaggtgagcgccaactactatggcgctgagacgaagaagaaccccttcggctacctccccgaggggttcgtcgagaggacgaaggaggtgggcctgctggtgccctcgtgggccccgcagacgaaggtgctggcccaccgggccacgggagggttcctgacgcactgcgggtggaactcggtgctcgagagcctcgtgcacggggtgcccatggtggcctggccgctcttcgccgagcagcggcagaacgccgtcatgctgacggagggcgccggggccgcgatacgggtgcccgagtccaaggggaaggagaagatcgcggcggtcgtcagggagatgatggtaggggaagggaggggcgcggcggtgcgtgctaaggtagctgagctacagaagatggcgacggatggcctccgagacggtggcgccgccacgtcagcgctcgatgaggtggtggacaagtggacaggaggggagaagtaggtggcatcttgacaaaatacacttggccatatatatgcacctccttgatggctgtacggtgtgtctactcctcttgtctcttttttatcattgtgcactggattttcttgttaggtagtacgtgtggttcgcatgtacgtgaggagattagatttataatttgagtcccattaataaaaggggaccatgtgtatatgaaatgcagttatgcccaatttatattgacttccaactcttatactttatcc

SEQ ID NO: 25303 - DNA, 3882 bp, Oryza sativa
  ref <308>: DATABASE ACCESSION NUMBER: AK100745
  ref <309>: DATABASE ENTRY DATE: 2002-08-28
ggtactttccccgcaaccccaaacaacaaggaaggaagacgctcctcccctcccatctcttaaaccccaaaaaaaccaaaataaaaatcctcctcctcctccgcctccgcttcccttcccttccccgatagaaatccatccctcccgccgccgccgccgccgccgctcctagggttccggcacctccccgaatccccccctcacttcgacccctgttcgcttcacccgccgccgccatggcggagaagctgagggatctgagccagcccatagacgtcccgctgctggacgccactgtcgccgccttctacggcaccggatctaaggaagagaggaatgccgctgatcagatactacgggatctacagaataatccagatatgtggctgcaggtggtccacattctgcagaattctcacaacttgaacaccaagttctttgccctccaagtacttgaaagtgttataaagtataggtggaatgcattgccaactgaacaacgtgatggcatcaagaattacatatctgatgttattgtccagctctccagtaatgaggcttcttttcggcaagagagactttatgttaataaactcaacattatactggtgcaggttctgaagcatgagtggccagctaggtggtcatctttcgttcctgaccttgttgctgctgcaaagagtagtgaaaccatatgcgaaaattgcatggctatattgaagcttttaagcgaagaaatttttgatttttcaagaggtgaaatgacacaacagaagattaaagaactgaagtcatcacttaacagtgaatttcgtcttattcatgagctatgtttatatgtcctatctgcaacacaaagacctgagctcatccgtgctacactggctacacttcatgctttcttatcatggataccagtgggcttcatatttgagtcacctttgctggagacattactgaagttctttcctatggctgcttatcggaaccttacactccagtgccttacagaggtcgctgctcttcagtttggtgatttttataatgtgcagtatgtgaagatgtatacgattttcatgatgcagttgcaggctattcttcctcctggaacaattcctgatgcttatgctgatggctccagtgaagaacaggcattcatacaaaatctagctcttttttttcacttctttcttcaagaatcacatgcgcatattggaggcatctccagaaaatagagctgcattacttctgggccttgagtacctcattggaatttcatatgttgatgacacagaggtttttaaggtgtgtttggattactggaatgtgtttgttttagagctatttgaagcacacaatcaaatggagcctgcagcatctgtaaacatgatgggacttcaggctcagatgctccctggagttgatggcaccatcacagctgttcagcagaggcgtcagctttactcaggcccactatcaaaattacgaatgttgatgatttgtcggatggcaaaaccagaggaggtactgattgtggaagatgaaaatgggaatattgtacgtgaaacaatgaaagacaacgatgttcttgtccagtataagattatgagggaaacactgatctacttgtctcatcttgatcatgaggatacagagcagcaaatgctgaagaaattgagtaagcaattaaatggagaagactggagttggaataacctcaatactctctgctgggcaatcggatcaatatctggttctatggtggaggaacaggaaaataggttcttggtaatggttattcgcgatttattaaatctctgtgaaatcacaaaggggaaggataataaagctgtgattgccagtaacatcatgtatgttgttggtcagtacccaagatttctcagggctcattggaagttcttgaaaacggtggttaacaaactatttgagttcatgcatgagatgcatcctggagttcaggatatggcgtgtgatacttttctgaaaattgttcagaaatgcaagcgcaaatttgtcacacaacaggtgggcgagaacgaaccatttgtttctgaactgttgtccagccttgccacgacaattggtgatcttgagccgcaccagattcatacgttttatgaatcggttggccacatgattcaagctgaatctgataacactaagagagatgaatacctcaaaagactgatgagcctccctaatcagaaatgggccgagataattggacaggcaagccaaagcattgatatcctgaagaaccaggatgttattagatctgttcttaacatcctgcagacaaacacaagtgttgctagctcacttggaccacactttttcccgcaaatttccctaatctttcttgacatgttgacagtttacagaatgtacagtgagcttgtatcaagcaccattgctgaagggggaccttttgcctcaaggacctcctttgtaaaactccttagatctgtcaagagggaaacattgaaattgattgagacttttgtggacaaagctgaagatctaccacacattgggaaacagtttgttcctcctatgatggatcctattcttgctgactatgctagaaatgttcccgatgctagggaatctgaagttctgtccctgtttgcgacgatcataaacaaatacaaaggtgaaatgcttgaagacgtgcctcgcatatttgaggctgttttccagtgcactcttgagatgatcactaaaaactttgaagattacccggagcatcgcctcaaatttttctctttgcttcgtgcgattggcacccattgcttccaagcattaattcagctttcaagtcagcaattgaaacttgtgattgactctatcaactgggcatttagacatacagagagaaacatcgcagagactggtctcagtctattgctggaaattttaaagaactttcaggcctcaggattccaaaatcaattctacaaaacttattttttgaatattgaacaagagatctttgcagttctgacagacacattccacaagcctggtttcaagcttcatgttttggtgctgcagcacttattttgtgtggttgatggtctgacggagcctctctgggatgcatcctcagtaccataccaatatactgacaacgctatgtttgtccgagattacacaataaaacttttaggttcatcatttcccaacatgacacctactgaggttacaaaatttgttgatgggcttcttagttcaaaacatgaccttccaagcttcaaaaaccatattagggatttcctggtgcaatcaaaggagttctcggctcaggataataaggatttgtatgctgaagaggctgctgcacaaagagagagggagcgtcaacgaatgcttgccattccagggcttattgccccaagcgaattacaagatgagatggttgattcataattctgtgattcagccttgctaatccagttccatttcttgctttggcctccaaacctctggagccctcaacaccccattgcccaagttctcttccagggtggtgaaagaaggtgcctgctgtaattttattttcggttacctccacttggtgctgattgcgagatttctgctagtcaataggaaaggccaactcaattttgtcgcaagagctgttttggactgccattggtttgcagtatgagctgtcaggttaatgtgatgacagcagctcttgtgctcctgtattttgctaacattgctgcgtgtgcggggccatcatatagtatgatcacggtacaacattgtatcatgatttttagtttagtttatagatcggccgcattctgtattgtggacaagattcaggatagaaacttatattcgtagtgtacg

SEQ ID NO: 25304 - DNA, 1754 bp, Oryza sativa
  ref <308>: DATABASE ACCESSION NUMBER: AK100746
  ref <309>: DATABASE ENTRY DATE: 2002-08-28
ggcaagcaaacgcacgcgcccccgcctatgaaagcccgcgcgcaccacgcacacacgcacgcacgcagtcgcaggcgccgcagctcgtctccatgggtgtcgtcgaggcagaggcgttgcatggggcggtggaggccctggctgggtcgctgcagccgcacgtggccaccgccttcttcgtgttctcggcgtgcacggtggccctcgccgcgctccttgccgtggtgcgcctgcgcccgccgtggtggtgcgactgcaccgtgtgcgaggccttcctgacggcgtcgtgggcgggagagttcgacaacctctgcgactggtacgcccacctgctgcgcacctcgccggcgcagaccgtgcacgtgcacgtcctccgcaacgtgctcaccgccaacccggtcaccgtcgaccacgtgctccgcgcccgcttcgacaactatcccaagggcgctcccttctccgccatcctcgccgacttcctcggccgcgggatatttaacgtcgacggtgacgcgtggctcttccagcgcaagctcgccgctgccgagctcgcctctccggcgctccgcgccttcgcggcgcgtgtcgtggcctccgagctgaggtgccgcctcatccctctgctccactctgcttcacgtgagggcaacggcaaggtgctcgacctgcaagacatgttccgccgcttcgccttcgacagcatatgcaagatctcgtttggcctcgaccctggctgcctcgagctgtcgatgcctgtatcgacgctcgtggaagcgttcgacacggcgtcgacactctccgcgcggcgggcgacggtgcccatgcagataatctggaggctgaagcggttcttgaacgtcggggacgaaaggaagctccgggacgcggtccgtttggtcgacgcgctcgcggcggaggtcatccgacaacggcggaagcttggcggcgctgccaccggcagcgacctcctttcacgcttcatgggctccatcgacgacgacaagtacctccgcgacatcgtcgtcagcttcatgctcgccggccgcgacaccatcgcctcggcgctcaccgccttctttctgctcctctccgatcacccagaggtcgccaccgccatccgagacgaggtcgcccgcgtcacgggcgacggcaaccgaaccatggccgccacattcgacaagctcaaggacatgcactatgtgcacgccgcgatgtacgagagcatgcgcctgttcccgccagtgcagttcgattccaagtttgccgccggcgacgatacgctgccggacggcacggtcgtcgcgaagggcacccgggtgacctaccacgcctacgccatgggccggatggagtccgtatggggccccgactgcgccgagttccggccggagcgatggctccgggacggccggttcgtcccggagagcccgtaccgttacccggtgttccaggcgggcgttcgcgtctgcatcggcaaggagctagccctcatggagatgaaagccgtcatcgtcgccgtcgtccggagcttcggcatcgaggcgatcgcgcggagctcgcggcggcccaagttcgcgccgggcctgaccgccacgttcgcaggcggcttgccggtgagagtgcgccggcggcgagcacgtgcgagcgggcacaacccgccaatttaataggtagagcaaacaaactggttcgtgtcatcacgatttgttcttctgtgcttcttttcgaactggaatattaattaggttacatgc

SEQ ID NO: 25305 - DNA, 2157 bp, Oryza sativa
  ref <308>: DATABASE ACCESSION NUMBER: AK100747
  ref <309>: DATABASE ENTRY DATE: 2002-08-28
ggctcgcccgctctctcccgtcgcagccccgtccgcgccgccaccccgctgccgccgccctcgacgcctccatccatctccgccccgacctccggattcgtcaccccctggtccccgtcgcacggcgggcgctcacgccacctccagcctccgctgcgacctagacgcggcctctggcgacccgggcgccctctctgccccctccatcgtgctcctggagccttttctactgcagccccatcggcccccttttttatgatgatttggctttttttgcacactgttggtattgtcaaagcggccgttcatctctttctttgtcactgtgaattacaaggggaagtcaaagtatgtgtaaccaatctgattgagcagtcaacaggttccttaatttgctcttgctcactgttgttgtaaatgcacctgtttatttctttgtttgcaccttgaattatgaggggaaatcaaggtatctaaccaacctgaattggacattagcagtttccctgaatttcttttacttattctatataaatgcgtagaaagatccaagtaggtaacagcctcatggtactgaagaaagaagaaaatgcctggaagtgtgggtttttttttttgtgcaacatgctgcctgtgaatgcttttatgaaacataattaattttattatataacttcattcaacaaaaatgctatggttcctgctattcgaataattgcccaaatttaggctagatttcccatgcttccatatactactgttaggctgatgcttgattgtttccggatttaccaagtttcaatttaaatctccatcaaatattagagagtcacaatcaagcataaaaggtcattcgcttggtgagtttttgattttattatctctctgattccttgacctgaattaacattatttttttttacaagaaaagatcattctctaggtaacatataaatattctctatgagtatctcacatgatctgaagttacagctgaaactaacattgtcactgaaacaaaattgcagagtttttaaattgtcatggatgctcatgtctgagtttaagtcgtgtggtaacaggtaaccacctttatcccgtggaatagcatttggcatggccatgctggtgggtggtataaaaatcacaaatgtctaaaatttgaaatagcctttgaggctgaatgatttgtcaaaaggttatgctcaggtgacaaaattctttcgcatgtccgattgggaatcggcttatgaaacgaagcccatatgggtaaggcaacacctgatttgtttgttacctagaattggtgtctgcattgcaattatcacatgaagcatgcctttgattttctcaatcttcaatagccgcatgaaaaagatttgtattctatttttaatcaatttttgttacacaggtatgcgttcctttactattactccatgcacaggtaatttgctttccagttagcagcactaactttggttgtcctaatgtcctctttaataacaatattcttctgtacaaattggttcttcatttagaaggttgttaaacgggtaaaatccatgtaaattcgtgagagtaataatgttactcatgttggcagctgagcactctgctatatatattaaatttggtactgctcaatctaatcccatggtaagtagtgagcacctgtttatgaaatttttaagatcccatgctcattttattccaaattataaagcctgtatatataatgtgcaagacaatatcctggccaagatgatgttgttgcaagaatgggagaaggatgatcggtttatatatgtctggcttcttagtttttttaactaagagattcaacaacagtctcatcttatttttggatcacagttagctgaaactctggtaatgaacataaaggttaagagaaaaaaaaagtattttaaggcaggtagagccatagagcattcttttcagtaaaaagaattataacaaaaattcagcatatttggtacagaacaagcatggctcctttggatcggattcactacaggttcctttagcacaggtgtagatttagcaagacaatatttgaaatttttgtatagatgatggacaccaattgatctgacaagtttggttctaggtgatgattaatctcttctacagttt

SEQ ID NO: 25306 - DNA, 1025 bp, Oryza sativa
  ref <308>: DATABASE ACCESSION NUMBER: AK100748
  ref <309>: DATABASE ENTRY DATE: 2002-08-28
gagctagctagctaataacacataatattcctagctagctaattggttgctgctgattgcatatatatatgtgtatgtaattaggaagctgagctgaggagaggagaggagaggagagtacatacatgatggccgcatctgcaggtccaggcgtcgtggtggtggcgctggtggtggtggtgtacctcatcttgttgatccggccggctgcgtcatttcgcgtcaacgtcggcgtgggtatcggcggcggcatcggcatcggcaaccagaatcagaaccaggaccagaaccagaaccagaatcagaagccgtactatgatgatagcaataacaacaacaattacgatgagggcgagggggagggcggcgatgatcaggaggagggtccggaggcggcggcgccggtggggccggggcagtcgttcaccggcgggcgcgggacgtacaagtacatggcgcacgagttcctggatgctcacaacaaggtgcgcgcccagtacgggctgcagccgctgaagtggagcaacaagctggccaggtacgcgcggcggtggtcggcggcgaggcggttcgactgcgtgatgatgcactcgccggagtcgccgtacggggagaacgtgttctggggtaccgggtggggctggcgcgccacggacgccgtcaagagctgggccggcgagtcctccgtctacgactggcgcgggcagagctgcaacccggggcagatgtgcggccacttcacccagatcgtctggaacgacaccaagctcgtcggctgcggccgctccgagtgcgtcgccggcggcgtcttcatcacctgctcctacgacccgccgggcaactggaagggagaggtgccgctaacctaacccattccattccattcctccacccacacgcgttcctgcacactagctagctacctgtcatttcttcatttctttctagctagtgccagatcgatttacttttaatttccttctggagtagcatatatatacgtatttcagttttttttcttttgc

SEQ ID NO: 25307 - DNA, 1086 bp, Oryza sativa
  ref <308>: DATABASE ACCESSION NUMBER: AK100749
  ref <309>: DATABASE ENTRY DATE: 2002-08-28
aatggatcctagccactacaagggcaaccatacatatgttccagtctctcagaagggatattggcagtttgagatgggcgatgtcctgattgggggaaagaccacaggattttgtgctagcggttgttcagctatagcagactctggaacatcattgcttgctggccccacagccataatcactgaaatcaatgagaagatcggtgctactggggtagtcagccaagaatgcaagacagttgtttctcaatatggacaacagatcctagatctgttgcttgctgagacacagccatcaaaaatctgctctcaggttggtctgtgtacttttgatgggaagcatggtgttagtgctggaattaagagcgtagtagatgatgaagctggggaatcgaatggtctccaaagtggtcccatgtgcaatgcctgtgagatggctgttgtatggatgcagaaccaacttgcacagaacaagactcaggatctcatcttgaactacattaatcagctctgtgacaagctcccaagtccaatgggagaatcatctgtggactgtggcagccttgcatccatgcctgagatttcattcaccattggaggcaaaaagtttgcactgaagccagaagagtatattctgaaggttggtgaaggagctgctgcccagtgcatcagtggattcacagccatggacatccctcctccccgtggtcctctctggatcctgggtgacgttttcatgggtgcctaccataccgtgttcgactacggcaaggtgagggttagcttcgcgaagtcggcctaaacgtgttgttgtcacgttcctaatgacgaggtggacgcatacgccgagagaagaagaccgtagcttttaactagcgtatttatccggcgatgtgtgtatatatgcatgctacataacatgtttatgttttccaaggcctgagatggcgcccgtctattttagcttggcaagaatatctcggaccagtctctgttcgaattctcgtactgatatgtgaacttctgataacatgtgcactgtgttttgtgactgaattgctagtcagtccgaaggttaattatccc

SEQ ID NO: 25308 - DNA, 2293 bp, Oryza sativa
  ref <308>: DATABASE ACCESSION NUMBER: AK100750
  ref <309>: DATABASE ENTRY DATE: 2002-08-28
ggcctgtccaagccgtcgccgtcgccgctggaatgatcggcggcgtcggccgcagcaggcggcgtggccgtgcgccgccagttctgccctcgagcgccgccgcccgccgcgccgagcactccgtctcttgctggtactgtgactgcaaaatatattccttcaatgacatcatatttaatttgggatggagatatgctagatgctattgtgggactcaattggtgcagtttatttcagtggtcggtcatttagtacctggctacaaaatctactggtgactacaatttgtcccttcatttttcaacttctaacatcaaccattcagcatgcccttaatctattgcaggcttccagctttggcatatcaataatggacatcgcagcaatcatagcatcaacagttttttctattgcttttcacgaatttggacatgctgttgcagctgcaaggtccttatttgctgacctacattttctacgagatgttctgcatgtgtttgcattcatctgcagaaggcatactttatatgttgacttacaatattaactttcacccgcttacagtattcctttcgcacattgctgacacattcattgctaaatatgcaacagcgagggcatacagattgagtatgttgcggtattcgtagctgcactttttcctggggcattaattgctctgaactgtgaccagctgcaaaatttacctcttttttctatgcttcggatttattgtgcagggatttggcataatgttatgtatttgtggcatgcatgctaacctatagagaccagaagttgtgaattaaaaaaaggagcacatttgagaaatgccagttcggcagttctgcattactgctgcagcttcttatcatatttttgtaagcacgttcattcataatgatgtttatttatgatttcatgtctaatagttatgtggagtatgtgtcatcatggcattattactacctgtggtgctgtatcctctctttgtgactggtggtcttatgattacaggagtcccagaagcatctcctctgtcaggatacttgtctgctcacaattttatcctttctgtggatggattgaacataacaagagctgatgaatggatgaaaatgcttactcaggacaatgtagtacaaataagcagccgtgatctccttgaaggctctgaaggctatcgtgccactggttctagaaagggttactgtgttcccaactcatggatggatgcaagcaagaatctttggcagataaatgacaagctatcttgcccagatgatctggtagcctttcaaagaatgagtgagaaaggtattggcaagaaggaagttgaagacaaatattgtttgattgcaaaagatgttgtcaagcttaaaaaatgtggaaatggatggcggggggccgaagatggcagaagcaactttgcatgtttggaggatgagtactgtttggtgcctgttctaggccctgggatttcatggatagagatctcttatgccagaccttattctttggagtgcttacagaaagaaaggaactcatcattgctgcatgatggaaataataaccctggattgggtccttgccagggaacttttgtttatgcgggtgatctgttatcagcagcacattctattaagttatcctcttaccgacctcgatggcctctcttgcttttcattgcagatgttcctcgtatcttgcaagatggtttaagttgtttatttcgtgtgtctgcagcattggctgtagtcaatcgcttaccagtgtactttcttgacggggaagcgattttggagactatgttaagctacttttcttggtttactcggagacagcagcgcaatattcttaaggtttgccgctttttgtggacgatcttgtccattgttttgttctcaagaaccctgtattccatgacactatattatggctttgtataactcctttatatggaaatgtctcttttttttttttgagtttatcttatcataataccatagatctgatcaactgtatgagatcatacacaatactggtaatatgtaagacggatgctctcctggtctcctgacaaaattgcaggccagcattgttacagaacaaagtggccttaactttagtgagtttatgattaaaatttagacaattcccgagccctcatgcttgtagaatattttgacccaagatatgagtgggtttgtgggtatgcacctcactgttgtaagttaaaacgggaatatcaaatttcaattgatctcaacatgtttcggtggagatctgtttg

SEQ ID NO: 25309 - DNA, 2339 bp, Oryza sativa
  ref <308>: DATABASE ACCESSION NUMBER: AK100751
  ref <309>: DATABASE ENTRY DATE: 2002-08-28
gatatgagactctgacacgtacgcacagctagatcgaagccctggtcgagtttataaattgagatatatccgtcctccattctcaggccagttcttgcaagactcttgccgtgttgagactgcagaaacgagagctagctagccagaggctgcaagaagattctgcacccatagatcgtctaccatggccacaaacccaggactcttcacggagtggccatggaagaagcttggcagcttcaagtacgtgttgctggcgccgtgggtagcgcacgggtggtatgaggtggcgaccaaggggtggcgggaggtggatctcgggtacatcgccatcctcccgtcgttgctgctgcggatgctgcacaaccaagcctggatcaccatctcccgcctccaaaacgcccgtggccgccgccagattgttcgccgcggcatcgagttcgaccaggttgaccgcgagaggaactgggacgaccagatcatcctgagcggtatcctactatacctcggcgcactgtacgtaccgggcgggcaacacttaccgctgtggaggacggatggcgcggggctgatcgccttgctgcatgcggggccagtggagttcctctactactggttccatcgtggcgttgcaccaccactttctctacacccactaccactcgcaccaccactcttcaatcgtcactgagcccatcacatccgtcatccatccgtttggctgagctcgttgcctacgaattgctcttctcgatcccactgatcgcctgtgccttgactggaactgcttccataattgcattcgagatgtatttgatttacattgatttcatgaacaacatggggcactgcaacttcgagttggtacccagctggctcttcacatggttccctcctctcaagtatctcatgtacacgccatcgtttcattctctgcaccacactcagtttcggacaaactactcccttttcatgccgttctacgattatatctacaacaccatggacaagtcatcagacactctgtatgagaactcactgaaaaacaatgaggaagaagaagcagtggatgtggttcaccttacacacctgaccaccctgcattccatctaccacatgaggcccggtttcgccgaatttgcgtccaggccctacgtttccaggtggtacatgaggatgatgtggcctctgtcatggctctccatggtgctgacatggacgtacggtccttcattcactgttgagaggaatgtcatgaagaagatcaggatgcagtcatgggccataccaagatacagtttccattatggattggattgggagaaggaagctatcaatgatcttatcgaaaaggcggtatgtgaagctgacaagaatggggctaaagttgtaagccttggactcctgaatcaggcacataccctgaataaaagtggagaacaatatctgctgaaatacccaaagttgggagcaagaattgtcgatggaaccagcttagctgctgcagtggttgtcaacagtatcccccaaggcacagaccaagtaattcttgcaggaaatgtttccaaggtggcgcgtgctgtagcgcaagcattatgcaagaaaaatatcaaagtcacgatgacaaacaagcaagattatcatttactcaagccagaaataccagaaactgtagctgacaatctttcgttttcgaaaacaggcaccgcaaaggtttggttaattggtgatggtctagattctgctgaacaattcagagcacagaaaggaactctgtttatcccatactcacaatttcctccaaagatggtacgcaaggacagctgcagctactcgacaactcctgcaatggctgtaccaaaaacgctgcagaatgtgcattcatgcgagaattggctgccaaggagggttatgagcgcatggcgaatcgcgggaattcttcatgcgttggagggatggaatgagcatgaatgtggtgacaaggtgcttgatatggacaaagtttggtctgctgcaattatgcatgggttctgcccagttgctcaaggttgatgattcagttgcaaagtatcagaataagttttagctggattatgctatgtggtcaccgtatcagaaagagagatgttctgttggcaagaagagatatagtatctgagtaatttcatctgccatggtttttaaaacattgttcatcatctcctttgatcaaagactggccatggctactttctgtataagtatctgtcctttttagtccatagtgtaattcagcaacaaaacactcttggcattgttatgcagtctcatgaatgtttttccagcatacggaattacgg

SEQ ID NO: 25310 - DNA, 3678 bp, Oryza sativa
  ref <308>: DATABASE ACCESSION NUMBER: AK100752
  ref <309>: DATABASE ENTRY DATE: 2002-08-28
gtatgtgttctgtttttccatcgtttcctttctgattgtagttatggagtatcaaactaccatcatcatctatcatctcctctctcagattcaggtaaatcctttcaggcaaccggttgcagtggataatagtgcactatgcttaccatgctactccaactgctttgtttttgggatgcagaattgcaagtttgtatcaccatgaaatgttcagagattcaactcttaacaaataatatcactaactttttcaaagaaggcaaggataccatgaaatattttcatggacgaaattgccacctgtttttattatttagtctttcagaatagatgccttggttacttgtaagaatgtaagatgcactcatcagctcatgcttgtaaatacagttgtcgtataattgtagacctgtagtaacttgtaagatactacatatataataccctaaagttgcagaaagacttgctagtaggtagtagcaatcccatgctggacatggtgaaatatggatcagttatcaacagcttttgtgccaaggtactaatgaggtagtgccgaagaagcttgttggagacaaactttctgcaatagtaccattcatatggtgagttttctgcttttcatctaattcagtacctttagttatctaaatgtccctatcactgcatttcattttaaaactgacgctttcaaatttcttgtggatgagaagtttagatctaactttgattcataaatagaatgaccagcgttaacattttttttgtctatgagaatcatttcttgctattcttgttccaaattttggaaatattcccaatataaagtaaggttcttatggttttaatgataaaacggttaagttttttggtctcatcttgcaaacttttcttctcatccacataaaatctgcatatatgatgaagcagtcataaatccaattacacacactgcctcatataaaaaaactagcattgcacacgccactgcagtgaacacactgttgcatatccaaaactaaaattccacacgccactgcagtgaagtaaggagtccaatcacagagaatcctatattacaaaaggataaactcattttctatgttagttcatcatgttcagtactgttgaggagaaagcttgctgaactcctgcttctgcattctgatgttatgccctttcctggcattcccatctgcaatgagaacatcatctatccatgagacaatattgtaggctaaactttccagcaccctcgagtagctttcaagtattgcctgcccaatgtcctgtagcaaagtaaaatggagacacgccagcattagcaatgatgaacattctttgatccaaaggagatggctcaatcagttatttcgtatatgtttgtatgtttataccatgtatgatagttctaaatattttgtattagcattcagtatacttctgtctcttaaattgtagaataaacacacagtacacttttatgtttgcttccaacattaatcatatctggtgtaaggaaaatacagatgaactctgagataatctgaaatttgggtatttcttatgtataagcattaccttgttgtactgaatcttgcttgtgtccagggtagtctgtgacaagcctggaaacctctgcttcaagcacaacaacaaactcctagccctacttgcaaggatcagattcttgtccccatcagcattcagctcagtaacattttcccattttgacaccacatgggtcatgcttgcttttctccgccatacgtacatcgcagcctcaacacggtctgcaatctcaagtgcctcatgttctgagctcaagttgaggaagttgaggaggtggtctggtgagaactgatcccctgcagacatgtaccggtatatggcatcacccacgccaaccttcccactctgttgagtagcagaaatgcatttatcagggggaaatgataatttcagtaatcaggaccatagaaagacccagatcaagcagtttctctgtacctttggcagtgtttctatgtatgacagtggaacctgcatttcagagaggatgccgctgttgatctccatggccatcttgtggatttggcttgcttggtccctcttttgttgcagctcacggtgcatccgatcagacaggcctgactctgggacacatggttcagggagccaccacttgtcctcgctgcgctgaaacttcatgctgtcactgaaggactgctttctctgatctatgtaccagaaatctgtcttctcaaagctatccaatatttcctgcaaaaatggtgtgcaattattggtcatacattgtactacaaaagttgttcgaaaggagccttccggaattccgcaaatcgggactttaccaggagcatagtttccagtttttcaagtgctggaaggttcattagtatgtctgatcttggtgaggttgccatcacctgtagaaaacagaaatttgtgcctaagtagacatgccatgaagatgaaacttatcagagtgtgagacgagatattcttgcaatggaattacatcatgagtgcttccatctggcatggcctggacttttggtgagaattcaacaatgtattcgcagatggagaggaggcagtccatctccctgttccacatcgccttcttctcaggaggcagtggctgcaacctgtggcaggttccaaacacagttgctgcagccaagaacaagcacagaggtcaacccactgttgcctgcatcaaagaccaacttaacagaagattcatctgcaattctcagaactaccatatagattggtgatggcattggagatggccacagccgtgcagacacccttcccactcccagacatgtcctctccaagaagcagcttggtgtacttctccttcatcagctccatctctgaacaacacccatcaatcaaccaccagaaacaccagaggacactaccagaaatcaaaacaggttggcatatctataccttcatcctccagggacttctcgttcacaacttgctgcagcttcttcatgctgagcttgctcaccgatggcgagaggcgtggtgccgtggacgtcgtgcggctcatgcttctccctcgtggcggcgatggcgtatagtgctcctgctcctcgccaccgccattgtcggagaacgacgacacacggaacagcggtcgcgcgtagtcgcgatcgtagccgtgtttgtggaagccagggaagcctgaacctccactcatggttgcagctgttcttgctgcctgcttctgaagacctgcaagaaagacgatgaatgggaatggcacaagaatggaggcatgccaagaacagagaggataggtacctggtgttattgacttgctttcccttttttggtgatcatgtcatggctgtcacttacaagtgtatggaacaataataaaggcataggggctatctttccttgacatgggctgttgcaatcaatatggtttgcaattatgcaggcatgtgagcgatttgcccccacagtgtaggacaataaggttggattggttggatgtcttgcaggtttggtgaatgtgttaactgtcaggaaggtacaaaattttggcacttggtgctgtcacattgtacccagattttgactcacattttcggtgaccatctatttcttcaatttaagtaattgcctctc

SEQ ID NO: 25311 - DNA, 1368 bp, Oryza sativa
  ref <308>: DATABASE ACCESSION NUMBER: AK100753
  ref <309>: DATABASE ENTRY DATE: 2002-08-28
gagtctctcggcttctagactagggaagctcaccaacccaagaacaagaagtgatcggagatggctcccaagaaggtgctcctgctctgcggagactacatggaggactacgaggccatggttccgttccaagcgctgcaagcgtacggggtgtccgtggatgctgcctgccccggcaagaaggccggcgactcgtgccgcaccgccgtccatcaggggattggccaccagacatatgctgagtcaaggggccacaatttcgcacttaatgcttcgtttgatgaggttaatatcaatgaatatgatggcttggtaattcctggaggccgtgcaccagagtatctcgccatggatgaaaaggttcttgatttagtaaggaaattctctgatgcgaagaaacctattgcatcagtttgccatggacagttgattttggcagcagctggagtagtccagaaccgtaaatgcaccgcatatcctgctgttaaaccagttttggttgctgctggtgctaagtgggaagaagctgatactatggacaaatgcacagttgatggaaatcttgtcactgcagtggcttacgatgcacatcctgaattcatcagcctttttgtgaaagcgcttggaggctctgtaactggctcaaacaaacggatattgttcctttgtggggattacatggaagattatgaggttatggtaccatttcagtctcttcaagcccttggttgccatgttgatgcagtttgccctgacaagggtgctggggagaaatgcccaactgccatacatgactttgaaggtgaccaaacatacagcgagaagcctggtcacgattttgctttgacagcatcatttgacaatgtggatgcatcaagctatgatgcacttgtaattcctggtggacgggctcctgagtaccttgcactgaacgataaagtcattagccttgtgaagggcttcatggataaagcaaagccagtcgcctcaatttgccatggccaacagattttatctgctgctggagtccttcagggaaggaaatgcacggcgtatcctgcggtgaagctgaacgtggtgcttggcggggcgacatggctggagcccaatcccattgaccgctgcttcaccgacggcaaccttgtgaccggcgcggcatggcctggccacccggagttcatctcccagctcatggcattgcttggcatcaaggtctccttctgaagcaacgagaggtcaggtcccagcgtttttgcacgcgatatagcaagacacagctttgggctttcgtctaagatatatacagtcttaccgatactgtaccagtctgctgtcgttttttgtgcttgaaataataagataattact

SEQ ID NO: 25312 - DNA, 1294 bp, Oryza sativa
  ref <308>: DATABASE ACCESSION NUMBER: AK100754
  ref <309>: DATABASE ENTRY DATE: 2002-08-28
ggatatatacaatttttcctcccatcgccatcgtcgagctccttactctacgtaccacacgacgatgaagctcctacgcgtcgtcttggttctcctcctgcccgccgtctcctcctgcctcccctgccggcggcgcgacgactacgactacgactccatctttagcttcggcgactcgttcgccgacaccggcaacggcgccgtcgtcttcgccgagcactcgctgttcagcccggcgacgaagcctccctatggcatgaccttcttcggccaacccaccgggcgtaattccaacggccgcctcatcatcgacttcatcgcggagaagctcgggctgccgttcgtcccgccgtacctggcgcacaacggcagcttccggcaaggcgccaacttcgccgtcgccggcgccacgagtctcgacgccagcttcttcagcgacatccccggcgtcggcaagttcgttctcaacaccagctccagcgtgcagctaggctggttcgactcgttgaagccgttgctgtgcagccctgcccaagagtgcaagggcttcttccataagtccctcttcttcatgggagaatttggcgtcaacgactacagcttctccgtcttcgggaagaccccgctggaagtgagatcgatggttccagacgtggtgaaaaccatctcgtcagccactgagaggataatcaagcgggatggggcaaaggcagtggtcgttccagggataccaccattgggatgcatgccgcccaacttagcgatgtttcccagcaccgatccagcgggctacgaaccaggcaccggatgcctgaggcaattcaacgagatcgcagtgtatcacaacacgctgctacaggatgccatcaagaatgtccagaaaaaccacccagatgtccgagttatctatgcagatttcttcaccccggtcattcgaatcgtccagtcccctggcacatttggttttaccagcgatattttgagatgttgctgcggtggaggtgggaagtacaacttcaacatgagtgctggatgtggcatgccaggcgcgacggtgtgcgaggatccatccacccatttgttctgggatggccacatgacagaggcagcctaccacttcattgctgatggctggctaaacagcataaatgaatcctagataaactatgttagaatctgtcctcctttctagcttaaatttggtatatcattgttgaattgctacggaggttgaggggttttaaggaccatttctgtcagaacaacatatatgaatcctagaaaattatgttgg

SEQ ID NO: 25313 - DNA, 3042 bp, Oryza sativa
  ref <308>: DATABASE ACCESSION NUMBER: AK100755
  ref <309>: DATABASE ENTRY DATE: 2002-08-28
gaatcccctttcagatccgttgttgcgtgggacccacctgtcatccctaagaaagtaaccacgcaccaagaaaaatagaaaaaaaagcgcgccgctaacctccgccatccccacgtcgcgccgcgccgccctccccacgtcgtacctccgccgcccgcctcacccgccgcactcccctctcccctctccctcgcgtcgcccacctcccctcgccgcactcccctctccctcgcatcgcccacctcccctctccccgctgcctcaggatctcctccgcgccgccgccgttcagtcgtcgtcgccgattctccttcgccgcgcacagccgtcgtggcctcaggttgcttgcaccttctcccatgctgactaacggcgtcgtggccgccgccgccatcatcaccggcaccgacctctcctctcagtgtatgacagatttggagcctccagacaagcaggctgatgcgcaacttgctctgtggtggttagcaccgaatcatgtagtactaatgaagctaattaggcgcaagagctgctctccaccctgattgccatagaccttccttccaggtgagaggtggggcagaggcggatcatgcctgatgtcgggatgtgcgagtaaattagagggttgaaaagggcggcgaagttgtgaagagctgattccaatcctcggtctgactttgggatcaattgacatatctctaaagtgctgcagttgtagtaggggtctctgtataaaccactcttgagctttctcaactccaagtggatctattgcaaccaacacagtggctctccctgctgaccatgtatgtgtcttacttctgagataagtctgttttagtcgaatttcctatttttattataggaaatatccaatttgagaaatgaattgagatattaccctacctactctgttatatggcttcaagtatttatacttgctggcatcgcagcttataccttcgcttcgtaaagtaacagattcaaagagcactgaccttaaaaggaagagagcaaacaactggtacagttccttgagcactgagcaaaaggattggacatgagtaaccttcaaattttggtgttagactacacatattctgattctaagtgtaattagaagcatctctgccagtcctttatatgttccatttacatttgtgtcgtgcaatgtcaactgctgaaggtaatagtgtaggttgtgtaaataactgtatcatggttcggcctagcaagcccgaggaataatttgctctttctgtaaacaaaaaagtttgcgatctaattctttctcaggttactgttcccattgacctgcagtcatccgcacacatatacctacaacagctaccattctcatgtggatatgacttgcaaagtaaaacagaactttgatgcatgagcatacttgatttgatttgtaatttgctcctgcgtacctatctgaacttttttgcctgttcaactattgcagggatttatcataattagctagacattttcatctgaacatttttgtctgttgcagcattgcagggaccatcacaagtacctggacattttctcatctacttacaaactaaaacagaacttgatgcttgagcatacttgatttgatttttaattttctgctggcattgcagggacatcacaagtgcctggacattttcttctctactaacatgcagtaattcagtgcctatctctcattttcaatttttacagttccagattaatgtgcctatatttatttagcttctctatttaaaaagttttttatctgtttaatcgtaaaaaggctttcacatgttttttttaacagagccacaacatgttattgatacaaaatggtttgatttgactctttcctgccacacattagaggacgacctgccatggtcgatgttacaaacttaactgctgccaaggataggagaaagcgtgacagagaggtatgctgcactccctctacaatcgtcacaggaagggtgcccataagagatatcacaaattatgctggctttggtgctaccaagcctattcaggaagggtgcccataagagatatcacaaattatgctggctttggtgctacccaaacctattcaggaaccgtgatactgaaaggtcttctatgggtcttggaagtgctcatccactgttttgatcagtgaaggggatgctgttagtgatggagttagaacaagacataaaggcaagcatctatggtgcttgagacctactttcttattacgtcacccaattttgcttgaacaagaggcatgcaaaacatttgaaggatggatcatgatcaacggcagagggtgagctgcgccatgggtcgtgaatcaccgttgctattgcctccaacttgtcgctggagccacgcgcccaacagctagagccaagatgaattcctgagagagtctctatccccttattctctctcttctctctctaaacctcacaccacatacatgaaaaggttgcggtgatgatggtattgttgtttccatggccgcctggtggcgatagtgacggggagaacgactgttgtggcgggcagagtaagaagacatctaggaggtcaccagtggagaggaggagggggatgaccccatcgtggcgaaccagcaatgaaggagatggccgttgctgtggactccgacaatgaggaaggcaagatcatcgaaggtaaggagcactgggtcgtcataggcacgagttcatcgaaggaatcttagatccagccatcggagagtaagaaggacctagatttggattggcatatttttttgtcattttttccatgtttcatcccatatatgttttacatgtttctttgtattatatcaaaatatttatgtataaattcttttgatgttacatattttttcttacttcgatttgtagggatatgttgatgtttcatcagttgaagcttgatgtttcatttacatgagtggaatgtttcaatcattattgtttcatcatttgaatcgcccaaaacatttctggtcaagtagtgaaatattttttg

SEQ ID NO: 25314 - DNA, 816 bp, Oryza sativa
  ref <308>: DATABASE ACCESSION NUMBER: AK100756
  ref <309>: DATABASE ENTRY DATE: 2002-08-28
gctctctctgactaccagcacgaagatgacgatggtggctagctgtgcggggtggcgcgttgggcgtggaggacgctcgtcggagccagtgcccgccgttgtccccgtcgccgtcgccccaccgccgcggggtcgaggcgacgacgaggagctcggcgataggtgcggtgaataagagggagagtgggagcgggacgtggaggccgctgctggcgccggggacggcgttgccggggggagcttctcctgtcggctcaagacctcggccgccgaggaggacgacgacggcgcggccccggcaagggtcgccctcaagctcgcctcccttaccgcgctgctctggctccccgccctcgttggtcttctcatcggctgccccaccttgacgaccatcggattcgccgctgcctcctcctccacactccgcctcgccgaccaccagattcgccgccgcctcctcctcctgctccaccacgtggctgccttctcctctctctctctctctccttctcctcctccaagttaccaggtaccaggtatcacggataccaggtacaaggtattaggtatcatggtaccagataccaggtaccagccggtaccagatttcaggtatcaaaggtatcagtcggtaccaaaggtaccaagcaccaggtaccaactgatacccaaggtactaggtatcaagatggagtgcacgtggaagcggagaggagtcacttaaattatcccgttacaacgggatcccgttttgtagccgctctcataaatatattataattataaccagtctcttatagttggattacccaccat

SEQ ID NO: 25315 - DNA, 2657 bp, Oryza sativa
  ref <308>: DATABASE ACCESSION NUMBER: AK100757
  ref <309>: DATABASE ENTRY DATE: 2002-08-28
gaggacgagaccgagagcgcacaaggctttcttctctccatcttcgctgttccacagtccacacccacgcacacaagcaagcggcctcatctgttttattgtttttcttgatccccttccctccatatctctctcgcgccgatcgagaggggggcgggcggcgggcggcggcgcgcggcgggagcatgcgcgagtaggttggtagatgagggcggcacccttcagtgccgacgggaacggggcggcggagctcgcggggagcatagcggcgctgctttggccggaggacaagggcggcggcggcgggggcggcggggggtcgttgctggtggagccgaggtcggtgctggactgcagggggagcccgagcccgcccaactccacatcgacgctgtcttcgtcccatggtagcggcgcggcggattctatatctaccggcgtggcggcggtttcggagagcagcgcagccgccgccgaagccaccagatgggcggcccccggcgaacacggcggcggcggtggcggtgagctgccgcccataccgggggccctggatgtgggcttcgtcgcggaggagagctgggacgccatgctcggcgacgccgcggcggcggcaggccaggagcagacatttttgaactggatcatggctgcccccggcgacatggaaccccaggcgccggggctctcgcagcagcagctcctcgccaatgccgccgggttcgggttcccgctgcagcatcaccccggtggcgtctcctcgccagccgccctcgcctccgacctgtcgtcctccggcgggaggtcgctcacaagcagcagcggcagcaatagcaaggccacctccgctttcggcctcctgtcgcccgaagcggcgctccagccgccgccggcgactactgcgcctttccacaacggcgctgacatgaagccccctctccttggcttgccatcacccacactactcctcaaccagcatcagccgacgccggcctccaccttgttcatgccgttcccctccttctccgaccatcaacaacagccactgctccagccaccgccgaagcgccaccactccgtgcccgacaatctcttcctcctccacaaccagccccagccaccgccgccggcgcccgcgcaatgcttcccgtttccaacgctacatagcgcggtacccttccagctccagccttcgatgcagcatccgcgcaacgcgatgaagtcaaccgcggcggcggcggcggcgcagcagcaacacctcctggacgagcttgcagcggcggcgaaggcaaccgaagtcggcaactccataggcgcgcgagagatattggcgcggctcaatcagcagcttcccccaattgggaagcctttcctccgctccgcctcctacctaaaggacgccctcctcctcgcgctcgccgacggccaccacgccgccacccgtctcacgtctccgctcgacgtcgccctgaagctcaccgcttacaaatccttctccgacctctcccccgtgctccagtttgccaacttcacggtaactcaggcgcttctggatgagatcgccagcacaaccgcgtcttgtatccgcgtcattgatttcgacctcggtgtcggcggccagtgggcttcgttcttgcaggagcttgctcaccgctgtggctctggcggtgtgtccttgccgatgttgaagctcacagccttcgtctcagccgcctcccaccacccgcttgagctgcatcttactcaggataacctctcacagtttgctgctgatcttggtattccatttgagttcaatgctattaatctcgacgcatttgatcctatggaactcattgctcctacagctgatgaggttgttgcagtaagcctcccagttggttgctcagcacgcactccactcccagctatgcttcagttggtgaaacagcttgctcctaagattgtggttgctattgactatggcagtgatcggagcgacctcccattttcccaacacttcttgaattgcttacagtcttgtctatgtcttcttgaatcacttgatgctgctggcactgatgcggatgctgtcagtaagatcgagaggtttctgattcagcccagagtggaggatgcagttcttgggcggcgtagagctgacaaagcgatcgcttggcggacagtgctaacatcagcagggtttgcacctcaaccactcagcaaccttgcggaggcacaggctgactgcctcttgaagcgggtgcaggtccgaggcttccatgtggagaagcgtggagcaggccttgcactctattggcagcgtggcgagcttgtatccgtctcagcatggcgatgctgatcacacctgcctcgaccatcatgattcctacaccatttgcaggcatgtttaactccagtaatatgaattttgtcttgcaatttaaacattgcaaagaaattattatcatggttgttgcacactctgttgtttattaggtaggcctaatggatttggcaatcttggtatgagtgtctctgtagtgtgtgaccagtggctatggcctctagggtcttaccactatgttgttgctctccgctcaattggccacttcatgttcttggaaacatttcgttgtgaatagataagataatttggcatgttgaatgtccttatg

SEQ ID NO: 25316 - DNA, 2636 bp, Oryza sativa
  ref <308>: DATABASE ACCESSION NUMBER: AK100758
  ref <309>: DATABASE ENTRY DATE: 2002-08-28
gcccaactcccaagttgcaatcgagaataaataaaaatcccaatcccctccttctcttcttcttcctccctgttcccttttcgattcgattggattggattgttttgctggctcgctctctctctctctctcgtggtgtggtgtggacaagaaaggaaggaaagatggagggcggcgtagggggggaggtggaccacctcgccggcgagagggccaccgcgcagttcgacgttgaacacatgaaggttgcctgggctggctcccgccacgccgtcgatgtcgccgaccgcatggcgcgcctcgtcgcttccgaccccgtgttccgcaaggataacaggactatgctccccaggaaggagctgttcaaggacacactcagaaaggcagcccatgcgtggaagcgtatcgtcgagctccgtcttacagaagaggaggcaaatttgctaaggctatacgtggaccagcctggttatgttgatctgcactggggcatgtttgttcctgctataaaaggccaagggactgaagagcagcagaagaagtggctacctctggcctacaggttccaaataattggatgctatgctcagactgaacttggtcatggttccaatgttcagggccttgaaacaaccgccacatttgacccaaagactgatgagtttgttatacacagcccgacactgacctctagcaagtggtggcctggtggcttgggaaaagcttccactcatgcagttgtgtatgctcgtctgataactgaaggaaaggactacggcatacatggtttcattgtgcaactacgaagcctagaggaccactctccccttcccggtgttactcttggtgatatcggcggaaaatttggtagtggtgcatacaacagtatggataatggagttctgcgatttgaccatgtgcgcatcccaagggatcaaatgttgatgaggctttcacaagttacgaaagagggaaaatatgtgcactcagatgtcccaaaacagctgctttatgggacaatggtttttgttcgtcaaacaattgttgcagatgcttctaaggctttatcacgtgctacttgcattgctgtaagatacagcgctattcgaaagcagtttggccctcaaactggtggccctgagactcaggtcctcaattacaagactcagcaaagcagactctttcctttgctggcttcagcttatgcatttaggtttgtgggtgagtggctgaagtggctgtacacggatgtcacacataaactggaagccaaggatttctcaacacttcaagaggcccatgcctgtactgctgggttgaaggctgtgacaacatctgcgacagctgatggaattgaagaatgccgaaaactctgtggtggacatggttacctgaacagcagcgggcttcctgaattgtttgctatctatgttcctgcttgcacttatgaaggagacaatgttgttttgctattgcaggttgcaaggtttctaatgaagactgtatcccagttagcttctggaaaacagcctgttggtacaacggcttacatgggcaacatacagtacttgatgcaatgcaaatgtggtgtaaatacagctgaagattggctaaatcctgctgccatacgagaggtatttgaagctcgggctctcaggatggcggtgaattgtgcccagaacataaacaaggcgccaagccaagaagaagggttttatgagctatcccctgatctgcttgaggtggcggtggcccatatccagttgataattgtaaccaagttcatagagaaattagagcaggacatccctggtgagggagtgaaggagcaactgtgcatcctttgcaatgtgtacgcgctgtatcttgttcacaagcatctgggtgacttcctgtcgacggggagcatcacagcaaggcagggagcgctggcaaacgagcagctgggaaagctgtatgcgcaggtgcggccgaacgcggtggcgctggtggacgcgttcaactacaccgaccactacctggggtcggtgctggggcgctacgacggcaatgtttacccggcgctgtacgaggaggcgtggaaggaccccctcaacgacacggatgtgccggacggttaccaggagcacctccgccctctgctcaagcagcagctcaagctctccaggctatgatcatccatccatcatcctccctttcttgctctatcaatcatatcatactgcatacgatttgagtagtagtaaaataacaccagcatatgcaaggtgctggcttgctgctagtattttctttttctttataatttatttatttggggagagctggtattgtcttatttatttgggaagagctggtattgtatgtctggtgatttggtatagctgtaactgtgaacttcaccacatctcccccttctcaagggcatatgcattctactcctatggctgtgtttagttccttccaaagttgaaaatttgggttgaaattggtacgatgtgactgaaaagttatgtgtgtatgataggttgatgcgatggaaaaagttggaagtttggatctaaacacagcttatatgtatattgtgagattgtccgtgcggcgcttctagtgtgaaatatcctcccttgtcgagc

SEQ ID NO: 25317 - DNA, 1847 bp, Oryza sativa
  ref <308>: DATABASE ACCESSION NUMBER: AK100759
  ref <309>: DATABASE ENTRY DATE: 2002-08-28
gggtgagaggagagaggaaaagagagcgcgatatgggggaggaatcgccggcggccggcggtggcgcggcggcggcggtggccggaaaaccatcgggcacggcgcttccgaggagggggaaatcctgcaagggctgcctctactactcgtccatgctcagatcccgcggattcaaccccgtctgcgtggggatcccgcgctccatcccccaagtcccaagctacgtggtggacgagcccagagaagaggcggcggcgcaggggcatgatttgaggcagttcaagtacgcctgcgctggttactccatgtttgtggtggataacaaagacggccgaagcggcgagaaggagggcaagacgttgttgccatattgccaggggcttgagctattggtggacagcagattggttgagaagaaatcaccaaataatgagcctgctactgcctcttatagaaaggaaggtatgctaaagtatttctcttgatgccacaacttcttcatatttggtctacagttgaacaaaactctatgatgacttggtacaggtaattgtggagttttgttttcaaatgatttatgaatgatcaaactttttaaaactctgtcaatatgttacaacttaatactccctccgtcccaaaatataagtaactttggctatgtgtgtccagattcatagccaaaggttgttatattttgggatggacgtagtaagtaccaaaaggtgggttgaagctccattttctcagtattaagtccataggtaggtcatgtgcatttgacggtggcaattacacatttctgtaaactttagcttgggtatttccatttaaccatgtttcagtcatgtacaaacttgttcttttgttcacagacagctatagaaatatttgctaatagtatggtattagctgggaaaaatggagtgttaagtcaaattatcagtcatgttgagagtttggttcagttttgttggccaatgttcttctacaacaataagacccatctctttgggtgtaccatttcttcattgtttagattgatgtttaatacatttgcgtttcttattacagcggccaccagctctcggcaacaaggacaaagacccgggcaacttacaggacaggatttctatgcgaggaaagctagctttcagatttccccttcctgtccctttcttgtgattgtcttactgatgtagtacgaggctgctgcaggtttaggaaaagcgcgggattggtcgcttcaggcgttgcaaagaatctaaacaagacagctatttacatcaaggaaaacgtcgcagacatactttacccggaccgtcgaccacctaaataggaactatgctgcttgcccgtcgttgttcagttggagatctgaagaaaattgctaccgacatgagatacagaagactacctgacgccatatccttacaaattacaataaccacatccctattgaggagtggcccgagccacattgagcaaaattggacggtttcttggatgctcttaattctttccattgtacttgcatcgtttttgtaatgttatggccagatacaaactaatgttgtacatgcgacagccttcctgcttcattgaagcaaaaatgggatctggtcggtgaaatgttgaatgatgtcaactgttaactccttgagggcaaaaggttgatagatataagtagaagagtgctatccaatagtgcgcttattatcgtacagagtagcatatggttatcgttttcaccatgcaggaaaagccataatagtattaggagtatgttaatctgttcttttgctctctcgtactaaatactactcctttactactccttccgtccc

SEQ ID NO: 25318 - DNA, 1834 bp, Oryza sativa
  ref <308>: DATABASE ACCESSION NUMBER: AK100760
  ref <309>: DATABASE ENTRY DATE: 2002-08-28
ggcaattcgttgccaccaccatgcgccctagcccgccggcgccatcatcggcagtacagtgcctatgcgacgccatctgatccatctcaggccacccgaccgggatgccgcctcttgcagtcttgctccagctgcatgttggcctactaaaactgggcttggattcctgcttcgctgccacatcctcgttaaagtcaccaaccatgaactccaccaggtggatcctgggctgagctcgtacgctgggcggccgcaagaggcagcaaaatccataatgcctctgcttgacaaggccaaccacgctatccctatctggcttatgaacaaaactccccttgaacttggggcaactgctggactcagacttattggagatgacaagacaaactagattcttgaagcgattaggaggtgactactccaaaactgtgggtgtgattgatctcggaggcggatccgtgcaaatggcctatgccatctcatcaggcacagctgctaatgctccagaaatgcccgatgggcaggatccttacattataaaggagtatcttaaaggaagagattacaatgtttatgtgcacagttacctgcactatggtgctcgggcttctcgcgtggagatcctaaaaaggaagaatgggacatttagcaactgcatgctgcgcggattttgcggtaagtacatttataacggggagcagtatgatgcaacggcgcgccacaaggagcagactaccacaagtgcagagatgaggtggtgaaggcactcaacctggacgcgccctgcgaaaccaacaactgcagcttcaacggagtgtggaacggcggcggtggcgctgggcaggacgagctctacgttgcgaccagtttctactacatggcctcggatgtaagtgattaattaagcagctaattaatttatctgcataacagcatgagcagggtcgattacagcagatattggctcaacgttaaggcccaataactaaataggtatcctgaaaagaatggcccaataagttgatagcacaatgaatctaagtaggcttagtaggcctagaaatttaagttggtctagtaggttgagaaagaggtttttcttttttaacgagaaagaggtttcttgttaaaccgaccgctttgcacccatgtagtacttttgaatcgtagtaattttgtgcaaaaatgagtcacatgattaataggtacgtgcaggggcaggcccagctataattcaagggtattcagatgtataccaaagatttttggacaaaaaataggtatatatactctatagttcatatatgtatgcaaaaagataaagaagctacttatttgggccttgttttaccatttctgttgtattgggcctaaattttccactcccctccccctttccactcggcccgcattccacttgggccgcaactgagcccatttccaaacaaaaatcccctcctccaaaaatccccaattccctaagacactaaccctaaatttgtttggagacagccggttgcgcgggcggcggcgtgcgttgctgcggcgtgcggcggcggcgtcacggcgggccgtacatggatggatatcataaataacttattatacgtgcgattttaagacgtcaacatagatatatttgcatgaacggatatgcgtgcatatctgaatgcagtacagttgcattttaagacccttcaacattaatttcaattaatttgtatagcgcctgacaaaaaagccctacagtatgactttacttgctttgtgtacgacttttgctaatgatatactagtatataatacacagttgacatagctatcgatctatatg

SEQ ID NO: 25319 - DNA, 2184 bp, Oryza sativa
  ref <308>: DATABASE ACCESSION NUMBER: AK100761
  ref <309>: DATABASE ENTRY DATE: 2002-08-28
ggttcattccaccctcttccgatccccaaccgccgctggtccgtatccattccactctcctccgacccctaccgctgccggagtgctagggcatcacacgatgagtgttgcaactgaagcatgcccttcaccaaagctacacacaagactaaggctgtgggagtttgcagaccgttacgtatttgaaccagttgacggtcttgctgatttgttcctgtcagttgatcggacaaatggatcaatgagtctagtggaagagttgccacctcgtggtccctctacaaatcctaaagttagaatagtttttggtgtgattggagtgctcaaacttgcagttcggtcgtactttcttgtgatcactggccgtgattgtgttggatcctacttggggcatgcaattttcaaattgacgggactaaaagttctgccatgcaataactcgttaaatacttcttctgctgagcagaagaaaatggaatcagaattttcggaacttctggatgcagcagagaggactataggcctgtacttctcctatgatgtcaacttaacactaacttcaccgaggctgcatgatctaggagatcagtttaagtcacttccactttggagacaggcagaaccaagatttctttggaacggttacttgttggagcctctaattgagaacaaactgcaccaatacttactaccagtcattcaaggaagttttcagagtatccatgcagaagttgggtcagagaaggtaaatgtgaccctgattgcacgtgggtgtacacgtaggataggtacccggatgtggaggcgaggagctgatccagagggttatgctgcaaattttgttgaatcagagcagataatgcaatcgaaagaatttacagcatcatatgtgcaagttcgaggttctatgccttttttgtgggaacaaattgttgatttgacatataaacctagttttgatgttgtcagagtagaggaggcgcctcgtgtacttgaacggcattttcatgatttacaaaagaaatatggagctgtcgtggctgttgatcttgtcaatacacatggtggcgaaggtcgcctgtatgaaagatatgcaaaatcaattgagcctatcttgagtgaagatataagatttgtgcattttgacttccatcaaatctgtggtcatattcactttgaacgcctttctcaactgtatgatcaaattgaggattatcttaagaagcataggtacttccttttaaatagtaaaggtgagaaaatggaagagcagaccggaaccgttagaacaaattgtgtcgattgtctggatcgtactaatgtaactcagagcatgatcgggagaaaaatataggaaagccaactgcaaaaaatcagtgttcttggtgacaacaatacaatcagcgattatccggcatttgatgcagattacaaagttttgtgggccaaccatggcgatgcaataagcactcagtactctggaactcctgccttgaagggagactttgtgcggtacggaaagcgaactacacagggaattttaaatgatctgtggaatgcaatggctagatattacctgaacaactttgcagatggtactaaacaggatgccatggatcttcttcaaggacatcacatatcctcagttagtcgggatatgccaactccaaccaaaggacttatagagaatcacgcgtccttccgccttgcttttgctctgcttttggctgccgtgatattcttgataatgtcactgagaagagcacgtaatgatgttttccatttggtgctgtcactactatggtctggtttttgctttggcatacgcgttatgtcaaagctaacggacggaagttcacgaaccgtcctcgctttcacctatcgcgccattgatgcgaacaaaagggattatatacacactcatggtcgactcacctttctgggcatgcatgtgtgctctcagttttgtatcaagtttaactttccctctttgtaagattttgcacatgttctgaccatcacggctttatattttcttgttgaatgggaacatcaggaattgatttgttctattgcatttatttatttatttatttatttatataaacgttttgcagaaaatgttgcaaagatgtatatgatgatcaaaattgcaaatggtttagggtttcatatattttgggc

SEQ ID NO: 25320 - DNA, 1290 bp, Oryza sativa
  misc_feature (513)..(513): "n"=any one base of a, t, c, or g
  ref <308>: DATABASE ACCESSION NUMBER: AK100762
  ref <309>: DATABASE ENTRY DATE: 2002-08-28
gatctcccaattccccaaccctaacgccgctctcgcctccaccccccaaatcccgaatccgccgcctcttcgttcgtcgtcgagctcgctcgctcgcccaaccctagcgcgccagatctacccgcccccgagcagccgccatggcggagaccctcgacatgacgctcgacgacatcatcaagaacaacaagaaggccaacccctcgtccggccgcggccgccgcggatctgccgctggcggcggcggcggcgggggtgggggtgttggtggtggcggcggcggcggcgtggggccgacgaggcggcccttcaagaggtcggggaacagggcggggccctaccagccgcccaaggcccctgaatcggcgtggcagcacgacatgtactcggatgtcgcggcaggcggcggcggcggcagcggcggaggcgggagggtctcggctatcgagactggcaccaagctctacatctccaatttggacttcggcgtctcgaccgaggatatcaaggagncttttctctgaattaggtgatcttaagaaatacgtatttcactatgacagaagtgggaggtctaagggacagctgaagttgtatttgcaaggcgtggcgatgctgtcgcagcagtgaagaaatataacaatgtgcaacttgatggtaagccaatgaaaatagagattcttgggaccaatactcctacagctgcagctgctcttccagcaaataacggaggctacgttagaaatgttgctaagagtgcaccaaggggtggcccagctggactaccgcagggtagacctcgtccaagggggggtgggaggcgccgtggtggcggaggaggcagtggtggtcctggtggatccggtggtcgccgtggcaaagagcgtagccagccaaagtctgccgaagaacttgatgctgacttggagaaataccatgcagatgcgatgcagaccaactagatcttcacggtgttgatatttcaacatgaaatctgaaggatgtttatctgcttgttcctgctatttgtgctaccatgttcagtggcaacaacaaaacctttgtttgtcgggtcttggtttactgaattgtacggttttatgtgtctacatagaactagagttaagtggatgctggtgaacactgttatgaatattacttggttgccacttatgttcctttttctgcggagtgaaggcctgctcgagttgctccacatacagaagttactgaagatgtatgaggtgctcgtatcttctgactcctttaacatacatcatcttcaacggc

SEQ ID NO: 25321 - DNA, 1567 bp, Oryza sativa
  ref <308>: DATABASE ACCESSION NUMBER: AK100763
  ref <309>: DATABASE ENTRY DATE: 2002-08-28
gagttcaccaacaggaagctaaacaatatacgatgtggaagctaaagtttggtgagggggcaagcaacccactgctccgctccagcaacggcttcctcggccgggagacgtgggagttcgaccccaacggcggctcgccggaggagcacgccgtggtcgagaggctccgccgcgacttcacccgcaaccgcttcacacagagggagtgcagcgacctcctgatgaggatgcagtttgcaaaagagaaccaagtttacagtaaacatgaagtaagcaatcttaaagacagttcagaagtcacagaagaagttctattaacgtctttaagacgtgttcttgatcaatattcctctttgcaagcaccagatgggtattggcctggtggttacagcgggattttgttcattctgccgctcatgatatttgccttacatgtgactaagtcactaaacgatgtcttatcatctgagcatatacgtgagatatgccgctacatctacaacattcagaatgaagatgggggttggagtacacatactttaggcccaagctccatgtttggctcatgtgttaactatgctaccttaaggctcttaggggaggtactggatgaacacaatgatggattatcaaaagggcgtgcctggattctgtctcatggcagtgcaactgtagcaccacaatgggcaaagatatatctctcggtattggtgtttacgattggtcagggaacaatccaattattccagaactatggttgcttccacattttcttcccattcatccaggaagattttggtgcttttgccggatggtttatatgccaatgtcttatatatatgcaaaaagatttattgggccaataactccaactatactggcactaagagaagagctctatgatgtaccatacaacaagatcaattggaacaatgctcgcatttcttgttgcaaggacgacattatttatcctccttcgtggttccaaaacattgctatggcttctttacataaatttatggaaccactatttaatatgtggccaatgaacaagctaagaaaaagagctttgaccaacctcatggatcatattcactatgaagatgaaaacagcaattatgtgggtttatgcccaattaacaaggtattaaatatgatttgctgctggatagaaaatccgaactccaatgcattcagacgacacgttccaaggattcatgatttcctatggcttgcagaagatggaatgaagtcaaaggttaaacttatacttgttttatactctgaaaattgaccatatacaacttagggaacgtattgttataagcatgttctgctcatatgtgccggcttacaacaaaccgttacatgtggtatcatgtggtatttttattcagtacaacagaaaccctaattggtgccggttaggaaaccccccttaggtgccggttttcccaaccggcaccataaaggccagcattaatgtgaagagaaataggtgccggttttcccaaccggcaccataaaggccagcattaatgtgaagagaaataggtgccacgaatcc

SEQ ID NO: 25322 - DNA, 2558 bp, Oryza sativa
  ref <308>: DATABASE ACCESSION NUMBER: AK100764
  ref <309>: DATABASE ENTRY DATE: 2002-08-28
ggcttttcctcgtatccatctgggagtctgggaccctacccaccacgcacggccgcggcgcgccagtggccgtccagggtactgggtttcagcggctacagcctatggggaggttctgggtgccggccgcggccgccggaccggtggtctcccgcggcacccgacgcgcttccacaaggcagtacattatggaaacgagttgaccacagaagatgaatctggaggagttgggattgcatccgctccatcaagcatttgagttaccttcaggatgctgggtcgcatagttggctcctcctggagacaccacaatgccactgctacaaacctttcaaccttcttgatgtttaacttcgcctcatcatcaccatctaccagcagcctccatttccacattttgccggcaacagatgagttccagaagaatgaccccaaagctgtacacatccaccttggcagtgatcccgacgttcttgaaccactcaggggcaacatatccgcgggtaccacggatacccgtatatgtctgtgtttggttggttcggagtagtttcgctaagccaaagtctgaaatctttgctatgaaattatcatcaagaaggatattttggggctttatgtcacagtggatgatctgtgtgctgcattcctcatgtaagtatagcagcccccttgcgacaccgagagcaagttgaactcgaagactccacagaggcctgacaccactaaacaggaatctgttgagcgatccattaaccatgaattcatacaccaacagtctctcagttccttcattgcagaatcctagcatccggaccaggttcttatggtacgtccgtccaatggtttggacctccacagcaaactccttttcagtctcatgctgaatcttatcaattttcttgacagcaatgtaagttcctaactcatcttgcagctggcctttgtacacaataccagatgcacctgtgcccaacacctccttgaatccgtccgttgccttctcaagctctgcataactgaaagctttgaggggtaatcctgggtctcgtgatggttgcaatggctggacatcctttctggtgattgtacagtaagtaccgaaaagaagaacagaactcaaggcaaaattcgctatcacagagcctccgagaagcaacgaacttcctaggatccagagcttcttgtcactcttccattttctagactttctgagctctggctgcgaactgttgctctttggcaccttgataagaactgttctctgcactccactccccatgatcccgtttgatagagggagcttcttcttccagcaggtgttttcatggaatacagcaacagcacagaagcaatcaatcaggcagagccgtcgacattcatccatgtctatgggagtgtaccactcatagtcagcctgaggccaatccacattattaaccaagttaaactcatactgtgccatggaagctgcctcatccaaatcacagctttgtagctcgaagtccggtctgcagcctctgtacttcctcacctcatcaaagaacgagtactgctccgggcacacacagcttgtctggttgttgctgccatcaaacatgcagtaactattgaatccacaggtgccactgcctacttttgtctgagcattgcagatgttttcaggttggatgctcactgctgtccatgcctgactcatgctgctgggcttcttcgggtacacatattgcctgaacacaccatctgggtcaagcgtagcacgatggtagtagtcctccatggagcggatcaccccagatgtcatgttgaattgtgttccattcttcatgctcacgtatatcctaccggtagtattgaacaccagattggtgacctgatttgtgacattctcatctatgggtgtggaccaatatgggtcataaaggtttccagatggaactgccatggtataaagtgcagctcgttgagtttccatgttaagaagaaacctgccattggagtaatctgtggtaaggagtcggctgcggagcttcattccaggggacagcgcttgtgtgaccaggatggtgtctgttgggttcttgaaagtttcccagctgatagtagagcctcctgcagcagcaatcacaaaattcccggtgtcgagcatgctggcatagggtgcaccagttgctcctggattccatacctctctattggtgggatctcggagagaaagtacaccagttgaggtaaactggaggatggagccagatggcacttgtatcggctgtggttcttgctcactggtcttggcataccatgttgccgtcttgtcgctgatcttgttgaaccagatggcgaggaggtagaaggaggagttgccatcgatgggccggaatccaaacgcgaagtcgcctgatggcgagagccatgcgttgtttggcccttgggttattaatgatgtgcccaagctgatgttctgagcttgagcagatggggaggacagtagcaccaacaattggagggagagcaagaagagtggaggtgccatattgcttgttctgattattgcttcc

SEQ ID NO: 25323 - DNA, 1962 bp, Oryza sativa
  ref <308>: DATABASE ACCESSION NUMBER: AK100765
  ref <309>: DATABASE ENTRY DATE: 2002-08-28
tgtcctgtacaaaactacacaccatcacgagaacctcctcgtggcggcgagctctcgcgactcgactctcgcgtcgcgcgcgcgcacggcgccatcaatcgattctcacatccatccatctgcctatctatctctcgcaattctggcggcgcgctgcgcgcatagggggggatcgaatttgatctagtggtgatggaggcggcggcggcgatggaggcggggcggaagctggcggcgcggcacccgcacgggcggagcaggacggcgcacaacatgtcgtcgtcgtcgctgcggaagaagtcggacgccgcgctggtgcggaaggtccccgtggcgccgctccgcccgctgctcgccaacctccaggaggtcttcctcgccaccaagctcgccgtcctcttccccgccgtcccgctcgccatcgccgcccagtgcttccgcttcgaccaggtgtgggtgttcgctcttagtttactgggcctcatccctctcgccgagagagtcagcttcctcacagagcagattgcactctacaccggtcccaccgtgggcgggctgctgaacgcgacgtgcgggaacgcgacggagctgatcatcgcgctgttcgcgctgctcaaggggaagatcgaggtggtcaagtgctccctgctgggctccgtcctctccaacctcctcctcgtcctcggcacctccctcttctgcggcggcgtcgtcaacctcggtgcccgccagccctacgaccgcaaccagtccgacgtcagcaccgccctcctcttcctcgccgtcctctgccactccgccccgctcctcctccgctacgccgtcgccgctggcgagcactccgtctccgccacctcggccgcggcgtccctcgacctctcccgcgcctgcagcttcgtcatgctggcgtcctacgtcgcctacctcttcttccagctcaagacgcaccgccagctgttcgagccgcaggaggtggacggcggcgacgccggggacgacgacgaggagccggcgctcgggttcgccagcgcgctcttctggctcgccctcatgaccgccgtcatctccgtcctctccgagtacgtcgtcggcaccatcgagcccacctcgcagtcatggggcctctccgtcagcttcatcagcatcatcctcctccccatcgtcggtaacgccgccgagcacgccggcgccatcatcttcgcgctcaagaacaagctggacatcactcttggggtagctctgggatcggccacccagatatccatgttcgtggtgccactgagtgtgctcgtggcctggatcatggggtccaaatggatcttgacttcaagctgctagagaccggctctctgttcatggcggtgctggtgacggccttcaccctgcaggatggaacatcacattacctgaaggggattctcctcctcctgtgctacattgtcatcggcgcatgtttttttcgttgcaagacaacctgcaggccatgcaaacagcaatggagccttgctggatgtaccaaccggttccatgagtgttcaggccgcatgatggatcaagatgtctcctgaacaaaacatggaggacagcaagcaatgtaccttggctgtcaagtcacttgggagggtagctcttcatgtgccagcaagacagatcatcatgatcatcagagtttcctgaagggatgcattggaagttgcacggaatgcatgtcaaggtgttactaatccttataggataaggatgcaataaggatatccatatatatttgtgcccaatcctatacccagtgtacatgagcacatttgttccatctatgcagctctcaataagatagtatttgcggtacaaatctatgctctcctaagtcctaacagggtgatgatgtaagagcagatcatgtttatgtctgcaactctacttctctatttcatcttaaaactagaatgtttttcaccatgatcc

SEQ ID NO: 25324 - DNA, 1593 bp, Oryza sativa
  ref <308>: DATABASE ACCESSION NUMBER: AK100766
  ref <309>: DATABASE ENTRY DATE: 2002-08-28
tatcgtctctgcactcacactgcacaaagatgtttcccagtagtgtaaatatgcgggagcaaaataatatcataataatatcaatagccatgaccatcctcctactcgttgtgttcttctgtcggatgttgggtaacatggcgggcaagaacaagaggaagaagcaacctaagctaccacccgggccagctactatgccggtgttgggtaacattcaccagattctgatgaacaagccggtgttcaggtggatccaccgccttctcgacgagatggacaccgagatcctgtgcctccgtctcggcagcgtccatgtgatcgccatcgcctcaccggagatggcccgggaggccctgcgcaggaacgatgccgtgctgacttcccggccggtatcgttcgcgtggcgggcgttcagctttgggtacaagaacaccgttgggtcgacgggcgatcagtggaagaaaatgaggcggatgctcgcgtcggagatcctctcatcggccatggagcggcgaatgcttggccagcgcgtcgaggaggctgaccaccttgtcaattacatctacaggaactgtaataatggcactgtagacatccggcacgtaacgagacacttctgtggcaacatcatcaggaagctggtgtttggccggagacacttcgccttcggcgctggcaatatcggccctggccgtgatgaggaggcccacattgacgcgctcttcacggcgctagactacctcggcgcattctccatctccgactacttcccgtcgttggttctcaatggcctgatgagtacattcagacggctgcatgatccaatcataatggagaggatggaagaatggagggctcccaggagaaatggtgatgagaggagagaagttgccgattttctggatgtgttgatctccttggacgatgcacagggaaaaccgttgttgtcacttgatgaggtcaaggcagaaacgctggaaataatccttaattcggtagacaacccatcaaatgctgtagagtgggcactggcagagatggtgaacaatccaaaggtcatgaagaaagcagtagatgaactcgatatggttgtcggtaaagaaaggcttgtcgaggaatccgacattcacagcctcacatacctcaaggcgtgtatccgggaggcgttccgcatccacccctaccacccattcaacccttcccatgtcgcgatcgctaacatcaccatcgctggattcatgatcccaaagggtagccatatcattttaagccgaattgggcttggtcgaaaccctagagcacgggataacccactcgaattccgaccagagcgacatttgaagaatactgataatgtggtgctagctgagccagagttacggtttttatcattcagtgctggtaggcgtggctgccccgccgtatcactcggaacttcaattacaatgatgctttgggccgaaaaactcaatactgatgtaataaaaaaacatatttgtaattaaaaaatatttacaaataggtccttggcgccaataacgctggcactgaggaactatttgtaaatattttacaaataaaaccatttttatt

SEQ ID NO: 25325 - DNA, 1175 bp, Oryza sativa
  ref <308>: DATABASE ACCESSION NUMBER: AK100767
  ref <309>: DATABASE ENTRY DATE: 2002-08-28
tgcacacactatcacttgctaggacagggtcgtacatgcacactaccctcgcctcctacgcccaggatctcgccatgcctgccgccgcactcgacctcctccctgacaaggcgcaccagccgtccatggcgccgtcgctccacgcctgggactcccccaatggcgcccccactcccatgcccaagaggctggaagggaaggtggccattgtcaccggcggggcgagggggatcggggaggcgatcgtgaggctgttcgtgaagcacggggccaaggtggtgatcgcggacatcgacgacgcggcgggcgaggcgctggcggcggcgctggggccgcacgtcgggttcgtgcggtgcgacgtgtcggtggaggaggacgtggagcgcgccgtcgagcgcgccgtggcgcggtacgggcggttggacgtgctgtgcaacaacgccggggtgctgggccgccagacgcgcgccgccaagagcatcctgtcgttcgacgccggggagttcgaccgcgtgctccgcgtcaacgcgctgggcgccgcgctcggcatgaagcacgcggcgctcgccatgacccagcgccgcgccggcagcatcatctccgtcgccagcgtcgccggcgtgctcggcggcctcggcccgcacgcctacaccgcctccaagcacgccatcgtggggctcaccaagaacgccgcctgcgagctcggcgcccacggcatccgcgtcaactgcatctcccccttcggcgtcgccaccccgatgctcatcaacgcctggcgccagggccacgacgcctccaccgccgacgacgccgacgccgacatcgacctcgacatcgccgtgcccagcgaccaggaggtggagaagatggaggaggtggtcaggggcctcgccacgctcaagggcgcgacgctgagacccagggacatcgccgaggcggcgctcttcctcgccagcgacgactccagatacatttccggccacaacctcgtcgtcgacggcggcgtcaccacctccagaaacctaattggcctttgactcttcttctccctctagatgaatgcgatagtttagaacacaactaaaaaggatttgttaatgtgacgcaacgcaagtgtactcagcttcatcccattttgttaatctcttgattcaatgtgttaattggacttgtgc

SEQ ID NO: 25326 - DNA, 1373 bp, Oryza sativa
  ref <308>: DATABASE ACCESSION NUMBER: AK100768
  ref <309>: DATABASE ENTRY DATE: 2002-08-28
gtccccttccttccttccgcctcgcctccccttcccctcctcgccgcctcgctcccctccgccgcgccgtcccgtcgaatcccgccatgccgaagggtgccaagaagcgcgccaagctcaagaagaagcagcagggggaccaccccgccggctccgatgacggcggcaacaacaacaacaacaaaaacaacgccgccgaaaacggcagcaatgactccagccgccgccgcgacgccgccagcgacggcaaccaccacctaccgtcgcgaccaaacgttcctcatgtggatgtgagtgaggactccatggagagctccgaggagatggtgacgccgagggccgccgcgtccgaggcggacgaggaggagaggaaggccgccacgtcggaggtgcccgtggaggtggtcgaggccggggaggaggtcatggtggacgccttgccgcccgaagccgccgcaggtgcgcaggagcaacagggtaaggcggaggcgcttgtggtggtgcaggaaccggaggtgaagcgcgaggagttggtggccaaggtgcatccgatgcatgacccggaaccgcagggcgaggaggtgctcatcgtggaggcggctgcggtatccgcggtgcaagaaccggaggtgaagcgcgatgaggtggtggtcatggagacggctgcgccgcctgcggtgcaggaatcggagacgaagagcggtggggtgttggtcaaggatgtggtggaggtgtcacggtctctgggtgcagctgatactacagaggtggcccggggacctgcagtggctgtggctgcagcagggcagcgggcaacatggtggaattgctgtggggtatttgatgcgttctctggttcggagagatagattaaggttggaacttggaagccaagaagacagtagacgcgaagttgttcaaagctgatggtaattgtaactagtctggtttatgctcatatgaatggagttgaagaatggataacatcgagctgatgtttctctctggcccatgtttctacaccgtgctgtgcaaagttacatccccttggttgtggttaatattctcgagtcgcgtagtactctgaaatctacacccttgtctattatcatctaggttatgttcatgtagcataagagttgagttgagtcgtcagcaaagaaattttgttctttctgtttcatacttatttttttttggggggggggggggtgtcatccggtttgcccccttctatggttcggtcaccttgaaaggagtaacgttgaaactatttaggtgttccattgtgtagtcttgctccgtgatagctcgcaggcacatcagactactcactatgaaaaagaaaataatgagacgtgtgggttacattc

SEQ ID NO: 25327 - DNA, 2165 bp, Oryza sativa
  ref <308>: DATABASE ACCESSION NUMBER: AK100769
  ref <309>: DATABASE ENTRY DATE: 2002-08-28
gacctaattttcttcgtcctctccctctcttcttctcttctcttctctgctcggctcctgtacgcggctggatccgagcggcgcaggaaggaggcggggcggatgctgtagagagaatggcggaggcgatcgcgtccgcgggtgggatcgccatggccgcctcgacctccctcacgccgggccaggtctctgctcttctgggatttctttgggttttcaccgcctgggcatatgcggaggttctctattataggaagaatgctgcttctattaaagcacactcggatgtaaatttagcagtaatggattctagctcaaacaaaggagaggatcaagtgatgttattggaggagggtgtccaagcaccagtgcaaaagccagtttatgcttctctcacatcacaaatgttcagacttttcttgttggaccaggcacttattctagagaatcgattgacgttgagagcaatatctgagtttggaggtcatctgctttacttttacatatgtgatcgcacaaatctactgggagagtctgcgaagaattacagccgagatatgttccttttcctttactttcttcttattatcgtagcagctatgacttctttcaaggtccaccaagacaagtcgtcattcacggggaaatctatactgtatctgaataggcaccaaactgaggaatggaagggttggatgcaggtgctgtttttgatgtaccactacttcaatgctaaagagatatacaatgcaattcgtgtgttcattgctgcatatgtctggatgactggatttggtaacttctcctattattatgtgcggaaggatttcagccttgcacgatttgctcagatgatgtggcgcctcaattttttcgtggcattctgttgtattgtgctaaataatgactacaccctctattatatttgccctatgcacacactttttacccttatggtttatggtgctcttggaatactaaataagtataacgagattggatcagtgatggctataaagtttgttgcctgctttttggtggttatcctgatatgggaaatcccaggagtcttcgagattgtctggagcccattcacgtttcttctcggctatactgatccatctaaacctgatctccctcgattgcatgagtggcatttccgatctggactggatcgctacatatggattgtggggatgatttatgcttattaccatccaactgttgagaagtggatggagaagcttgaagaagctgaaacgaaaactaaactctatattaaggccttgatagtttcaattgctttaacggctggttgtttgtggtacgagtacatttataagctagacaagattacctacaacaaataccatccctatacatcctggatccccataactgtgtacatctgcttacgcaacttcactcaagaattccggtgctgctctctcacactatttgcctggctcggaaagattaccttagaaacgtacatatcacagttccatatttggctcagatcaaaagtgcccaatgggcaacctaaatggctattgacaataatcccaaattacccaatgctgaatttcatgctcacaactgctatatatgttgcagtctcccataggctatttgagttgactaacaccttgaagatcgcatttgtgcctagtcgtgacaacaagcgcctctcgtacaattttgtggcgggaattgcaatttcagtggcgctatattctttatcatttcttatagttggcgttgcaggatactagcaagtcctatagttggccttatgtggcacctgcaaagctgatttgattaccttcacggcttggagacttccattgtttcaccctgagcttcgttttttatgagtgttacatggtgaaaaggagtcgggatgcagaacaaaaaatgatcagggagagtgtaacatgtagcattaaaccccaaatgggaatataatgaagtagatatatgcctgtatagccgttgaaaattgaaatgcatatgtaagcgagctcgttggctatagaaacttctctctcttggcctcttggcccgttgagattgagatttgaaataggatagtggaaacatgtaagaatattattcttttgacccttctcgaaataacgttgttagcttggtgcaagctgggt

SEQ ID NO: 25328 - DNA, 1991 bp, Oryza sativa
  ref <308>: DATABASE ACCESSION NUMBER: AK100770
  ref <309>: DATABASE ENTRY DATE: 2002-08-28
ggccttacacatcgcaccactctctcttactcgtccatacgccgagtccacgagatctcgccgtagtccatacaccggttgatcggaggtcgtgttgccgccgacggtggccatgatgatgatgggggaaggagtcagcagcgtcccgccgtggtctcacctccccgtgagcggagtcgatgtactcggcggcggtggtggcggtggggatgagatgacgccgtacgtgatcgccgcgctgcgggattacctgccggcgaatgatgtcggggtgggggctgacgaggaggaggaggccgcggcgatggccgcggcggtggacgcgtacgcgtgcgacgagttccggatgtacgagttcaaggtgcggcggtgcgcgcgcgggcggagccatgactggaccgagtgccccttcgcgcacccgggggagaaggcgcgccgccgcgatccgcgcaagtaccactactccggcaccgcgtgcccggacttccgcaagggcgggtgcaagcgcggcgacgcctgcgagtacgcccacggcgtgtttgagtgttggctccacccggcgcgctaccgcacccagccgtgcaaggacggcaccgcctgccgccgccgcgtctgcttcttcgcccacaccccggaccagctccgcgtcctcccggcgcagcagtccagccccaggagcgtggcgtcctcgccgctggccgagtcctacgacggctcgccgctgcgccgccaggcgttcgagagctacctcaccaagaccatcatgtcctcgtccccgaccagcaccctcatgtctccgcccaagtcgcccccgtcggagtccccgccattgtcgcccgacggtgccgcggccatccgtcgcggatcttggcccggcgtcggctcgccggtgaacgacgtcctggcctcgttccgccagctccgcctcaacaaggtgaagtcgtcgccgtccggcgggtggagctacccttcgtcgtccgccgtctacgggtctcccaaggccgccaccggcctctacagcctccccaccactccactggcttccacggcaacggtgaccaccgcctccagcttcatgcccaacctggagccactggacctcgggctcatcggcgacgaggagccggtccagagggtggagtccggaagagccctccgggagaaggtgttcgagcgactgagccgggatggtgccatctccggcgacgccacagccttcgccaccgccggtgttggcctcgacgttgattgggtgtccgacctcatcaactgaggcttccaagtcgctattggaagccccttttgtgagcatcaaggatgatggcatggaggaggagaaggtggcggtaagaagaaaatgatggcacgacaaaaaaatccttcattttcttttgtgatttcaagtcaagtttctactaattcctgtacatatctatctcccatgtgaatattcatggttggtggagaggaggcaagtatggaaagatgggtggatttgttttggggttttgaggtagtagcaaaattacccacaaaaaaattaggtgaaaaaaaaaagaggagtagaaatggaggtgattcagtgtctcctgtgtgcatagggtgtgtggaggtgaaggaagcacggaaggaagaagatcatggcggaagaagatggccggatttcggccgccgtcgcggcggcggccctgcctatttcagtgatttctgggggtttatcctctgttcatcgtttgttgcatcatcgactagctgatgaagatcgtcgatcgatttcaatcaagccccccctcttgttgatttcctattttgttgatgtaatctttgttttgttaagaacccccaacagcatattttgtaccttagcttaaatctgaaaatcttttgctgactcatctacctatatgtggtgatgaagcccccctcaatgtattgtaatcacctgcttcaagtaaatgatccaataatattatgttgctatatgtttcatt

SEQ ID NO: 25329 - DNA, 1810 bp, Oryza sativa
  ref <308>: DATABASE ACCESSION NUMBER: AK100771
  ref <309>: DATABASE ENTRY DATE: 2002-08-28
gaaagagagcatttttctgccacacttgcaaccaccagtgccatgcgtttggtggatctgaaaaaaaaaatcctgattcctccccaaatctcacgaattctcatcttcgcccacctctcctcttgatctcttctaccaagaattctctgcaggggaagaagaagcagcggcaaattgtcatggcgaccaaggttgtcgacaagctgacggtggcggcctcccctccggcggacggcggcgtgctcccgctgaccttcttcgacgtgccgtggatcttcaccggcccggtggagcgcgtcttcctctacacctacccgcacgccgtcgaacacctcgccgcccacctcctcccctccctcgcctcctcgctctccgccgcgctgcaccgcttctacccgcttcttggccgcgtccggccgtgttctagcggcggcggaggcggagggtacgagttctgctccacgggtggggatgccgaccgcgtcgagctcaccgtcgccgagagcggcgacgacttcgaggagctcgccggcggcggcccgatggatgttgggaggctgtactctctggtgccgcggctcccgcgcccggaggaggggagctccgagctcgcggcggtgcaggtgacggttttccccgggaaggggctcgccgtcggcgtgtccatccaccatgtggcctgcgacgattccagcttcatgcacttcgtcaagacctgggcggccaattgccgggtggcttccggtggggacgtcgatgctgtgccgccgccgccgccgccgttcttggaccgtggcgtggtcgccgatcccgacggccttgcagccaagacgctcgatcaaatgcggcagctggcgaacagcgggccacccccgccaccgccgtccgggccgccgccgaagctgttcatggcgtcgttcacgctcacccgcgacagcatcgacaagctcaagcagcgcgtcacggcgagcggcggcggcggcgtccactgctcggccttcaccgtggcgtgcgcgtacgcgtggacctgcctagcgcgtgtcgacgccacctccgccgccagggagcgcgcgcacctgctgttctcggtggaatgccgccgccgcctgaccccgccggtgccgcaggagtacctcggcaactgcctccgcccttgcttcgtggaggtcgacacggccggcctgctcggcagcggcgccgacggcgtggtgacggcggcggtggccatcggcgcggccatcagggggctcgacgacggcgtgctggacggcgccgacgagtggttccagaagatcgtgtcgctgatgccgcaccggccgatgtccatcggcggctcgccgcggtacggcgtgtacgacaccgacttcgggctgggccggccggcgaaggtggagctcctgtccatcgacaagacgcccggcacggtgtccatggcggaggcgcgcgacggccacggcggcatcgagattggcgtggcgctgccggaggccgacatggcgcggttcagctcatgcttcgccgacggactgaagcagctgtgagtgacgaacagcttgttgcatttcttgctttcttgctgctacgaattgttgcagagttcagaatttgttcagtttggatgtgattctgtaatgctagctgttggattgcaatcgttgatcgatcacataagcgattgtgaatttgcaattgtcaatctatgaaataatcagataagctgtaatctattctacatttttttcagagatggagcaggataaggcctgcttcgatcaacttctgttataaaaaagacactgaatattcggct

SEQ ID NO: 25330 - DNA, 783 bp, Oryza sativa
  ref <308>: DATABASE ACCESSION NUMBER: AK100772
  ref <309>: DATABASE ENTRY DATE: 2002-08-28
ttgggtgaaagacttgcctattgattgacccgtctccatcaatatagtgagtccatagcatttcccctcttcccaatagcataagcacgaaccttcttgtagtgtctatccagcaaaagaagagaaaacatatgctataatggggtgcttcaggtgatgggaacatcgatgaataggaggagcttgcttcaggccaagggtggctgccctgtgagctttgagaaccagaactacacgaccatcaccagcaagtgcaaatcgccatggcctgccgacctctgctgcccagctctgaacgagttcgcatgcaatttcagccaatatatcaacgacgaaagcaccaactgcgcagaatcgatgtgggtctacctcaacgcccatggaagctatccagctggcctgttttcaaacgagtgcgcagtgcttgactgcaacggtaacaatagcaccattagtactaaccaaactgctaatggaagcggcacccgaggggctaaaggaatatcagagatgtactcacttgtgacgaccttaattgtatctggactcccggtgttattgttctactgaatgaagtactctctccgtttcacaatgtaagtcattctagcatttcccacattcatattgatgctaatgaatctagatagatatagaatgacttacattgtaaaacggaggaagtaagaaaagatacactatcacacagaatggacatgttacagttgtggtaataagttgcgtttcagcatatatatacattacgagataagagtaccccct

SEQ ID NO: 25331 - DNA, 1870 bp, Oryza sativa
  ref <308>: DATABASE ACCESSION NUMBER: AK100773
  ref <309>: DATABASE ENTRY DATE: 2002-08-28
gggagaaaacctcgagccaaggccccgactccgactccggtgatgtcggcggcggtggggggagccgagttccacgggttccgtgggggtggcggcggcgcggcgcagctgcagaggtcgcggatgctcggaaggccgctccgtgtggcgacccctcacgcggcggcccccgctggcggcggcgggtcgtcgtcggccagcatacgcgccgtctccgcgccactcaagaaggatgcatctgaagttaagaggagcaaggttgagatcatcaaggagaagagcaattttcttcggtaccctttgaatgaggaactggtctcagaggctcccaatattaatgacagcgctgtccagcttattaaatttcatggaagctatcaacagacggaccgtgatgttcgtgggcagaagaattactcgtttatgctccgaacaaagaatccttgtggaaaagttccaaaccagctttacttggctatggatacgctagctgatgaatttggtattggaacactccgattgacgaccagacaaacatttcagctgcatggcgttcttaagaagaacctgaagactgtcatcagcactgttataaagaatatgggttcatcattaggtgcctgtggagatctcaacagaaatgtacttgcacctgcagcaccttatgtcaggaaggatattctttttgctcaagaaacagcagagaatatcgcagctcttcttacaccacaatctggggcttattatgacctgtgggtggatggagaaaagataatgtcagccgaagaacctcctgaggtcacgaaagctcgcaatgacaacacatatggaacaaatttccccgattcccctgaaccaatatatggcacacagtatctgccaagaaagttcaagattgctgtcactgtcgctggagataactctgttgatattctgaccaatgacatcggtgttgttgttgtttcagatagtgcaggagagcctgttggcttcaacatttatgttggtggtggcatgggtaggacacaccgagtggagaccacattccctcgattggctgatccactgggttatgttcctaaggaagatatattgtatgctataaaagcaatagtcgtcacacagagggaaaatgggagaagggatgaccgccgatatagcaggatgaagtatctgattgataactggggaattgagaagtttcgggctgaagtcgaaaaatactatggaaagaagtttgaagattctcgtcctttgcccgaatggcagttcaacagctacctaggatggcaggaacagggtgatggaaaattattctacggagtgcatgttgataatggtcgtgtcgcagggcaagcaaagaaaactctacgagagattattgagaagtacaatttggaagttagcattactccaaaccagaatcttatcttatgtgggattgatcaagcatggaaagatcccatcacagcagctcttgctcaatctggcctgctggaaccaaaggatgttgatcccctgaatattacttccatggcatgtcctgccttaccactgtgccctctagcacaaacagaagctgaacgagggattctgccgattcttaaacgaattagagcagtttttgataaggttggcatcaaggaccatgagtcggtagtggtgaggataacaggctgccctaatggatgcgctagaccatatatggcagaggttggctttgttggtgatggcccaaacagttaccagatatggcttggaggaacaccaaaccagagtaccctagctgaaaaaaaaatgtgcttatgagaaaacaaaaggaaccctggctgtttactttggaataaattgcttggaaagtgtactgaat

SEQ ID NO: 25332 - DNA, 1777 bp, Oryza sativa
  ref <308>: DATABASE ACCESSION NUMBER: AK100774
  ref <309>: DATABASE ENTRY DATE: 2002-08-28
ggcaaaccccaatccgccgccgcggcgatcgccatggccgcctccgccgctgcttcccgcgcgcaacgcctatctcgcatcttctcctcttcttctccatccgtgcgaccacccaagcccgggcaggtcaaggaagcaccaaagcccgcgccgaccaagaaagctcctgctcccggcgccgaggcgaaccccaacttgcgccggaatgccatcgacgacatcatcaagggcctcttgcgggagcgcgacccggacaagctggtgtccgggttcatcgccgcctcgtccacgcacccgcgcttccgtgcccggcaccgcgtgtacgacgtggccgtgtcccgcctcgcgaccttcggccgcctggacggcgtcgaggccatcatcgacgcgcagaagcccttcctggagacctccaaggagggattcgccgcgcgcctcatccgcctgtacggccacgcatccatggcttcccacgccgctgcgacgttccatgacctccccccgcagcttaagtctaccatgaccttcaactctctcctcgcagcctacgtcgaggctggagagttcgaagcgcttgccgccgcgttcaaggagatcccagtctccaacccctcggttgtacctagcgtgtactcctataacatactccttcaagcgctatgcaaggtgcccgacctctcggcggcacttgatactatgacactcatggagaagtctggaatttcacccgatctggtcactttcaacacgctattgaatggattctacaaccatggagacatggatggcgctgagaaagtctgggagatgattacggagaggaatatggtgccggatgcaaagaactataatgcaaagttgaggggccttgttgcgcaagggaggattgaggatgcagttgcagtggttgaaaaaatggagaaggatggaccaaagcctgatacaatatcctacaatgagttgattcgagggtattgcaaagatgggaggttagaggaagccaagaagctgtttgaagatatggcagaaaatggttatgttgcgaatagggggacatatcataccctcataccatgtcttgtcaaggctggtgagctcgattatgctctgaagtgctgtcatgagatatatggtaagaaccttagagtggactgttttgtgctgcaagaggtagtgactgcattggtcacggcatcgagggtggaggatgccaccaagattgttgagcttggatggaacaactcctacccacggaggatcttgaatattccacatgctacagagaaaaacaaggaagaatcaatttcagaagaggaagaggagcctgaaaatgcttgacaaggatgtacctccatgtgttcttctctgatcagtcttaccgatggttatcattttgctatagtatactagtctgctgttgcggacattggaagtatctcatattgtcacaaatgagatgtccggtgtgtatttgtctctatcgctatattctggaaaactagaaacatctgagctatgttgttattcaagccttccacaggtgagctcacctatgtaataagcttgtttgtccaatacttccttcattccaaaatataaggcataaccacttttttttcattgtttcataatatataaggcgtgcaattaactagcatatgtccctcccctttaatttttttttttaatcctctaccgtcaagatctctaatctcattggatgcatgcatagtatttattggagtggttcaaataagaagatgataatatttttttc

SEQ ID NO: 25333 - DNA, 2045 bp, Oryza sativa
  ref <308>: DATABASE ACCESSION NUMBER: AK100775
  ref <309>: DATABASE ENTRY DATE: 2002-08-28
ggtacgggtggaaacctagccaagatccccatcgtcgccgccgccgccgtcgccgtcgccatcgccgccggcggccgccattggcagcagggaagaggatgatccggcgattcttgtacattgctgaccactgctttacaggcccctccctctcccacaggctacggcgagtcaacccatcacatctcctctaccccgatggccatccactagcaacgaaaccggagcgagcgacggtggaggtggaggacgctcgcctgcctccacccgccatggccttctgctccccgggcaccacggcgacggccatgggcatggagttcatgcgcaggaacgacggcagcatcgtcggcatcgaccacaccggccgcgccgtcctctacgaccccgccgcgcgcgccgtccgcacgctgcccgccctcgcggcgcccaagctcatgcccgtctcggccgccgtcggcgacgacctgtacgtcatggagacgacgcccctccccgacggcgccggctgcttcgaggcgctcgtacgcctcgaggataatcccgccgagtccgactccgacaagtgggaggtaggggacaactacctctggcaacccctgccgccgccgccgccgccgccgtccccgtgcgtgaacgcctacgccgccggcttcgaaggctcctcccgcggcatgatctgcgggtacgcggtggccggcgacggcgacggcggcacgcgcatcctggtatccaccacgaccaacggcacctactccttcgacaccgcgagctccgcgtggagcaaggccggcgactgggagctgcccttccgcggccgcgccgagcacgtccccgagcacggcctctggttcggcatctccgacatggatggcaccattctcggagcgtggaatctgtcctccgcgttccagcagccgcagccgccggtggcgagcctccaggtgaaggggttctcggtggagagccacagcgacgaccggaggaggagggagttggaggtgtacgcatcgcaggtcgtccacctgggcggcggcaagctgtgcgtcgccaagatgttcagtgttgatcgcagagaaaggggtgaaataaatttcgccatgctcaccggcgtggaggtggtacgcggccgtggcgggaagctccgcgtcgtcaagcacaagtcgcgccgttataacttcggccaagactacacccctgtttatctactctaacgagtagagtactcctacttagtactgtcctaataaaaacccttatttgattaatcctgctcttatgcaggatacatattcatcggttagttttaaaactctgcattgcatagctctgtaaactctgttagtagagatgaatgatttcaaggaagcaattctattgttaaggacctgaaaaaaaaacatttataacctgaaatacttatcatctgatcagatagcagtctaagtgccaaaaactaatactagtgacaacaaatggcagctgccataacagataagcctgaaagcaatatgtcagcttccttgatgcatatgtggccatgcgggttagctcgtctctctataattttcattcctttaacaggctgcataaatgcatgtagtattgacgatgagaaaaacacaatgcttaaatcatcattgggcaaaaaaactgttaacatacactccacccccttaacaaaaatcatattggtactaaaatgaaaatagtctctagtgaattatttttttttctctctattgattatggcactccaaaacatttagtcactgttgtcgatgtacttataacttgaagaaagtcatactgaaatttgtctggcataaatccttgatcaatgtagtcttttctttaaggacagttagtcagtgaacttcaagaaaggttatatactagataactttgggaaacactatggatcttagcaaggctctttgaaggtggggtttgttttcttttgctccattgtaacttacaagtttagctgtgcatcctactctaatatacttttcaatgagtatatcacatgcattatttcaatg

SEQ ID NO: 25334 - DNA, 1349 bp, Oryza sativa
  ref <308>: DATABASE ACCESSION NUMBER: AK100776
  ref <309>: DATABASE ENTRY DATE: 2002-08-28
ggtcgcctccaactctcccagctcgcgaggttttctagggtttaccgctcgctccccacctcttcccccacacccgccgtcttccccttccccacgcggcggcggcgtcgaccgatcggaaccgggcggggagaagaagatggtggcggccatcagggtgcccaggagccagcgcgccaagagggagctcctcaagcacgcgccgaagctcgttgagaccggcaagaagacgcttatcctccatggaaccaagaccagcgccgttctgaactccgtgctcgcggatttgttccacctgaagcgtgacaatgccgtcaagtactccaagaagaatgacaacatcaggccgttcgagagcggcggcgaaacttctctcgagttcttctccctcaagacggattgcagccttatagtgtatggttctcactcaaagaagaggcccaacaatcttgttttggggaggacttatgatcaccacatatatgatcttgttgaagtaggagttgaaaactacaaatcaattgaatcatatgtgtatgacaagaaactggcacctaaacttgggtcaaagcctttctttgccttcattggggagcactttgaaagtgttgaagagctgaagcatctgaaggaagtgctgcttgatcttttcaaaggagaggtggtagagaatctgaaccttgctggtgtagatcgggtatttgtgtgcacagcaatctcccctactactgtctacatgatgcactgtgctctccgtctaaaacggtctggcacatctattcctagaattgagctggttgaagttggaccttctatggatctagtagttaggcgacaccggtatccagttgaaagcttgaagaaagaagcaatgaagactgctgatcatgctaagaagatgaaaaatgtcacgaaggatccagtgcatggcaagctgggcaaggtctacattccagaccagcaaatcgcaaagatgagtttatcaaacgatgtcaaggggttgaagagggagcgtcgtgaagccaagaaaaacaaggaccactcaaagaagcaaaagataaatcccgagtgaagaagctgaagaagttatttttagttgggaactatcaggttgggttaaggatttttggtcataactggttgggctgttgtgtttaccaagtggaagtcaccttgcgttatattgagtggtaaatagttaatgaagaaacatcctgtaaacccttgtaatggcttccacaacaatattgaccatgccagtgagcatggaattttgagtagctatatgttctgagaattttgttctacaattctgatttcttatctgtgatggttggtgaatttccccc

SEQ ID NO: 25335 - DNA, 1557 bp, Oryza sativa
  ref <308>: DATABASE ACCESSION NUMBER: AK100777
  ref <309>: DATABASE ENTRY DATE: 2002-08-28
gacgctcgctccatcgattccttgttctagtgtttctattttttatttttggctcaagtttctagcgtttcttgatctgctgctctgcttggttgcgtttcttgatttggttgggattggttgttcttgggcttatcctgtgtagcccgtttcttggattcaaagctcagctcaggtgggaaggaagacaaagatcccacctggtgaaaacgtacggcgcagccgcagatcgattaattttcgcggaagcgtccccggccatggttgctgccctcaggccgcaggtgctgatctcttcttcaagataggaagcgaaacagagcagagcctgctcgtggaaggagaagctgagtttggctctgcagctgagactatccatctgcgacgaggaggaagaagaaggagctagcgaggatgcggcacatctcgtcgctgctgcaggggctggcgcgctcgctgtcggtggggaaggagaggaagggcggcgacggcgacgacgggaaggcggcggcggcgacggcgacggcggtgctgaggacatcggggacgctgtggggcgagggctctgagacgttcgccgccgtctgctcccgccgcggcgagaagggcatcaaccaggactgctccatcgtctgcgagggattcgggtgcgaggaggggagcgtgttgtgcggcatcttcgacgggcacgggcagtggggccactacgtggcgaaggcggtgagggagtcgctgccgccggcgctgctccggcggtggcgggaggccgtgacgctggcggcgctcatcgacggcggcgagaagcggctctgcgagtgccggcccgacctgtggcgccagtcctacctggccgcctgcgccgccgtcgacgccgagctccgcgccagccgccgcctcgacgccgtccacagcggctgcaccgcgctgtccctcgtcaagcacggcgacctcctcgtcgtcgccaacgtcggcgactcgcgcgccgtcctggccaccgcctcccccgacgacggtggcggcgcccgcctcgccgccgtgcagctcaccgtcgacttcaagcccaacctgccccaggagagggagaggatcatggagtgcaacgggagggtgcagtgcctcgccgacgagcccggggtgcaccgggtgtggcggccggacagggagggcccaggcctcgccatgtcgcgcgccttcggcgactactgcgtcaaggattacggcgtcatctcggcgccggaggtgagcaccgccggatcaccgcccaggaccacttcgtcatcctcgccaccgacggggtgtgggacgtggtgtcgaacgaggaggcggtgcagatcgtggcgtcggcgccggagagggagaaggcggcgaagcggctcgtcgagttcgccgtccgggcatggaggcgcaagcgccggggcatcgccgtcgacgactgctcggcgatctgcctcttcttccactcgccgccgtcctaaacaacacacacgctgacacgcacgcagccaacaaaaaccgcacacgccgacgacaatgtcgccgtcgtcgttgagaggcgcc

SEQ ID NO: 25336 - DNA, 4121 bp, Oryza sativa
  ref <308>: DATABASE ACCESSION NUMBER: AK100778
  ref <309>: DATABASE ENTRY DATE: 2002-08-28
gagagcagagcagagcaaggagagagatggaagcggcggcggtgagcttggcgaggacggtgctcgacggcgtgctcggcggcgcgggctcggccgtcgccgacgaggcggcgctcctgctgggcgtgccgcgggaggtggacttcatccggagcgagctcgagatgatgcagtccttcctcagggcgacctccggctgcgccggcgacacggcgaggacgtgggtgaagcaggtgcgcgacctcgcctacgacgtcgaggactgcctcctcgacttcgcgctgcacgcgcacgcgcacgcctcgtcgtcctcctgcgcgccgccgctctggctccggccgtggcgcctcgccgagcgccaccgcgtcgcggcgcggatccgggagctcaaggccagcgtggaggagctcaaccagcgaaaccaccggtaccacgtcgtgcccgttctcgccgccggggatcagcagcagcagcagcacgagccaccagctgctcctcctcccgcgcgcggcgaacaacaccacctgcgcttccgcgactggcaggtcatcggccgcggcgaggaggagagcgagctggccaagctcatcagctccggcggcgacgacgacgcggagacgaggagacgggtggtgtcggtgtgggggatgggcgggatggggaagtcgtcggtggcgaggtcggtgtacaacgacccggccatcgtcgatggcttcgactgccgcgcctgggtgaccgtgccgcacccgctcgacagcgccggcgagttcaagcggcggctggtggcgcagctggagaccgaggtagacggcggcggcggcggcgacgacgtctcggcgtggctcaggcagaagcggtacctgatcgtggtggacgacgtgcggtcgctggaggagtgggagcacatcgagccgtgcctcgtggggagcgacgccggcggcgggcgggtgatcgtgacgacacggcaggtagacgtcgcccagcggtgcgtgcggggaatggagcacgcgtacgagctcaagacactcgctgctccgcatgacatgaggctgctgtgtcaaaaggtacgctcgttgctcgctgtgtccatggatctgcatgactgcatttctgcaaccaaagttagttgaccatatttttttgctattagtaaaaacaacttcaataacttgcttgtctgaccaaaagaataaaggatttatatgtcttattaggttctagtaactcttaaatgattcaaaccttaaactttaattagtgtcaaatcaacatgctcgttgaaacaacagcaatattctactgacaactctagctaaaaatatcagctcaaggacaacttagcttagaaatatttagaaatagagccctttcaaacacgacatgagtataaggccttcttgtttagttaggtaaaatttttggatttagttatcacatcaatatacggacacatatttgaaatattaaatgtagtataataacaaaacaaattacagattcagcctataaactgtgagacgaatttattaagcctaattaatctgtcattagcaaatgtttactatagcactatattgtcaaatcatgacacaattaggtttaaataatttgtctcacaatttcacgtaaattgtgtaatttggtaaaaggtttttattttgagaactaaacaaggcataagtaagtggtgacaccggtgcccctaaaatccaggatacgcccatggccacatcccacaggcacagcgctcgcggacgcattgctccgcctccacctcctcctccacccacgcctcgccgggcggcgcacgccatctcgtgccgtggttttcatttttctcccgcatggatcatgcgcgaggacagtggtgaagcttcactcccctcgccttcgcctcgcgcacgccgtgctgtggtttgcgcgggcggtcatgggttcacggtggctttgcctaccaagtgcttgatgaaatgccacgctgatgaacatcttgggtaggctgttcccggccacatagttagcactccttggtgttgagatggcaccaaaaaagggtaaattgtgctatattttgataagcaggttgcgtgaggtttcttgaaagtttctgttagttccaattttttccaagtaacaataaaatggtgggaatggtactatagtttctcattttgctctcttttcattttaaaggtgtacaaggatcccgaatataccttacaattgcatatgctagaggaagctaataaaatcttggggagatgccgtgggcttccgcttgccattgccaccataggaggtcttctggccaacaggcccaaaacaagcgcagaatggaagaatctgcgcatccatcttggttcggagctagagtttgaccaggacatcaatagcatcaacagagttatcacctcaagctatgatgggctaccgtatcatctgaagtcatgctttctgtacctcagtatttttcctgagaaccatgagatcagatatactcgtttggttcggcggtggatagcagaagggtacatagcaaagcggcgtgatatgaccgtcgaggaagttgggcagaagcattacaatgacctcatgaacaggagcatgatccgaccaatgaagaagaagattggggccagcatggcagttgaacgttgtcaggttcatggcatggtgctccaaataatcttgtccaagtcaatcgaggagaaccaactatttatcattgacaagcactgcaatgaggttccacagagtaagatacgacacttggtagtgacaagatggaagaggtcggaggagaagatggcaacaaacataaatctatctctagttcggtcactgacagtgtttggagagtgtcctgcgtctctaatctcccctaaactacgattgctgagggttcttgatttggaaaatgcagttgatctagagaatgacgacctcaagcacatcggggatctacaccatttaaggtacttaggtctgcgaggaacaaatatatcaagacttccttcttctctgcagagccttaaatgcctggagactttagatgttcaggacactaaggtgacacatctcccggatggaactgccaaactggagaagctgcgctatcttcttgccggcatcaacttcgcagaagacttggcagagaagatgcaaacaaatgcaaagaacaaggtaaacaaatgcaatggaaacctcttggaaaccttggcagacgttgtatgcaggtgccgtcgtggttttagtgaatgttgtgaatcttcatcttcctgctttgcaggccacttcagtgtaagggctcctgagggaattgagaagctaaggaacctgcacatgctgggggttgtgcgcattgaacgagacagcggagtggcacagaagctggggaaactaattagcttgcgtagattaggagtggatttggatgccactggagaagaagggaaggcattgtgcaattcaatccaaaaacttgctcgactggaacgacttgaagtccgctctaagtcgcttctatttctgaacgacttgaatggattagccccaaagcatctcctgtcactccggttgtatggccatttagaaaaattacctgactgggttagttccctcaatgatctagccaaggtaaagcttcttgagacacaattggagcaaaaagacattaatctactcgggaacctgagcaacctgacttctcttggattgtgggggaagtcctttgcaggggtgtcactgcattttagcagggacatgttcaagaatctcaaatcgcttcatattcaagggctggaaaacctcgagactctgaattttgagaaaagtgcagcggataggcttgagaaacttctagtgaagaaatgttttgcattgagcgacaacgaacggggaatatctgatatactgttcctaaagaacatagttgaaattaccctgataagtaagggtgacaaaccacatctgcagaagggattgcaaaggcaagttagtgaatttgagcttgtcaataagagacgccctaagcttcaaattgttaattccatgtcagggaggagcccaagggctaatactattgtaggataaaagaaaggaaataacacaaatatttgccc

SEQ ID NO: 25337 - DNA, 2574 bp, Oryza sativa
  ref <308>: DATABASE ACCESSION NUMBER: AK100779
  ref <309>: DATABASE ENTRY DATE: 2002-08-28
gtaagatcagtcgcttcagtttggtaacctttttagttctttgttctcagcatcatacattagctttgtcatatgagtatctattatcagaaacatttgttgagtgatgaatcttaggcatgtgcttcagtttggtctgatgggtagcacagaacctttcattttgataaatacagttggggaataggatgggatctgttcatttgaatttatcactaaatttgagtatctctatgcctctaagcaaagagaaccacaattggtgaagggaaactagatggcttcatgtttctagttccctagttttctagtttctccatgttacctttacacgttgatgttgattattcaaacctaggcttcatccgatttgtgatggtactgttaaattggcagagtgaacagttgctaatacagaatgtatttgctggatgtcatgcatctcaacccatatgttttcctttcccgttttaacatgtaatttgttcactggtctcatgacattgggaacacaccaattttatcgtctttcagtacaattgtacaaactacaaagtccacttcaaattactttctcgttgttacaaacaagctgaatagagtttgtcatacctaaatttccctttatatttttctgtgagagttaagtgcaatgcattgatattattagcatttctggcttggtcatgcgcaggggttgttattttcagtctggacgagtgcttaaactaggaacatctgtcgaggctgctttcaggacggcattggagacctgggcttcatgggttgaaaaaagaatcgatttaaacagaactcatgttttcttccgaacatatgagccgtcccactggaggtttgctttctgaatgcaaacaactgctcttttctgtacaacctgtttttcatacctttttatgagcataatttgaagtgactttatagatgcaatattatacgtatgcagtttaaccatgtcaattcaaatgagaataaattattaagagtgggttagtaagtaaatttgtcaatgtatggccaatctataaaatgtgaattcactagaaaaacattcagtatttggcaacttcacatgttaaaatgagcatttatatccataattcaatgcccaagtaaagttcacacataaatttaaatcatattaagcattagaacttttatttggcaatgagtatagatgatcgcagcaattgatgattgtgggcttatggcatatccattttgttatgctagtaatctggagtccttgtccatctgcatctcatcagtgatcaatccaatttcgaaagctttatttgacctgcattctgatttagttattcataatttgcttcttgcactttatcaccttggatttgagaaccatattccatttttgttaaagaggggacatgtctgaacaattcactgaaaatttacattaccatttcagtgaactgtcaaaatcttctcactgtttccaatacgaactgtgacaatattatgttgggtcctgggtccatctagaaacttcagcctcgctcggttgtgcacttgtgctagttgctgtgcagctacagtcccagcatcagaaaatcggcggcggctgtgctgctgcagctagctaagccgagcaccctcttcatctgttttcaccttgtcattctacattgttaaattttgtactgcaaaatgtcaccattatctcttcaattcttagaactatggtataatctgagacgactatggtacctcaaaactagcatttcctgattttctttctatttatattatttcctctatacgtaacatttgacaatatcaattctgtcctttgtttcctcttctgtaagaactaactaaagaattgtttcacctttacagtgatacaaatcaaaaggtatgtgaagtaacagaacagccttcatcagaggccaaaggaaatgataagagtgaatttgggactatacttgccgatgttgtggcaaacatgaaagctcctgtcactctactaaacgtgactttaatgggagcattccgaagtgatgctcatgttggcacctggagttatcctcccactgtacttgattgcagccattggtgtctccctggagttcctgatgcttggaatgaactggtattttcataccttttaacaaatggtgagttatgataatggctaccttcatttctctatccacaaaaaggcaaaactatgtactcctatttaagaagtatcactagatttgaccagcttttcacattccaatttcacaggttggcgaaagatggctcggtgactgctgactcttgacagtatactcaatataatgtttttcagcttgaatatttcgaactgcagttttgtctgctaaagaacaagaaaacatgaaacagtgtattttcctaggttgtttactgtgcttctacattttttttcctcttgtacaaggtgatgcattagattttggatggtttcatttgtctgtacgtagtgataatacattctatacgttgtaaattacatgtttcaacatgtatgtactattgtactaacaattcacttcatacgttgtc

SEQ ID NO: 25338 - DNA, 2447 bp, Oryza sativa
  ref <308>: DATABASE ACCESSION NUMBER: AK100780
  ref <309>: DATABASE ENTRY DATE: 2002-08-28
gactcctcccccacactctcctctcctctctccctctcgcagccacagcacagcgcagcactggccgcctaatctctccgcactctctcccctcgccgctccctccactgccgcttcgtctcggccgacgacctcgtcgtcgtcgtcgtcgtcgtcctcgtgttcgccggtcgccgcgccgacgcggatcgccgtgccgctgtccagtgcgagagcgcaggcaggcaggcaggcgcagtgccagcaatttgcctccctcaccaggggcacatctacatgtggagttcattcccataaaagaggatgcacatggtatacctcacccatgacctctgtaataagctgcggtgatctttatatgcttcaccaactggtgaaaaatgggctcttttctgagaaaacagcccagtttcctcttaattttgttaattctgcaccttggtgctcgtgaagcaagagcactaagttcagatggtgaagcacttcttgccttcaagaaggcagttacaacttctgatgggatatttctcaactggcgtgaacaagatgtggatccttgcaattggaagggtgttggatgtgactctcacaccaagagagtagtttgtctgattcttgcatatcacaagttagttgggcccatacctccagaaattggaaggttaaatcagttgcaagctctatcactgcaagggaatagcttgtatggctcactccctccagaattgggaaattgtaccaagttacaacaactgtatctacaaggaaattatttaagtgggcatatcccttcagagtttggtgatctggtggaacttggtacactggacttatccagcaatacgttgagcggatcgattccaccctctcttgataagctggccaagcttacatcattcaatgtttccatgaatttcctgacaggagcaataccatctgatggttcacttgtgaattttaatgaaacttccttcatcgggaaccgtggtttatgtgggaagcagattaactcggtgtgcaaagatgcacttcagtcaccatcaaatggccctctgccaccttccgcagacgacttcatcaatagaagaaacgggaagaattctaccagacttgttataagtgcagtagcaacagtaggagctcttctgttggtcgctttgatgtgtttctggggttgctttctgtacaaaaattttggaaagaaagatattcatggtttcagggtggagctatgtggaggctcttccattgtgatgttccacggggacctcccttactccactaaagaaatcctcaagaaactagagaccatggatgatgagaatatcattggagtagggggcttcgggacggtttataaacttgcaatggatgacggtaatgtttttgcattgaaaaggataatgaaaacaaatgaagggcttggtcagttctttgatagagaacttgagatactgggaagtgttaagcatcgttatttggtcaatctccgtggctattgcaattctccctcatcaaagctattgatatatgactatcttccaggtggaaacctagatgaggtgctacatgaaaaatctgaacagttggactgggatgcacgtattaacataatacttggagctgcaaaaggcctggcttatttgcatcatgattgttcacctcgaataatacatcgtgatattaaatcgagcaacatcttactagacggcaattttgaggctcgtgtatcagactttggactcgcaaagctattagaggacgacaaatcccatattactacaatagttgcaggaacatttggctatcttgcaccagagtatatgcaaagtggcagagccaccgaaaagactgacgtctacagttttggagttttgctacttgaaatactaagcggaaaacgacctactgatgcatcatttattgaaaagggattgaacattgttggatggttgaatttcctggtcggtgagaatcgggagagggaaattgtcgatccatattgtgagggagtgcagattgagaccttggatgctctactttctcttgctaaacaatgtgtaagttctttgccagaggagcggcctacaatgcacagggtggtacagatgttggagtcggatgtaattacaccatgccccagtgatttctacgattcagaataggcttcgacttacggctgctcttgaaaacgccacactgccgctggttttcctgtggaggcacattccatttattctttgcagattatgtaaattcattcctgcggtgttcggctccaatcggctagctcaatggggaggacatttttgtgtctatgtatctatgctacgtacaaattattactactacatgtcaagttaataagaaacttaccaggagattactgtacttgtattgaactgtcaatctcggaagaatggaaatggtagggattagggatgcct

SEQ ID NO: 25339 - DNA, 1381 bp, Oryza sativa
  ref <308>: DATABASE ACCESSION NUMBER: AK100781
  ref <309>: DATABASE ENTRY DATE: 2002-08-28
gacacaaggaacgaggttcgtcgccgccgccgccactccaccccataaaccctaaccgatcgagggggcgcagccagtggcgggaagactccaccgccgcgccacgacctcgccgggatcccccacgaccaccactgccgcgcagcaccgtcgccgtcacgaccgccatcgccgccgccgcccacgtcaagcagagcgacgacaacaacgatggctgggacttcctcttcatccaacgcgtcaaccggtggctactccttgatgggttacattaaagatattccgaccctgaaaggagataactacgaagaatggaaaagagaactcgaccttgcttttatcttgggagaggtggactgggtgttgactaccccatgtcctatagaacctgctgaaattttcagaggtgaaaaagagtcagatgctgaatggcaaaagagagagagggacaatgcttccctcatcatgtcgtatgacattgagcatgcgaaatggtcttcagccaacaagaattgtttggctgcggtaaagaacacgattgagccaaccatattgggctcaatcccagagtatgacactgtctctaagtacctcgaaagtataaagagccagtttagtggttcttcaaagttttatgcgacacagctgataaagcagcttgttacagagaggtaccatggagatggtgtaaaagaccacattcttaggatgagcaatatggcttccaaattgaagcaaaaagatttgggcatctcagatgactttctggtccatctggttttgtcctcattgccaaagaactttgacaaccttgttgtcaactacagaataagtacagagaattggaatattgaagagctcatctctaattgtgtgcaggaggaaagacacaaagagaccaatggtgactccattaaccttgtcaaagataacaaggaaaagagccacaggtcaccctcctcaaaagaaaaacagcctcagcatctgcctcagaagcaacagtttacagttgagacaagatcagtgtctacattgcaagaaaagacattccaagaaagatcatcctgacttcctgacagtgatcatggcaaagaaagggattccgttcaatgaggactatgcaaagaagtgaaagatccattagagttgccaatggagttgaagcaaaagttgaggctggagatcttcgcctagaactcgcgaatggcttcacacttttacttccagacgtttttatgttccttctttgcaaagaaacttgataataagtgtatccaaattggattttgatagatatgattgccattttggaagtggcaaatgtgaactttggtataataatgaatgtattggtcttgtgttgcaagatcagctttatttc

SEQ ID NO: 25340 - DNA, 1221 bp, Oryza sativa
  ref <308>: DATABASE ACCESSION NUMBER: AK100782
  ref <309>: DATABASE ENTRY DATE: 2002-08-28
gagtaggcgacggcttcactactactacttgtactgcgagccacacgcagccaccgcgcaaaacccacgcgaccccttcctcctccgcctcgacccgatccgatctgagccagagccagccatggcggcgactagggtttggctctccgccctcctcctcgccttcctcctcgccgccgcccccgtcgtccaagttgccagagctcagtccatggaagaagctgctacagctgaagttgttgatggggctgatctaggaatcgtcagtgatgatacacaagtttccagcgatgggcctctaagtccggctcctggtgtggagacagtatgtgtttttcccaaaaacgctggcaaaattgtgctagcaggtgaagaaactgaactactggttggcctgcaaaacgagggtgaatcaactttgaatgttgttgctatccattcaactctccatcttccttttgaccataagatgtatggacaaaaccttactgttcagaacttcttcaatgcatcagttcctgtctctgtacaagcaacctttccgtatacattcgccgtgagcaagttcttgcagcctggagcatatgatctagttggttacatagtgtatgagattgatcagaacccataccagaatgtcttttacaatggcactgtagaggttgttgaggctggaggtttactcagcgttgagtctgtgttccttattacccttggagttgcccttcttggtctcttcggattgtgggcatatggtcaagtacaacagctctcaaagaagacaaagaaggcccccaaggtggaactgggaactggaactactgatgccaacatggatgagtggctggagggcactgcatttgcacagggaagcaaatccaagaagaagaaatagattggaggcccttgaactctagttaatcattttcaggatctagaatgagacagttgagggtagcccttcacaagtaacttttgcagacgatagatgagaaaatggaggtgttttaaaccgtagtttcgtggctgctgcacatgtttgttgacaccaaatttcgaccttgttgtgtacttttacatgaaagttttttcttgaaaaacacagttttgttcaaggtatatgctatggatgtgatctctgatcttatttgatctgtgacatgccgaataacataagttcgatctgagagatgctgaatcacataaatttttattagttgc

SEQ ID NO: 25341 - DNA, 2452 bp, Oryza sativa
  ref <308>: DATABASE ACCESSION NUMBER: AK100783
  ref <309>: DATABASE ENTRY DATE: 2002-08-28
gagcgcgcctgatctcgcacatccctctccctcttgccttcccagaaccgcacctcaccgccgccgcccgcgatagccgctgccgccgattcctccagatctccctcaccccatggccgccagcgattcctcttctctctctcgggcacagcctcacaggacgagccgccgctcaccgccggcacggagaaaagaccccttttctcctcccaaggttcaccgcagccacaagctcctcctcgagatcgaggcgctcatggaggtggagctcgaaggaggcaacgcactgggaggtcggcacaggtggcggaagcagatcatgactggcggagcttcgccggagccgcaccaacatggatccagtggcagggaggagagaactgaagccgctgccctcaccggagccaatcatgacgggaggagcttgagccccgtctccgcggcggcggatggcgaatggacgttataattctctcatttgctaaatatttctctacagctacttttcttcgaacaagaaattattggaggttattgactaggtctgcaggaatcttgccgacaacaattttcaaggtcctattcctgcaaacatcagttcttgcactgctctaaacaaattcaatgtttatggcaatgagctcaatggttctattcctgctggtttccagaagttggagagtcttgacttacttgaacatatcttcaaacaattccaaggaataaattctatggatcagttcctgctactattggtgatctggagcaccttcttgaactaaatttgagtaaaaccatcttgatggatcagttcctgctgagtgatggcctgatgggtcagttcctgctgaggttggaaacttgaaaagcgtccaagtaatgtaagtgtgttcccttgacctcaagcctgatagtggttctctatctcctatgcaaaatagaaaagagggaattgttttccttgaaaggactgcaaatgccgcaaaagaagattgtaaatagccttctgccaatatgagatttttttttttaatttgcaagcagtggcgaagctatattatcttggggggtgcatatgaacccccatattcctaacttctcacttaaaaacactagaatgtacagtgttgtactgaaaatttctaaattctcaatggtagtgcacccccttgttttaatgctagcttcgcccctgtttgcaagactgcaactttcaaagaagatgtaaggtacataaggttaaggttaatgctattgagcactgcatgcatgtatattatcctatcaaaatcatctgagaaacagctaaaggtttcataatgtttagaattttctcaactaaattcctctatctgccctatcgtacgacgtggcgccgcgctttcctttttagtggtttactaatgctaatcattgttgatgaactaatgcagttattgggtttgtctggacattttggtcttggaaacaccaataacttcgccatcgttgatgctgctggagcttttttttttaaagtaatgttgctggagctttcattgtaggtttaacaaaggcttagttaagtgccttttgtcctcatcgcattctggtttgactaatgaattttaacagggtatttcaggttactacatagttctttctggcatattgatgttcataattacatatggatcacctctgttgttgtaccttaggatggtggtttacatatcagtaataagcagtaaaatggaacgatggccaatcgggcatgctaaaaatcacacgcgagggcgttgcgggcccaatcgcagcgcgggcgcaggtctgcaagcagcaaggggcacgcaaaaaggtgcaggccaaattaattcgtccgcgtattggataagagggacactctgacataagaaaaaaggaaatgatttgatagaaatataaaattaaaacctatttcaatacggatgatgtaccaaaattctgatgaaaagatcttcaatttttataatagtagagaagggatttgcatcatcaaatatcatcgtagtgttagcacgggcatattactagtgcccagaaattgttcctatactgtttaaatgaagcccataaattgttcctagaccgtttaaataaagcccacaaatttattcaatcattattgcataaaatttaaactattataaagaaatacacgtcagtaggatcatgggctaaatttaacctaaatctggggagcatatagtaataaaaaagtacagaaaaaaaactttaaacattctataggctttaaaatataatctggcatgcattataatgcagaaaaatatgagaagtaaattaaataaataaaaaggaaactgagagaagatggaaaaaatatgacttttagcttttcataaaaaaaatgttaaatcaaaactgaacaaagtaactagcttcatcatgaaaatattctacgttgaaatgc

SEQ ID NO: 25342 - DNA, 2565 bp, Oryza sativa
  ref <308>: DATABASE ACCESSION NUMBER: AK100784
  ref <309>: DATABASE ENTRY DATE: 2002-08-28
ggggagttgggagttgggactccctgtgcctctcctctccaccgcaacgaccacaaatcaccatctgctttctagtttcttcctgaagttctgcgtcataaaggcaaaaatccaagattgattttggatgaaaaagactgcagtgcttagcaagtgttctgttcttggagtcgcaagctgcggctagctagcaagcaagcagcttttttttttttcgcagatcttggtgaagagcctgttcttccatggctttcgctttgtgagagaaaagggtattgttagtcagtaagtaaaagggtggatcttgttcgaagattcaagagtcatgttggattctggttcttatgatgatgttgactatggggatttgttctccatccccaatccacctgcgcctcacttgctcaatttccccctccagttcttcccttccaacggattcatcagttctgctgatgattcccatagatcaccagctggtatgtttggctcgaccccaagccccacatcaaccacaaccgagttggaaaattcagaggatctgtctgaatccgccgacgatgcggtcctagcatacatcaatcagtttcttcttgaagatgaggaagatgaatcttgtcctggcaccatcacatcggtggaggactctgccctcctcgccgtcgagaagccattcgttgacatcctcactgctagccaagaggcctgtcaagagaattcttggatagattcttgttgtgatttcacggggaatggaggattgcttgatacgttcacaaccacacatgccgcttgccagccagcgccttgtgaatttgagaaggagaagggggagtgtgctgttcataaaggccggaagaacccgcatgatgattgcctattgttagaggaagagagcaggaggagcaagcagttggcagtgtctgaggaggagactgtcagagagatgtttgacaaggtgcttctgtgtaatggcgaatgcgagctccgggcaccactgccagctgaagcacggaactgcggggtgtacgtgaaaggatctggaaataagagaggccgaaagaaaggaaaatctggagcatctgcagaggatgatgcggttgatctcactaccctactcattcattgtgcccaggccgctgcaatcgatgatcaccggaactccaatgagttgctgaaacaaattaggcagcgttcttctgcatatggagatgccggtcagaggttagcacattgttttgctaatgcgttggaggctcggctagctggcactggcagcaacatttaccgttcacttgctgccaagcgaacttctgtttatgacatattgaatgcattcaagctgtatgttacagcatgcccgttcaagaaaatatcgaacttcttctcgatcgaagccatcttgaacgcatccaagggtatgacaaggttgcacattgttgactatggtatacagtatggattccagtggccaatcttcttccagcggatctcgaagagacctggtggccctccaagtgttcgaatcaccggtgttgacttaccacagccgggattccgccctgcacaactcattgaggcgacgggccgtcggttgcatgactatgcccgtatgttcaatgttccatttgaataccatgctattgctgccaagtgggacactatccgtgtcgaagatcttaagatagacaaagacaaggatgaacttcttgttgttaactgccttttccggatgagaaacatgatggacgaaatggtgacagatgacagcccaagaatgcaggttctgaagacaataagagagatgaatccaaatttgttcatccatggcgttgtcaatggcacctacaatgcgcccttcttcgtgacacgattcaaggaggctttgttctactactcttcactttttgatatgcttgaaacaactgcttcacgggtcgacgaaaacaggctgctgatagaaagagatctcttcggccgggaagctcttaatgtggttgcttgtgagggcactgagagagtagaaagaccagagacgtacaagcaatggcaggtgaggaacatcagggcaggcttcaagcagctaccactgaaccaagagacggtgaagaaggcaagatacaaggtgaagaaatcctaccacagggatttcctagttgacgaagataacaaatggatgctgcaaggttggaaggggcgtatcatctttgctctttcagcatgggaaccaaactagcaaactgtaaatatgactaactcagctgatttcttctgtggaggtaccactccattagttatgtctgattcctatttcaatgaattttgacctatttctgggcaatagaagatattggattttgactgggctagagtatactttggatgagtatctgacagaaaaggatatacttctctctaagcgtgtgtgacctgtggggctcaaaactgtactttgaaaacacaattacacatcatgcatgtactgttcacatggtccagcctgggcaaagggttaaagcctacatggtgaattggtgatataaataacgaaatggtttatctgct

SEQ ID NO: 25343 - DNA, 1687 bp, Oryza sativa
  ref <308>: DATABASE ACCESSION NUMBER: AK100785
  ref <309>: DATABASE ENTRY DATE: 2002-08-28
gatcccagcaaaatcatctcgatcgatcgacaaagctatagctagcccagtcatggccgcctctcccgcaatggcgacactcctcctcctcctcctccatgctgtcctcgtcgcggcagccgatgccggcgccgccgataaggaggcctatgcggcaacaggatcaaccgctggcaaggagaccgctgcggcggccgacaaggagacctctgcagcggccggatcaaccgcgggcgccgtccctgaccccaacatcttcaacaaggaggccgtgtgccccaagacgacggacgagaaggcgtgccagcaactggtgaaggtcctgccgcccgagtttgcagagacgaaagacgccaagggcctcgccaagctgtgcatctccagcgtcgggttctcggcggagcagttcaccaaggacgccatcgccgccgtgcaggagtgcaagaagcccgacaagtgcctcgacagctgcgtccaggctagcaccgccgtgaccgacgccctgaagccctccggcgccggcgtcaacaccgtcaaggtccccgaggacgaatggctcctcgccatccacgccagcttctcgcagctgctccgtggccccgccggcggcgtgagccgcccgcctctctgcaagacgtgctgcgacgacggctcgtgcaaggacgccaagaagctcaacgtcgtctcggtgttctcgcgcatgtgggacttcctggatttcaccgatgcggtgctcgacgatttgtatcctttgacgaagacgacggggaccaaggccacgacgacagccggatcaaccgccgataaggtagcctatgcggcaaaaggatcaaccgaaggcaaggagaccgctccggcggccgaatcaactgtcgataaggagacctctccagcggccgaatcaaccgtcgacatggcgacctctgcggcagccggatcaaccgccgacaaaaacgcctacccggcggccgaatcaactgccgataaggagacctctccagcggccgaatcaaccgccgacacggcaacctctgcggcagccggaccaactgccgataaggagacctctccagccgccgaatcaaccgccgacacggcaacctctgcggcagccggatcaactgccgataaggagacctctctagcggccgaaccaaccgccgacacggcaacctctgcggtagccggatcaactgccgataaggagacctctccagcggccgaaccaaccgccgacacggcgacctctgcggcagccggatcaaccgctgataaggagacctctccagcggctgaatcaaccgtcgacacggcgacctctgcggcagccggatcaaccgccgataaggagacctctccagcagccgaatcaaccgtcgacaaggagacctctgcggtggccggatcaaccgccgataagaacacctatccagcggccggatcagccgccgagaaggagacctcttcggcagccggatcagctcctgtcgtcgacactgcgcctgcggccccgccgacaacttatgtttaattacaaacattcggtacttaatattttttaggatgctatacgaactttaaataactcttccaaaatttttactacaccaataaaaaatccttacaaaattttgactacagcaatgtttgtaaggagttaatcgaacaaggtctaagttgatactct

SEQ ID NO: 25344 - DNA, 2109 bp, Oryza sativa
  ref <308>: DATABASE ACCESSION NUMBER: AK100786
  ref <309>: DATABASE ENTRY DATE: 2002-08-28
gaggccctatgctttttcttcttcttcttcttcttctccatctctcctctcctgtttctttcttctctccttgttgttgcagctgtcctctctctctcctcaaagagaaaattaagccactggcccctttaagattgacctgagatttccagtacacaagttgtgtgcatgcaaagagaggccaaagctaagctagcaaaacacacattcctttcccacagctagcttagcttgaagcaagcaagaactcatcatctttgtttctacatatcctttaatactctcctctctgtcactagcagtgatgaatagaggagaattccagagctccctggtgcagcagatgatctggagcggcagtagtacaggcacggctaccggcgtcggcagcggcggcggcgccggcagtttgatgggcagcttgaagccatgccatgaggatcaagaggcctctcctaacatgccctccttgtcttctccatcgttgatcttctcgcagcagtttcagcacagctctccaggtctagttccgatgaacggcaccgccggcgccgccgcttctcttccgagcttgcacgacggcggcggcggcggccatgagagcagcatgccggagtcatggagccaactgcttcttgggggattagctggagatcaggagaggtacagcgccactgcggctctcctgtcaaagggattagagaattggggagatcacgctgctgcagctgcagccagtgcatgcatggttggtggcatgaaggaggagggctccatggctcaagctgcagccactgctgctgctgctgcttacagcttctatgggagccaccttgctggtgatcatcagcatgagatccaagcagcagcagcaggaggaggtgctagcaacaagtctcagctgagccagatgctcatggcttcctctcctaggtcatgcatcaccaccagcctcggcagcaacatgctcgacttctccaacaccgcggcgccgccggagctccggagccaccaccacaactccgataattcatcagagtgtaacagcacagcgactggttcggccctcaagaaggctagggttcaggcctcctcttcagcacaatctactctaaaggtgaggaaggagaggctaggggatagaataactgcacttcatcagattgtatccccattggcaagactgacacagcgtctgtactgcaagagaccattggctatatcagattcctcctgagtcaaattgaggctctgagctacccttacatgggcgacgccaacgggaccggtcctatgcaaaatggaccagttggagaaaggaaccctggcctcttcccggaataccctggccagttgctaaaccataatggcaacactggagcacagcagcctgcagcccaacctgagcagcagggagcaaacgacgatggaaagaaggacctgaggagccgggggctgtgcctcgttccagtgtcgtgcacgtcgcactttggaggggacaatgccgctgactactgggccccggcgccgctcggcgggatcctacggtagaatgcatcgttgagattcgtgcatacaaagcgtggcggcacagcgagtactatatgttgatgcatgaggaggctacagacgaaataggtctcttaagaatggagaacagagtgtgcattgggtgcaggagtaacgtcgtcataacatcatgagcagtcattctctggtaagaaaaaaaattacctgtaaggttgattgctcttgatgctatgggagtgagaggtagctagctatagtataattaattaagcttctgggtctgcaaattaagaagcttcagttcaagaaggagaccttgcaaaagttgatgccccctttgatatgtatatgtaaaatctagcaagtcagtgaacactttgctcatactaccgtgctttgatttatcatcagaagcagaaaagcttgcgcggtagtgtcaatattccgtcagttgctcggctggtgtatgtaggaaattaaagttgatatcccatatcacatatatgtatattgacagttaatttgtatcagttatttactgagttaagtcagcaatattatttgtcttcgatgttgctg

SEQ ID NO: 25345 - DNA, 1452 bp, Oryza sativa
  ref <308>: DATABASE ACCESSION NUMBER: AK100787
  ref <309>: DATABASE ENTRY DATE: 2002-08-28
ggtctcgctgacttcctctgcatctctcgcgccgcctcgccggcgaaggtcgcctctccggctccgccgccgccgtcatcacgagggctgccacggtcacgagcaggcgggcgccggcgaggtggaggacgggagtagcggttgcggggagaagaggaggccggtgaaggggaagaggagagggtaggcttgccggcggcggcatcgggcgacggcgacgtatcaggtgagagaatctcggcgagttctctcgccatccgattcttcgattctcttccctgtcagtacgccccgcaattccacagtgctcaaattttacggttcaagacaaatcattatgctgatgcagaacgcagctagaatttttcaggtttgcagccgtttttttttttttttggatttccggaccgctgtgcaagattctgcaggcttgtgaggaacacaagaggaatggataataccccacgattttcaggaggaggagatgattgtgagttgatgcagcagaaacaagaatgggccaaaacacaagacatgctaaagagcaagctcattcttgaggatgattttgggtggaatttaccttcaatgggctcaaattcagatcagagcaatgctaataataagggcaacctgaagtatataggaggtgttgacattagcttctcgaaagaagacccttccacggcgtgtgctgcactggtagttttagatgctggtaccttagaagttgtccacgaagagttcgatgttgttcggctgcaagtgccatatattccaggatttcttgctttcagagaggctccaattcttctaggactcttggaaaaaatgaagacaaacaaccagcatttctaccctcaggtactcatggttgatggaaatggattacttcatccacgaggttttggtttagcttgtcatcttggtgtccttgcagacctgccgaccattggagttggaaaaaatgtattaatattactgccattgcaactactcctatggaagttctctcatctagttgttttccgaccatttcaagtacttgatggttttctgatgttctgatcctctgagagaagactaagtcctcagtgttttgaatgccccagctgcaccatgtggatggccttaaccaatctgaattgagaagacaattagaagcaaaagaaaactgcaacaaggagttaattttattgactggacagtctgggacaacatggggagctgcaatgtgctcctgccctagtttgtcgaagccgatctacatctcagttgggcatcgcatttcacttgactcagccattgggatagtgaagttctgtagtaattatcgcattcccgagcccattcgccaggctgatataagatcaaaggtgttccttcaaaagcaccaaaaacttgaagagtaataacaagattgaaatgggagttttatcttctacctgagtc

SEQ ID NO: 25346 - DNA, 871 bp, Oryza sativa
  ref <308>: DATABASE ACCESSION NUMBER: AK100788
  ref <309>: DATABASE ENTRY DATE: 2002-08-28
gacggtgcaaagtgtgcagcgaactcgataaacattaaacaagctgtgtgaacttcttttttcgtgacaagtttaattctttctcgatcgatcgtcgtgatggctgacgagtacggccgcggcggctacggcaggtccggcgccggcgccggcgacgactacgagagcggcggctacaacaggtccagctccggcggcgccgacgagtacggccgccggccgggaggcggtgccggtggctacaacaagcccggtggcaccgacgactacgacagcggctacaacaagtccgccggcggcgacgacgacgactacggccgcaccggcggcggcgggtacaacaagtccggcaccgacgacgactacgacagcggctacaacaacaggatcgaggagggcgtggcggcggcggcggcgctggggagcggcgggttcgcgttccacgagcaccacgacaagaaggaggccggcgccttcgccatgtacgagaggcgaggggaagaagaagcaccacctcttcggctgatgatccatcgatcgatcgcgccatgcatgcggcggcggcggcgccatggccggcgtccgcgcgcacgcgtaaggtgtggccatgggcgtgtgcagctgaataagagccggggtttttgtacgtatgggctcagtatgtgtacacctcgtatatggtatggatgtacgtataagcgtatagtgtgtactataccaataaagctatctgttgctctgtgcctctgtgtaattaagtccatggtctgccatgcttgtgtagttgtgtacaccttgacttcatgactagtgagtagtgacgtacgtatttgatgtatttcatattttgggtatggccgagtttagttcc

SEQ ID NO: 25347 - DNA, 1706 bp, Oryza sativa
  ref <308>: DATABASE ACCESSION NUMBER: AK100789
  ref <309>: DATABASE ENTRY DATE: 2002-08-28
atgccgtgtcgctccgctccagggcaacacgggaggcgacccgaagccgccccgccgccggccttctctccctcgcctcccccacctcgccgccgcctgagcagccgccggcaaagccggacggcggcaaggacggcggcggcggggccttctaccccctccaacaccctgcggttggggccccgacgggaaacaggcggaggggcggcgacgcgtcgaggcggctccggcgacgccgacggccagaggcagcagagccagcgtcgctgttagcggatctggccccctcgcagccagatcgggacgaagtggcgccggccgcgctgcatcaggacgaggcgctggctggggcagtcgtggcgccggcggagaaggccgctggatggggcagtcgcggcgcgggcggaggcgacgtcgctggcggcggggacgaggcagcgagcctgggcgccgctggatctggctctcccaggccggatccaacgcccgcagctgggccacgaaggaggccggctccggggcggcggcggcggcgatgacgacgagacggcggaggcggcgctgacggcgggagaggcatgggcctggctacgcacagcgcctccggctatggctccccctatttcgacaccggctcccccagtccggatttggcctctctggcgagggaggccggatcccctccggtggctcctcagctgtggacgacgcgacaagggcagcggtcagagggcagcaggaggcgtgggtggccgcggcaggagggcgagtgctgcggctggtctggcgatctgccagagctgtgggtgatggcctaggactgattgctaaagggacgatgcagccgaccggcgacgatcattcttgcgcgaattgggtgtgtgggtttggacgggaaatcgctggcgaaagcctcgccgtgccattggccggctgacgacggcggcgcctttggcgtcgttcccctccttggaggcgtcgttctggcgttgatccctctcctttccctaccgttctccgagtgaaaacctggctccggcttccggacgagcggtgacggagatccacgtcgtgtcctccttggaggcaccgctttggagaaacattttcgtgcaaggatgtagttaatggtctatgcattggcttcgaagcttttcagtacttggttttgatgaggccttcgctgtctagtcccactttttgttttgcggcgggcaatcttcgctccttgcttgtgtttgctaggtgaagtcggagctgcttcgtagggtgacgaagctgggcaacgatgacacgttgcattctctttctaggggttttgtttgttggccgtgaataggatgtggcgtttagacggctttggctgaagttcttcgtgggaagttgaagccacttgaccattgacagcgagttaggtatggatgatgcaaccgatttgaagtcggagctgctgtgtcgctaggcggcaagctcggcaacaatgacacggttgcaaggtcggaacccctttgccgtcttggtcaagcttggtaacgacgttctatgttgggctccgtcagtggtttctgttgttagtgagttgtggcgtgtgcggtgcagctattcagccagccggtagttgttttttcttttcttgtaacccgtctagggtttttactcctgcttattgaaaatataattggcagttctcctgccggtttagtttc

SEQ ID NO: 25348 - DNA, 1092 bp, Oryza sativa
  ref <308>: DATABASE ACCESSION NUMBER: AK100790
  ref <309>: DATABASE ENTRY DATE: 2002-08-28
gggctcctctctcttcttccaacacctcctaatcaccacaaaggcttaaaaatctccagtctccatagagagaaagagagagaagagaaggcagcttgatttggggcgaggagacgcgatagccgcgataggctaagcagctggcagcggcggctgctgcgatggccggcgccgacgtggacgtcgggacggagctccggctggggctgcccggaggtggcggcggcgccgccgaggcggcggccaaggccgcgaagaggggcttcgaggagaccattgacctgaagctgaagctgcccaccgccggcatggaggaggccgccgccggcaaggcggaggcgccggccgccgagaaggccaagaggccggcggaggccgccgccgccgacgccgagaagccacctgctcccaaggcgcaggcagtgggttggccaccagttcggtcgttccgcaggaacatcatgaccgtccagtcagtgaagagcaagaaggaagaggaagctgacaagcagcagcagcagcccgctgccaatgccagcggcagcaacagctctgccttcgtgaaggtcagcatggacggggcaccctacctgcgcaaggtggacctgaagatgtacaacagctacaaggacctctcccttgctctgcagaagatgttcggcaccttcacccgcaactgggaacaatatgaatgaggtgaatggctctgatgctgttacaacttatgaagacaaggatggtgactggatgcttgttggagatgtcccgtggcagatgtttgtcgagtcatgcaaacgcttgaggatcatgaagggttccgaagccattggtcttgcaccaagagcaaaggacaagtacaagaacaagagctgaaaatgttgcagtattaagatgctgagcatggtgccataagaatggtgttcttgcagtgtgttatggtttccttagaaatataaggttttacttgtttagctggattaaaagaaggaagagttgtcatgtttaatttgtttatggaccagaagcaataatctatttgtgtgtagctggattggtgttatgtgatgtcccctaccgtgtgtcccaagatcg

SEQ ID NO: 25349 - DNA, 1462 bp, Oryza sativa
  ref <308>: DATABASE ACCESSION NUMBER: AK100791
  ref <309>: DATABASE ENTRY DATE: 2002-08-28
gattcaaccaaaaaaaaaaaaaaaaagaagaagaataaaaaaacttgtttaaacaactccttacctttgcaatcttgcatcccagcatcaggcagtgcatcatcattcatcaccttctcctccttcccgatccatccatctccttccttgcatctactattttattattgcaatccactcccccactgtgcctttcttggtggtggtagtagactagtagtagcagtagctgcattcttgcagaggcagccgaggaagtgtgttgagtcagtggccatccatggcggctggcagtggcagagaggaggctgctgctgctgcagggtacgggcgcgggccgccatgggtgttcaggggcagggcattgtaccagctgcatttggtgaaggcggcgacggcgcgggcgttcgtgcccagggagctccgcctcgtggaggccttcggctacaccctcggcggcatgttcctcgcccgctacgacgacagccccgccggcaagttcgacgagctcgtggtgatcgccggcatcgtgtggaacccgccgacctcctgcgcgtgggctgctagagtgctggtgaacagtgccgaagcctgccggcatggtcgcaagtgccattgtcattcctgtaggaagtaggtctcccaagccatgttgctacattctcacagactgaagctgatgcgcttagaaacaagccattggttaaatcaaacagcttcctgagcttgcttggaatgcgctcaactgtctccaaccaagggaatgaccgtgagatcgagatctcagagaccaagggctcttgtacaagacatttgtgcaacattagtgtaccgcttactgggtcgcataaacacaagtggatgggtccagcaatcagaatgtctcttccaagcttcagtggacagatagaggaccatcctgatcttctcaagtactcttgccaagtggaatgcagagtgcgcccggtaaggcctgctaagatttggagaccaagaattactgaaccacaggagtgtcctgatggcaagatcagcagcaaaggctcggaagtattagctgaaccggatgcgcaaaaacataccgttatggtcttgttatctaagcctatcttggctctggagttcaactctctggaaatgcacgttgatgctccgaaaatcgtcatcccacactccaagaaaaaggaagtcaggtactctagtacatgaatttgatgtgggttatgtaccaatgtaccatggctcacaaaccaggagttttgaccacttttgacctggttgtttgatgagtttttacaatttctagttgggtttttaccatcattttttttctctcttgctagtaaggaagggagatggatgtgtatcatctcttgcttatgtatttcttggagtgaagggtctaaagaaattgtgttgaatatgcaaagtacttgctgagttgaaagtttggtataatttg

SEQ ID NO: 25350 - DNA, 1870 bp, Oryza sativa
  ref <308>: DATABASE ACCESSION NUMBER: AK100792
  ref <309>: DATABASE ENTRY DATE: 2002-08-28
gaactctcccccgcttcaacggaaaaaaaaaggggtcgcgtctcctcgtctcgtcgcctcttcctccttccaattcatctcgtcctctctctcgtaactcgtaaagagatctcgtctcgcctcgggaatccaaccattgccggcgaagtagagatcgggagggcggcgccatgaacaggggcggcggcgtcggcgtcggcgatgagagcggaagcgactacgagagcggcggcggcatgcggaagccgctgctgatgcacacggggagctggtacaggatggggtcgcggcaggggagcctcaccggcgcggggacctcgtccatggccatcctacgcgagtcccacgtctccgccttcctctgcacgctcatcgtcgcgctcggccccatccagttcggattcacggggggcttctcctccccgacgcaggacgccatcatccgagacctcgacctcaccctctccgagttctcggtgttcggatcgctgtccaacgtcggcgccatggttggggcgattgccagtggtcagatggccgagtacattgggcgcaaagggtcattgatgattgctgcaattccaaacatcattggttggcttgccatctcctttgcaaaagactcatcgtttctttatatgggacgattgctcgaggggtttggtgttggtgtcatctcttatacggtgccagtttacatagcagaaatatcacctcaaaacatgagaggtgctcttggctcagtgaatcagttatctgtaaccgtaggtatattgttggcatatttgctcggcatgtttgttccttggaggcttcttgctgtaataggaatcttgccttgcactgtgttgatacctggcctattcttcattccagaatccccaagatggttggcaaagatgaacatgatggatgattttgagacttctttacaagttctgaggggatttgagactgacatcagcgcggaagtgaatgatataaagagagcagtagcgtcagcaaacaaaaggacaacgatccgttttcaagaattaaaccagaagaaataccgcacacccctaatactaggaattggcctacttgtactgcaacagctaagtggaatcaatggaatattgttttatgcaggtagcatcttcaaagcagcaggtctcacaaacagtgacttggctacatgtgcacttggtgctatccaggttcttgctacaggagttacaacctggttattagacagagctggccgacggatcctccttatcatctcttctgctgggatgactctaagcctccttgcagttgctgttgtatttttcctcaaggatagcatttcacaagattctcacatgtactacaccttaagtatgatctccttggttgctcttgtggcttttgtaatcgccttctccttcggtatgggtgccattccatggatcataatgtcagagatcctcccggttagtatcaagagtctcgcaggaagctttgcgacgctcgccaactggcttacatcctttggaataacaatgacagcaaacttgatgcttagctggagtgctggagggacctttgtgtcctacatggtcgtgagtgctttcaccctcgtgttcgtcatcctttgggtgccagagacaaaaggaagaactctcgaagagatacaatggtccttccgctgagccttgtggtcttcgaaaatatggccattttttcaagtacaaagggaaggattgatttgcgcatttgcaaatcttgtgtattctatgttccgagtcaagtatactggacaaaaagcaaagtattctttctgttcatatattcttgtacaacattgtttcacgtattccagatcgacttgcaaaggcttttgtgc

SEQ ID NO: 25351 - DNA, 600 bp, Oryza sativa
  ref <308>: DATABASE ACCESSION NUMBER: AK100793
  ref <309>: DATABASE ENTRY DATE: 2002-08-28
gtggagagccaaccaccacgctgctgctccgccgctctttctcccgtggtgaacgaaagaaggtggttggaggggggcatccgagcatggaggggctgacgtccagcgagatcgccggcttcggggtgggagccctgctggtgtgcgccaccatcgccgcccagagagtcgacggcttcatcgcctcctcgcagagaacgtcattgggcatgtgcaagaagtgcggtgatcttcgtattgtggcttgctcacaatgcaaaggagtaggttctgttaggaaaggaggactattcacatttggcatgctagatgatatttatgaatcacttggagctgaaacaaagacaagtaacttggttccttgcacaaattgccgttctaaaggccgccttttgtgtccagagtgctccaaggttaggtgattcagttctggtgatgtacagagatacaattttctatcaccacacatgtaggtgttgtttcagaactgtggtttaagatatactatatcatcttcatcaaagaattatggcatgtactgaactaaggatgcttattccattttcttttacaatttgattgaaagaattaagccatatt

SEQ ID NO: 25352 - DNA, 1485 bp, Oryza sativa
  ref <308>: DATABASE ACCESSION NUMBER: AK100794
  ref <309>: DATABASE ENTRY DATE: 2002-08-28
gggatccagccgcagaagcaaaacccaggagcagccatggatcccctcgccgtgctccgggactacgccgcccgcggcgacctcgacaagatcatcttctccggcgacgaggtgctcttcgggtcggagtacaccttcccggccaacgcccccaccgccttcaccaacaagcagtcgggccgcccctacccgctctccgccgccgtcttcctcgcgcagcacaacgacctcaagcacaccgacttcatccaggccgcccgcctccgccgcatcccccccgtctccctccccgaccgtaagaccttcctcgacttcctccgccatggccaccactcgctccccaccgacccattgctcccctccgcgctcccgtccttcgcgccggagccccagccggcgatgcccgaggagcccgagggcgacaaggcctccggcgcctacatccgcgccctcgagcggacgctcaaggacaggaacgcgctcctcgacgcccgcggccgcgacttcctcgccgtgctgcagaacgctacgcgccgggaggaggagcgccggcggaacaaggacagcgccccctcctccgcccgccacgagccctcctccgccgccgccgcggccgccatggcgaagcccaaggtggagaggtccttcggggacgggttcgtgcccatcatcctcgtgccgagcgcgtcgcagacgctgattacgatctacaacgtgagggagttcttggaggacggtgtgttcgtgccgagcgacgagaggatgcgcgcgatgaaggggagcgggaagcccgagtgcgtcatggtgcagaagaagctgattcgtggggagagggccggtgctggtggtggcgcgacaacgttcgaggtgagggacaagccggcttcgcttaaggcagacgattgggcgcgggtggtggccgtgtttgtgctcggcaaggagtggcagttcaaagactggccattcaaagatcatgttgagatcttcaataaggttattggtttctatgtgcgctttgaagatgatagtgtggaggcagccaaagtggtcaaacagtggaatgttaaaatcatatctataagcaagaataaaaggcatcaagacagaacagcagcccttgaggtatgggagcggctagaggaatttatgcgggcacacacatagttgaagtatcatgtacaccagaacggcaggatcatgtaagcggtctatcttatttttatttgaaaagaagatcctgagttctttggagttctgtaatgttggacataatggtttcctactccatgttctagtactgctgccttcgtgtatcatgaatggtttactaatccctatggagtatggattgaccaatcatagataatttgtgatctaatctgaattgcactgtagctagtgattagtcagctctgcatataactgatcctcacaaagaacatgcatgatgtttgtgactgtcaaggctatcatgctaattctgtg

SEQ ID NO: 25353 - DNA, 2826 bp, Oryza sativa
  ref <308>: DATABASE ACCESSION NUMBER: AK100795
  ref <309>: DATABASE ENTRY DATE: 2002-08-28
gtggaaaccacctcattagtcatcccatcgagttgggttgagagatgctcaccttcatggagctcgcggggccgacggaaggcgacggcggcgggtccgtggactcccagctgtgggcggcgtgcgcggggagcatgtcgtcggtgccgcccgtgggcgcggcggtgtactacttcccgcagggccacgcggagcaggcgagcgcggccgtggacctgtcgtccgcgcgcgtcccgccgctcgtgccgtgccgggttgtcgccgtgcggttcatggccgacgcggagagcgacgaggtcttcgccaagatacgcctcgtcccgctacgccccggcgacgcggtggtggacgtgggcgaggcggccgcggccgaggcgcggcgggaggaggagaatagtaggccgaggccgacgtcgttcgccaagacgctgacgcagtccgacgcgaacaacggcggggggttctccgtgccgcggttctgcgccgagaccatcttcccggagctggactacagcagggagccgcccgtgcagtccgtctgcgccaaggacgtgcacggtgtggagtggacgttccggcacatctaccggggcaccccgcgccggcacctgctcaccacggggtggagtcccttcgtcaacaagaagcagctcacggccggcgactccatcgtgttcatgcgtgacgagggcgggaacatccacgtcgggctccgccgcgctaaacgcgggttctgcagcatcggcggcgacgacgagagcctctcctcgattcccgggtgggaccagtacaggggcttgatgcggcgcaatgcgaccgcgaccgcgaccggtgggagaaccccgcccaaggggaaggtcccgccggagaacgtgctcacggcggcgacgagggccaccaccgggcagccgttcgaggtgctgtactacccgcgggcgagcacgcccgagttctgcgtgagggcggccgcggtcaggacggccatggccgtgcagtggtgccccggcatgcggttcaagatggcgttcgagacagaggactcgtcgcggatcagctggttcatgggcactgtcgccggcgtccaggcctccgaccccgtccgttggccgcagtcgccatggcgtctccttcaggtacacctacacggcaccaacatgagacaaccccaactcgatcacgatagagtcgtagagttcttgatcaattggcctcctcgcaggtgacctgggacgagccggagctcctacagaacgtaaagcgcgtgtgcccgtggctggtggagctcgtgtcgagcatgcccaacctccacctgccatccttctcgccgccgcgcaagaagccgcgcaacccgccttacgcggagctccccctcgagggccagatcttcaccggcccggtgttcccgcccaatccaatggcgcacgaccaccaccaccaccatggtttccctttcctccccttcccggacagtagtgctcaacctgcaggcatacagggagccaggcatgcgcagttcgcttcaccgttcccggagttccacatcggcaacctgcagccgaatctgatgctctacgccggcatccgcctcccgcccgccgatcgcgccgcccccgctcctcgcccgccgagaatcatcatcagcaccgacctgacgattggcagcccgggtaaacccgacgacgccgcgtgctctccctcatccggcggcaagaagatcgacgacaccaagccgcgggggtttctcctctttggacaggcaattctaaccgaggagcagatcaagaacggcaactccgatggtcgtccggcctcgccgaactgggacgccgagaaggcgcctaacacctcggaaggctccgactccggcgtcacccagggcagccccaccaagaacaccacgccgtcgtggagcctaccgtattttggaggcaacaacatcagccgcgcatccgagtacgagctgaatcccgggcagtgcaaggtgttcgtcgagtcggaaaccgtcggccggagcctcgatctctcggcgctgagctcgttcgaggagctgtacgcctgcctgtctgatatgttcagcattggcagcgatgaactgaggagccatctggtgtaccgcagccccgccggcgaagtcaagcacgccggcgacgagccattctggtgagcacactagccgttcgcccgttcctcgtcaatactagttgtatttaccactcggttatcaattcttgatctgaaacttagcgacttttctgtcatttgcagcgcgttcgtgaaatcggcgcgtaagcttaggatactgactgatgctggcagtgacaacctgggagattagaagaagtaataaatcagccgaataacttagggcgctactcctagtcttttagaagcaaaaataagccgagagctgcatgcacgtacagctgcatgagctgcggtttctccttgctccagtccagtctagagatttttattcagggtaaagctgatgcagtcttcagttaattaggtgttttttagtcctttttacagctttctcgctaggggtttcaggtaacaactactagcgcaaagtgcagacagaatgtagtctttgcaccttggtcatcaaatcaaatgtactggtacttcttttattctcattcggcggatattgagccttaatttgtttcacgaaattgaatgcttctgccgcaccagaccaaggtgacaggattagtgcaggtgcaggcttacctgtatgcagtaattactatctgccggaatatttactcggcgctggcactgctgattctgaattctgtatagaggctctcagctccaggc

SEQ ID NO: 25354 - DNA, 1641 bp, Oryza sativa
  ref <308>: DATABASE ACCESSION NUMBER: AK100796
  ref <309>: DATABASE ENTRY DATE: 2002-08-28
gggtcacttcgctagctatcgatcgatcggtcgatccaagctgcagacacaatattaattcaattcaattgaattcttcgatcatccatggcgacggcgcagcaggagagcatcagcagcggtggtgacggcaacaataataataataagcaggtggcggtggtggttgttgaggaggcgtcgacgccgtcgtcggccttcaagttcaacgtgcacgcgccggagttcgtgcctgccatgtcgccgacggccagtccgatgtcggcgcccgccggcagcagcagcttctactcccccttcgggctccacgtgcagcccgatcactggagcttcttccatgaccacgagcccgtcttcttcatgcccgacttcaagttcgccgccgccgccgccgccagcgcgcagcccaagcccacctccgccgccgacatgccccacaagatcgtcaagcaggtcgagtaccaattcagcgacattaacctcgtcgccaacgagttcttgctcaagatcatgaacaaagattctgaaggttacgtccccttatccgtgattgcttcttggaagaagatcaagtctcttggagcaaccaatcaaatgctggtcaaggctcttcgcacctccaccaagctgattgtgagtgatgacggcaagaaagtccggcggaggcagccattcacggagaagcacaaggaggagcttcagtcaaggatgatcatagctgagaatttgccagaggactcatcgagaaacagcctggagaaaatcttcggtgtcgttggaagtgtgaagaacataaagatgtgccaccctcaagagcctagcacggcaagagcttccaagtcagacactctagtcagtaacaagatgcatgcactggtggagtacgagagctcgcagcaagctgagaaagcagtggagaagctgaacgacgaacggaactggaggaaaggccttcgggtgcgcaccgtcctcaggcgatcgcccaagtcggtgatgaggctgaagcggacggagttcgacctcaactcggacgacgagcagtcaccgatgtcgtcggacttatcccccacggcgacggcgacggcggcggagttgtcggcggaggcggcgggtcacgatcagggcggggagcagcagatgatgaacagcagcaagaaaggaggagggtgggcgcgagggggccgagggaagctgcaggtggcggcgccgcacagcccgcagtcggcccccgccggcagtgtggggcacttcgagccggcgagccctcgtcacaagctgccggcgagcccccgccacaagtgcccctccagcccacgccagccgcctcctcacgcccacggccccaggatgcccgacggcacccgcggcttcaccatgggccgcggcaagcccctccttgtctagctccgatccagtcacatcacatctctacgtgtacgattgcatacatgccatggatacttcaggccctcgatcgatcttctctcctttcattttctcctcttctcttgtcttcttcttcttcttctttctttattttttggattttcacaccccttaaataaagagcaacggactggctgtctgctatatcatattcaaatacttcaaggttataatattttttttgttaccccagtc

SEQ ID NO: 25355 - DNA, 649 bp, Oryza sativa
  ref <308>: DATABASE ACCESSION NUMBER: AK100797
  ref <309>: DATABASE ENTRY DATE: 2002-08-28
gagctgcagctcatccccacgaccaaatctcgccgtctccgcctcgccgccgccgccgccgccgccaccgccaagagggggggaagcaacccgcagccgccgcgcggcgagatgaacaccgacatcaccgcgtcggtgaagccggagtacccggtggtggaccggaacccgcccttcaccaaggtcgtcggcaatttctccgcgctcgactacctccgcctctccaccatctccgccgtctccgtcaccgtcggctacctctccgggatcaagccggggatccgcgggccatcgatggtgacgggagggctcatcggggtcatgggagggttcatgtacgcctaccagaactccgccggccgcctcatgggcttcttccccaacgactccgaggtcgcccgctacaagtacaagctgtagtgagaaactttatcgattcgctgcgttctctctctctctctctgctgctgcaagcgtttacatcttttttttctttttcctgatgatctcgttttagcgtcacttgttgatgtgcgagatgtgtggccttggctgaataaatgttgtacgctgcacgcttgtgaggaattcgtgctacaatttagctccctttgccatggtttagtggcaatttggttgccgatctggt

SEQ ID NO: 25356 - DNA, 662 bp, Oryza sativa
  ref <308>: DATABASE ACCESSION NUMBER: AK100798
  ref <309>: DATABASE ENTRY DATE: 2002-08-28
gctcttccgccacctgttcccgtccaagacctccgccccgccgccgccgtccgccgacggcgacgcctccgccgccgctccctacatcccggacttcaagcgcgcgttcgagcacttctgcatgcacgcggcgagccgcgacgtgctggagcacctgcagggcaacctgggcctccgcgacggcgacctggaggcgtcgcgcgccgcgctccaccgcttcggcaacacgtcgagcagcagcatctggtacgagctggcgtacctggaggccaagggccgcgtccgccgcggcgaccgcgtgtggcagctcgccttcggctccgggttcaagtgcaacagcgccgtgtggcgcgccgtccgccgcgtgcgccgcccggcgcgcagcccgtggctggactgcgtcgagcagtacccggctcgcatgaacgcttaagctgcagtggtaagtatgcggaggctaatgaacggaaaattactgcaacgtcaaaagacgggatcggcatgcgatgccggttaaggttcaagcttgattaatttgtgttggtgtattagcaagtcggtttatgagccatagactaccataaaagttgtgcgagacatgtgtactgaaccagtgtacgcgagttcggtgatatgtgaacttatctacgtttgattctatt

SEQ ID NO: 25357 - DNA, 1195 bp, Oryza sativa
  ref <308>: DATABASE ACCESSION NUMBER: AK100799
  ref <309>: DATABASE ENTRY DATE: 2002-08-28
aaatggggtgtcccaaacaagattgacatgattgctctgtcttttgttcgtaaaggctcagaccttgtagaggtcaggaaggtgcttgggaagcatgcaaagtcaataatgctgatgtcaaaggttgagaatcaagagggagtggctaactttgatgatatcctggcacaatctgatgcttttatggttgcaaggggtgatttgggaatggaaattccgatagagaagatcttttatgcacagaaggtgatgattttcaagtgcaatattcagggcaagccagttgtgactgcaacccagatgttggaatctatgatcaggtctccccgccctactagagcagaagcgactgatgttgccaatgcagttcttgatggcactgactgtgtcatgctcagtggtgagacagctgctggggcttacccggaactggctgtacggaccatggccaagatctgcctgcaagcggagtcatgcgtcgaccatgccgctgttttcaagtccattaccgcatcagctccaattcccatgagcccattggagagccttgcatcatcagctgtgcgtacagcgaactctgccaaggcggcgctcatcttggtcctgactaggggaggaacaactgctaggctggtggccaagtacaggccatccatgccgattctgtccgtcgtggttcctgagctgaaacagaccgactccttcgactggacctgcagcgacgaagctcctgcgcggcacagcctcatcgtcaggggagtgatcccgatgctgagtgcagccactgccaaggccttcgacaacgaagccactgaagaagctctcgggttcgccatcagcaacgccaaggcgatggggctctgcaactccggtgagtccgtcgtcgccctccaccggatcggaactgcatctgtcatcaagctcctgacagcgaactagtggcagacggcagttaatccacaccattttgctcggaggaaaatttttgctgggggattcttacttaccacgcatatctatagcttttgttgccatgatagtggcatttgcattcaggtgcaccttcggtgtttgctgttcatgggttaaccattgaaacagttaaattcgttattgctaccgcagcttatttcgctgcctctgctgctactagtattaaacttgacagccgttacgtaatttgttagttctatcc

SEQ ID NO: 25358 - DNA, 1078 bp, Oryza sativa
  ref <308>: DATABASE ACCESSION NUMBER: AK100800
  ref <309>: DATABASE ENTRY DATE: 2002-08-28
gatttttgctttgctttctttgctttcctctcctctctcgccgcccacctcgccgtcgccgccgccgcgagggccaacgccggcgaagtccgcgagccgaagcatcacacagctgcgccagcgatgtcggtggagacggagcggagctccacggagtcgtccgccgcgtcggggctcgacttcgaggacaccgccctcaccctccgcctcccgggctccctcgccgccgccgccgcacctgaccccgaccgcaagcgctcctccccctcctcctccgacgccgccgacgccgcagacaactcctcccccctcgccgccgccgccgatgctccccctgctcccaaggcgagggtggtggggtggccgccggtgaggtcgttcaggaagaacgcgctggcggccaagttcgtgaaggtggccgtggacggcgcgccgtacctgcgcaaggtggacctcgaggcctactccggctacgaccagctcctccgcgcgctccaggacaagttcttctcccacttcaccatccggaagttcgccgacgacgagaggaagctggtggacgcggtgaacgggacggagtacgtgccgacgtacgaggacaaggacggcgactggatgctcgtcggcgacgtcccctggaagatgtttgtggaaacttgccagcgccttcgtctcatgaaaagctcagaggctgtcaacttagcaccaagagccgctcaatgaggcattcccggtgcccatgaccgtgtggttggattgaaagaaagtggaagctttgccccgccgatgttcgcccacgtgtgatatgaacatgtacagttgtctcctactacttttggttccttgatgatgctgagttgagaaaaaggttgtagtttcgttactcgtctgtagtctctccatatatagataatgaagcactgaagcttgaaatatacacctacagtttgtctctttatgaataagaccatatacgcaaaaaaaccgatgttctttgctgcggctcgcgtgtcgtcaggctatatgcagttttttgtcgcaccataggcgatggacatctctggccttatactttcgt

SEQ ID NO: 25359 - DNA, 1009 bp, Oryza sativa
  ref <308>: DATABASE ACCESSION NUMBER: AK100801
  ref <309>: DATABASE ENTRY DATE: 2002-08-28
gcccatgtgtcctaggttagctagctgatcgattagcctcgtcagctacaagtgatcgatcgatcgatgtcgtggtggatgcggcaaagaggagtgagaagccaacccaagatgatgatggcggtgagaggttgctgctgccgggaggtggtcgtggcgcgagccgtgtgattgcctgctcctcctccgatcctgtgtgtgcatgcgtctccgtgcacggcgaggatgtgcgccggctgccgtgtcgccgccgccgccggagtctcgtcgtgagagaagcaaaagatcgaacacgttgtgtgcgtgtgtgcgcgcgcctagctgaagctcagtttctttggttggagttgaagccggccggctagctagctggccatgtggagcgtggcgtcgctcgtccggcaggggctgcggtggcggcggcggcggcggaggaggacggcgcgggtggtggacgagagcgcgctcgcggcggcggatggtggcgacgccgccgcgcctgcaggtggcggcggcgacgcggcggcggtggcggtggtgccgatggcgagcgtgggcgccgcgcttgccagggcgctgctggcgctggcgtgcaccatccgcttcgacggcgaggacggcggcgccggcgcgacggaggaggcgtgggcggccagcgggtggcggccgcgcgccgacgaggtcagccacctcatggtgcgggagagcatgcgctacgccatctacgcgtagccacagtagattaattaagtaacttaattactaggagaggttaattaattaagcacgtatatataattatatatacatggagcatatgtatttgtgtacggtttggtagggtacgtgatcgtatacgtatgtaggttgtgatgctgtatagtacatcactgtatagagtacgcgtgatgcatcttggatgtacgtgtaggtcactactactgctactacaagcgccatggttcgtgactggtttgtcttgcctatgtgacattctgagtgattcatg

SEQ ID NO: 25360 - DNA, 2509 bp, Oryza sativa
  ref <308>: DATABASE ACCESSION NUMBER: AK100802
  ref <309>: DATABASE ENTRY DATE: 2002-08-28
ggcctgaccacacaagcacaaagcaagcactatcaccaaaaggatcagagaagaaactgatatcactatctgatcagtgtagcattgcagcctctcttcttggtaggagtgagctagcacagtgaagagctaattaagccatttgtgtgagcttgcgttgagtgagctctgagctaatatggatgttgagtcaaggcaaggccccaagggtggtgacaccatggctgcctccgaggtctccgtggactggaggggcaggccttgcggctctcgcaagcatggcggcatgaaagcggccgtctttgtgctagggatccaggcgttcgagatgatggcgatcgcggcggtggggaacaacctgatcacctacgtcttcaacgagatgcactacccgctgtcaaagtcggccaacatcgtgaccaacttcattggcaccgtcttcctcctctccctcctcggtggcttcctctccgactcctacctcggaagcttctggaccatgctcatcttcggcttcgtcgagctctccgggttcatactgctggccgtgcaggcgcacctgccgcagctgcggccgccggcgtgcgacatgatggcggcggcggcggcggaggggggatgcgaggaggcgagcggggtgaaggcggggatcttcttcgcggcgctgtacctggtggcgctggggagcgggtgcctcaagcccaacatcatcgcgcacggcgccgaccagttccggcgcggcggcggcggcggcggcgacggcgatggcgacgatggcggcgacgggaagcggctgtcgagctacttcaacgcggcctacttcagcttctgcgtgggggagctggtggcgctgacggtgctggtgtgggtgcagacgaggtcggggatggacgtggggttcggggtgtcggcggccgccatggccgtggggctggtcagcctcgtcgccggcgtcttcttctaccggaacaagccgccgcagggcagcatcttcatgcccatcgccaaggttttcgtcgcggcggtaaccaagaggaaacaagtgtgcccatcatcatcgtcgacgacagccgcctcgcatgctgtgatccccgccaccggtgccgcccctgtccaccgcatcaacaaattcaggttcttggacaaggcgtgcgtgaaggttcaggacggccatggcggcggcggcgacggggggaaggagagcgtgtggccgccgtgcacgccggcggaggtggagcaggtgaaggtgctactgtgcgtggtgcccatcttcgcgtgcaccatcgtcttcaacaccatcctggcgcagctgcagacgttctccgtgcagcagggctccgccatggacacccgcatcggcggcggcggcggcggcgccgccttccacatcccgccggcgtcgctgcaggccatcccctacctcgtcctcatcgcgctggtgccggcgtacgaggcgtgcttcgtgccggccatgcgccgcgccacgggcgtggacaccggcatcaccccgctccagcggatcggggtcggcctcttcgccgtcaccttctccatggtcgccgccgcgctcgtcgaggcacaccgccgccgccacgccggcgacgggctcctctccatcttctggatcgcgccgcagttcctggtgttcggcgtgtccgagatgttcaccgccgtggggctcatcgagttcttctacaagcagtcgctctccggcatgcaggccttcctcacctcaatgacctactgctcctactccttcggcttctacctcagctccctcctcgtctcgctcgtcaacaaggtcacctcgggcgacggcgccggcgccggcggcggcggctggctcagcgacaacgacctcaacaaggacaggctcgacctcttctactggctcctcgccgggctcagcctcctcaacttcttcaactacctcttctggtcgaggtggtactccaagagtgtggagacgaccgtgcaggtcgccggagttggaggagaaggcggcggcggcgagcagcaggaggagaagggtgttgacgaggtcaacatgggtcactgacatgtgggttcgaaccgcacgtctagtatgttaggtggattattaatcatttaacctagtcttaaccttttttttatggtttttccttgtatggaaaaatattagtaagggtggatgtatatgagtccccacctaattaaggagagtgtgtgtgatgtataaattaattaatcaaaagggattaggtgattattacttagtaatgatccctgattaggtcaagtcaaaaggtagtagttctgagtttgactctgcaaggatgcaagagtagtggtatttgggtagggatcaagtgatcaagtacgtatctagtccttttctttaatgataaggagctagtatatatctatgtactttatatatgtagctatcatgtaaatgacaaaaggatttgccataaaagcaaagtactgataatagttggtgcaaaaaatactttcactgttgatc

SEQ ID NO: 25361 - DNA, 1389 bp, Oryza sativa
  ref <308>: DATABASE ACCESSION NUMBER: AK100803
  ref <309>: DATABASE ENTRY DATE: 2002-08-28
gaaggtcatccgccccgtcggccgcagcggcggaccgacagcagatggcagcgttagtggagcaggaggcgaggataggaccttctcgtcgtccgacatggccggcgacggtgcactcgaccattgccggtagcagtgtcgaagctatagggggtgccgaactgggcctggcaccccccaatggcccatgaacgattccccacccccgacaaagcccatctggccatctgcgcagctgcccagcccattagcacttggagtctcgatatacgggagagagtcaagcgatacctcggcttcgtcgtgaagtcccatcgcttgcgagatggctaacgggcgatcgctaggggccggccttcagtttctcaagcacgcagcaccgacgcatcgtttccggtctccctcgtcccgtccggcgctaatcggcgatcagccgattgcagtctcgtggcgacgcggccagccgccgatagagtggctgctcgaggcaccaagcaggagctaggagcaagcaatccaacagaggtggtctgcagaacatgcgcacatcttctgagctcacggaccaggttccacctatctgttggctgctgctttttgctacatcaaaattgctaggtgtttagctaagatgaagaggaagataacaacgattgattgcttttacaagccagtggctccaagggcaggctctgttgaaaaatcctaacccaactaatgtggaagctgttgatccggttaatctgcaatctcctaatcagaacagtgctgaacctttagagctgaacaaggaattgtaactacggcatttgaaagggacccaggtggttaacatttcaagggtgtccatttagaggccataatgaatctctaaattcgttaaatcgagataattttctcgaaatggttaagcttttggcttcatatagcaaagatgtgcgagaagttgtgctagaaaattctccaagaaatgaaaagtatacatcatccgatgtccaaaaagaaatcctaagcataattgctcaaaaagtgcaaaaatcagttagagaagaaattggtaatagcaagtattgcataatggttgatgaagctcgagataaatctaaaaaagagcagatggcaatagttcttcggtttgtcaacaaaggacttataaggacacttcttcactgactcttaagaactcaatttgtgctgtcttgtctgacattaactttttacaagacataagagggcaaggttatgacggggcaagtaacatgagaggggagtagaatgggttgaaggcactaattctcaatgagtaaatgcatatagaacacataataaaaaatgtgtaccctgtgctgtaacgccccgattttcgttcgggaataaaaatcaattaat

SEQ ID NO: 25362 - DNA, 1242 bp, Oryza sativa
  ref <308>: DATABASE ACCESSION NUMBER: AK100804
  ref <309>: DATABASE ENTRY DATE: 2002-08-28
gctgcaccaccctaccggccacttccactgccaatgccacagcttcctttcctggttcccgatccctccctcgtcatcaagccaactccatcgttccatcatcaccaacatttgcagcaacactgtgaacaagctctagttgcatcagctatacgtgctactactatataaaactggcgccccagcttatacaggttcgcacaggcaacatatacatacgtgcgtgacgacgtgtagtactacgtgagatcgatggtgcttccaaccatcctccccaagatagccgcgcactggctcttcaccttctaccgcgcggcacgtaagctccgcggccatgcgttccagtactgccgcagctcctccgccactactaccaagccgcctccgccgtcgcccgtctcgccagcggccaagtgcaccgtcgtcttccccgacgccgccgacaaggccgtggtgttcggcttcgacggcgcgctcatgaggtccgcggcgctcttcccctacttcatgctcgtcgcctgcgagggcggcagcctgctgcgcgctctgctcctgctctgcgccttccctctcgtctgggcccttggcgagcgctccgacgccggcgtcagggtcatggcgttcgtcaccttcttcgggctgaggccccgcgacatggacctcgtggcccgcgccgtcctgcccaagttctacatggaggggctcaacgcgcaggtgtacagccgcctctggctgccggcgaggaggaaggtggtggtgacgggcgcgccgagggtgatggtggggtggttcttgaaggagtacatggccgccgacgtggtggtcggcggcgagctgcatgttgttagggttggtcgcggccgctacttcaccgggatgctgtgtgggccaggaggatcggcggcgccggcgctgaagcacaaggccctgcaggcagaggcgttgggaacggacaacgccatggctgacgtggccgtcgtcgggaacgccagccagctcgaccacccctgcttcccatactgcaaggaagtttacgtcgtgaacagggagagcaccaagaccgcgcggctgccgcgggacaggtacccgaagccgctcatcttccacgacggccgcctcgccttcctcccgaccccctccgccgcgctcgctttcttcctcttcctccccctcggcgtcatcctctccgtcatccgcatctccatcggcatcctgctcccctacaagatcagcttcggggcc

SEQ ID NO: 25363 - DNA, 1165 bp, Oryza sativa
  ref <308>: DATABASE ACCESSION NUMBER: AK100805
  ref <309>: DATABASE ENTRY DATE: 2002-08-28
gcgaggaggacacgcacgttgccaccacaggctacgcaaaattctctcccttcctcctccaccacctccactccgacgatcctcctcctgatcctgtgccggccggcgatggcgtaccggttgctggagctcacgctggtctccgcgagcgacctcaagaaggtcactctcttctcgcgcatgcatgtctacgccgtcgcctccatctccgggagcaacgtccccatgcccatgcacggcacccacgccgaccgcaacggcggcagcaaccccgcgtggaacaccgtgctccacttccccgtccccgcccgcttcgacacccgcggcctcgccctccacgtccagctccgcgcccggcgctccttcggcggccaccgcgacgtcggggacgtgttcgtgcccctcgacgacctcctcgccggcgcgcacgacggcggcgagccgaggccggctagctaccaggtgcgccgccccatgtccgcccgcgcgcacggcacgctctacttctgctacaggttcaccgacgtcaagcatcccgccctcgaagccatcgaggccgcgaccgcgaccgcgacgagcagcgccaccaaacaagggcagtacgtgcccatgtacgcgcaggactctgatgagaaggcgacggagaagagcgtgtcgtcgccggtcaccgcctacccgccgccgtcgaacgccgtggtagcgcacccgccggtcgtgccgtacggcgcgccgtacggaggagggtacccaccgcatcagcagcagtacggttacgcgggtcagccgccgtacgcgtacaacgccggcccaccgccgccggcgacgtacagctacgcggcggcacaacagccggcggcgaggaaaggtggacgaatgggcatgggcctcggactcgggctcctcggcggcgcggtcggcgggatgatgctcggggaaatggtcggcgacatggaggctgacgccgcctacgacgccgggttcaacgacgcactggaattttaggtcttttgtcgtgttttcctgtgtacatgggcaatgcacctgtataaatttgtcacgtgcataagaaatttcacgatccaacaatgggaaacgcgatgtcaggccacaagggtaagcagatcctaaatcaacgctatatatatatatatatcatccagtacgt

SEQ ID NO: 25364 - DNA, 1636 bp, Oryza sativa
  ref <308>: DATABASE ACCESSION NUMBER: AK100806
  ref <309>: DATABASE ENTRY DATE: 2002-08-28
gtgcactcatgttactctttgaatccttattattatctcatatttactctattttgcactatatgttgtgatttaaagctctgcttgtgtaaactaaagcattgttctttggtctcgaatacttcatatggtgcaggcaaatacttcatttcttcatattgttcaactgcaactgatttggaagtccacagataacgagatgtgacagatgggccattaagaactctctaagtccgttctatcaaatgtaaagtaagatgatatacccttcccagtattaccttattatatttacctgtcttcttttattgacaaaaaagtcatgtgaatcatggagtggaatattaaacagccactgcatatagcattgcattatctggatgagttatcatcaagcatcatcctgctatttctaatcagcgttgcacatgtatttcatcaagctcctctgttactttctggctacatgaagtggagttactaatatattgctatatgaagtgaaagtttcttcctgctcaaaaaactactactataataaaatggctaaatatgccaattttctaccactaccgaatctgaagttcaactgatgtgctttatttccatgttagccttgatatggtcagcccaccagtattaagattaacaaattgcatgtcatatttgtgagaactgaaaccgcttcttttgaaatgggctctaattgttgaaatatgttttttttcatgtctgtgcatgattggagtatctattttttttcggctgtactgaaatttggtttgcgatttaacctgtgaaaaatatttctttgcactgctctatatcttttattttgaaagcaacatcccgaggatgaaggctcttgtactaaagaaaatctttagttcctctccttgcaattttttcggttcttctttttgtttcgattaatgaaaccaaaaattcttgaattgaaggaaaacaggtagctctactatgtttatggtctttcctattgaagtaggaattcataggtgtgtagcagtgctcagcgattgcacgaggttggttctccacttctctgcatcagattggatatatttcaattgcttggattttgatctatactgacttccttttagctaaaacttgattactgataacaagttctacacagtgaaggggatgcaaaagatggtgtctccacctctgactccattcatgtaatcatgttcatggtctgctccattgagtttatttttactggatgcacatccttccattagtagttcttgcatgaaactgcaataagtagcattcatatagcattctgttgccagtatcttcagtaaagcatgtattgtcatttgcttacctcttttgtgttttcttcttttgatgtgtaggagaccaaaaaacaagcgtgtacaaacgatggaaagagaataaactatgtcaaacgatcaagattgcatcgctcatcttttgccacaaacactgcaagagagattgatttacatatagtgaatgaatcaattctatagtctcaaagatttatctcttggttttctttagatgggatgcgtctcagattaagttttatgtaaattttaagttgccaaaataaacaactaaaataaatctttatgctgcc

SEQ ID NO: 25365 - DNA, 4867 bp, Oryza sativa
  ref <308>: DATABASE ACCESSION NUMBER: AK100807
  ref <309>: DATABASE ENTRY DATE: 2002-08-28
gtttcggttaaaaaagatctgcgcttggatgggccgtaaaagcctcttggcctcctcgtctcgccgcattgcccaagaccagccctgccacgtgcgcagccaccggcgagtcggcggcgacctcgctctccggccttctccccccctcgccatcgccggccgcgatgcgcaactccggcgaactgatcctcccgggttgcccgcccccgatccgcgtcttctcagcctccattcaccgtcggtgtggtggcttggcttcgctcgcatcacctcacctcgccctcgtcgctggcgtcgctcagattcgatccaccttctgatgatccccttcccccaaatcaatagtcctgttccatttgttttttcggtcttgaactattagattgttcctctgattcttgatgctagtatatttatttatagctgtatagtttcaacttaatgtgcactgcatatttatgatggataatgcaatgttcatggcttgatgcaaccacagagttattaagacctttgttgatgttcttctcccaaacagcatgtatacaagggggtttgattttcatttcactgttacctttggtaaccaacaattgcagtggtaagtttattaagggttaaaattttccagtttatcccaagcaggccagttatttagtagttttaatccagtgcaattaaaagaagttaccctactactacattttccttcttccactgtgtgattgtttttttggtcgtgtgtgctttggtgtagaagccggatgctttccttttctaaatgaaatccccataatctagtatcagtgtactaaaggaaaataatactacagatacaactttctactatggtataacccgtttacagacgagaaaccgatgtgtgatcgcacgaagataagcacaataacccttttccaccttttccctttgattagtgaatctttatgttattcttgtttttgatgcttttcacacgaagataaccttttctttttgtacagaataaccaaagcaaaagaagagtggttgagtgcatgtcggggagagtgtgtgcctatattcctgaggattgatgttgtggcaaggtagctgggcaggacaggcatcggttccatgctctagtttcaaggaagacatcgctccaagtgcacggtggctgcttttgctgcgataatcccataacatacatcaacggagctgaccgatgtaagaagccaacattaaacactgctagttaccagcagagccaccctgaaaagctgaaagcaagaaaaaatctgagagaagagcaagctgacatacatcatggagatgatcctggatgcccttgcatcctacctcggcgagcagttcgccaagatggtgaaagacgaggcagggatgctgcttggcgcttctggcgaggtcgagaagctgacaggcatgctgagcaggctcaagaagttcctggccaacgcggagaggcggcacatcaccgatgccaaggaaggagaatatgtgcatgagtgggtgaggaagctcaaggatgccatgtacgacgccaccgacatcgtcgatgacgttcatctcaggtcggagcagcggcgcgagcggtatgcgtctccgtatccaggcagctgctccaactcctccttgctctggtgcttgcaggatcccctcttcgcccacaggatcggaagccgagtgaaggagctcaatgagaggatggatggcctcttcaagcaggctgaagctgaccagcaggctgacactgaccgactcaaatccagctcaacccctggcaaccctcatagtggcaaccctaggaggacagcccccgggatcatccacgaagacatcgtcggtgacaagattgaagaagataagaggatgctggtggactggctcatcaaccatgacaagaagtatctggtggttgccatccaaggcgtcggtgggatcggcaagaccacccttgccaagaagatcttccatgatcaggcgattcaagacacctttgatgtaaagatatggttgagtgtcactcaggacttcaatgaggctcatcttctcaaaaccgccattgccatggcaaagtcagataagcaacaaatccctgccgttgaagacatggccctgcttgaggatgccctggtggaagccctgagaggtaagatgctgttgctggtaatggacgacatgtggactgagaaggcatgggacaatgggctcagagtcccaatcaccaaagcctgtgctccagggacttgtgtccttgtaaccacaagaaatgaagatgttgctaaagtgatgaaagctgctcacacgcaccaagtcaccaaactaagactcgatgattcctggacattgctccagaaacaggctgccttgagtgtatcagagatcgagatagtacaagaatgtgggatgaaaattgcagaaaaatgtgatggtttaccactggcaattaaagtaataggagttgtcttatgcaagaaaaatgcaacaaaaatgcaacaaaaaatgcttgggaagaggttttacgcaatcagatatggtcaaaaatgggacttcctgaagaactaaacaaggcaatatacctgagctatgaagatctgagccataacttgaaacagtgctttgtgtattactcactatttcctaaagatgaaatcattggtattgacaaaattgtttccatgtggatagctgaaggattcattggtaaagatggatattccgcacagtcagctggtctagattactacaaggagttaatcaagaggaatcttttagaacctcagaatgactactacaatgaagaacattgtatcatgcatgatgttgtacactcctttgctcagcatgttgccagggatgaagcactggtgcttcgggacccacaaaacaatggaattctctcttcatcaaaatttcgtcggttatctatatcagcagagcaaatagagtggagcaatttacagaatcagcattgtctaagaacattgatattgttcggaaacatcaagttgaaacctggcgattccttgagaattcttccatctctacggacaatacatgtaaggagttccaatttttctatattgcaggactccttgtgtcaccttaaacatttgagatacttggagctaaggtacacagatatatctgaactgccccgcaacattggtaggatgaagtttttagagcacattggtgttcgtggctgtcaccggttgtcaaaacttcccagcagtatcataaagctagataatttgagacacctcagtattgatgagacaaaaataagagctattccaaggggttttagcagactattaaatttggatgtgctatgggggtttccggttcatggtgttgctcagggcactgcaaagcattactgtacattggaagatgttggccctgtttcgcagcttaggaagcttaaattaaaaggtctggagaatgcaccttctaaatcggctgcactagcggaacttgggaccaagagtaggctgacatgcctggagttatggtgctcaaatgatgagaccaaagatgccatcgtcacggttgagcaggaacaaattaaggagttgtttgatctacttcgccctgcagaatgcttagaggagctaactattggaggctattatggtgacacggtcccagattggattaagatgccagaggcagccatttttaaggatttgagacggctaaacctacaaaacttggtttcttgtattcaactcccagatggtttaggtcagctccccaatttggactttttcgtagtcgatgatgcaccctgcatcaagcaaattggacattgcttgctctttgaacaaggacaaagaaatatggacaacaagaagagttcaagacatgttgcatttccaaagttacatgagttgcatcttaaggggatgatggaatggaatgagtggacatgggagaagcatgtggaggccatgcctgttctaagcgtgcttcatgtcaaagactgcaacttgagccatcttcctcctggacttccttaccaggcaagggctttgaagagattatgcgtaataaatgctcggaacctaaactccgtggagggtttcagctcggttatcaagcttgaagtctatggcaaccctaatctcgagaggattgttgatcttccaagcctgcaaaacctaaccattgtgaactgtccaaagctgatgttgttggatggtgttgcatcagttcagatcatggaacttggggaccacgggatggaaacgctccccgagtacctgcgacatctgacgttacgacatttgaagattgtttgcagcttgaatctgctcaggttgatgtcgaccaagcatgatgcaagcaggtcagagtgggagaagatcagccatatcatgcatgtggagggattcgctagcgataacggcgacggcatcttgagatggtacatgtcctacacaagagatccatacaacctggagacaaacattacaagcagatagctccacaccaccagaaggtgcatcagaataaaatgcgaagttgagggaagaacgcgatcgtgatgggaaggatcaacaggtaaattaatcatgaaatgcctgattcggccaagatgatgcctgctaactcagctcgttgaggatttctcttattcttgtgcacaagaaggtgatggaagaattggcatgggaggcaggaggattgaggccatgaattctatcacacttaaaaatatatcattggcccaggaagtgccaaatttctcagtttttatactcctactacatagcgaaagtactacttacaaaagaaaacactgtaaataagaacagttgtgttcatatgcaaacagaaactatatatattatcagcc

SEQ ID NO: 25366 - DNA, 1657 bp, Oryza sativa
  ref <308>: DATABASE ACCESSION NUMBER: AK100808
  ref <309>: DATABASE ENTRY DATE: 2002-08-28
gagagttgggtggccaagaacaagaacagcaaagcaaccatgacccaagctcactcaaaatcttgcttccaccagttctgggatggactccagatcaagaggagcagcgatagcttcactgtagagctactgccatcccttggtgcaactataaaccactccaacaagttgcagaagttcatcatatcgccttatgatccccggtacagatcctgggagctgttccttatagtcctagttgtttactctgcctggatttgtccgtttgaactagcattcctgagggacttaccatctaagcttttgctagttgagaacattgtggatatattctttgccattgatattgttttgacgttcttcgttgcttatgtcgatagcaaaacacatcttcttgtggatgaccgaaagagaattgcaatgaggtacctatccacttggtttatctttgatgtatgttcaacagcaccatttcaaccaatcatccttctatttacacacaaggggaatgacattgctttcaaggtactcaatttgctcaggctgtggcgtcttcaccgagtcagttcactatttgccaggctggagaaagacatccgattcaactatttctggactaggtgctcaaaacttatttctgtgaccctcttcgcagtacattgtgcaggatgcttcaattatatgattgctgacagatatcccaacccagagaaaacatggataggagctgtgatgtcaactttcagatcagagagcttatggactagatatattactgctctttactggtccattacaacactgacaacaacaggatatggggacctacatgctgaaaatccaacagagatgctatttgatattgtctatatgatgtttaatctgggcttgacagcttatctcattggcaacatgaccaacctagttgtccatgggaccagccgcaccaggaaatttagggactcaatccaagcagcatcagagtttgcagcacgcaatcagctacctgagaacataaagcagcaagtgctatctcacttctgcctacaattcaagacagagggactcaaccagcaggtcatgttagactgtctaccaaaaggaatccgctcaagcatagcatacagcttattctttccgatcatccggcaagcctatctcttcaatggagtatctggcaatttcattgcagaactggtcatggaagtgcaggctgagtacttcccaccaaaggaagatataatattgcagaatgaaggagaagcagatgtttacatagtagtttcaggagcagtgaatataataacaacaatacatgggaatgagcaggtatatgagaaaattgcagagggagaaatgtttggagaggttggttctttatgtaacataccccagccatttacttgccgcacagcggagctatcacagcttttaagaataagcaaaacaaggcttagagagatcattgaagaaaacagggaagacagtaacattctaatgaacaacctagttcagaagctgaagctacgagaaagtttacctgacatgaatcaaccagaccgaagattcttgagcaagtatgagctattccacgttcctcgagaagcatggctgctgaaaaagtcacaactacattacacagagcacacaagtaggg

SEQ ID NO: 25367 - DNA, 2499 bp, Oryza sativa
  ref <308>: DATABASE ACCESSION NUMBER: AK100809
  ref <309>: DATABASE ENTRY DATE: 2002-08-28
ggtggagactggagacgggagagaggagtaggtagcaaaccctcctcttcttctcttctccttcgttgggcgtgggcgtcgcgagaggcgagatggcggcggcgacgttggcggcggcgagcatgggggtggtgacggaggtgctggggagcgacgtcgtcgacgaggtcgaccagcccatcatcgactacatcgccaacgtcctcgccgacgaggacttcgacttcggcgcccccgacggccacggcatcttcgacgcgctcggcgacctcctcatcgacgctcggtgcgtcgccgacgaggagcactgcctcgaggtctgcagtaagatttgtgaaaaatttggaaagcatggcctggtaaaacctaaacaagctatgcgaagccttgtcactcctttacgtatgaacgagggaatggacgataaggttgcccccaaaaagcaagctgatgtatttgatggacccttgctttcatcacgtgacaaagccaagattgaacggaagaagagaaaggatgagagacaaagagaggctcaataccaaacgcatgttgctgaaatggaggcacttagggctggaatgcctccagtatttgtaaatcacaataactctggtgggccagctgttagggatatccatatggagaacttcagtgttactgtcgtggtcgtgatctcattcaagattgcactgtaacacttgcttttgggaggcactatggtcttgttggaagaaatggtacagggaaaacctcttttctcagagctatggcgatgcatgcgattgatgggattcccaagaactgccagatattgcatgttgagcaagaggttgtgggcgatgacacaacagctttgcagtgtgttctgaatgctgatattgaacgggttcaacttttgcaagaagaagctcatctggttcaacggcagaaagatctagagtatgaggctgagtttgagcagagcgcgtccaaaagcaaggatggtcttgacaaagatgctatcagcaagaggcttgaggagatatacaaacgccttgagtttattgatgctgatgctgcagaggctcgtgcagcatcaattctggcgggtcttagtttcactcctgaaatgcaacgtaaacgcacaaaacagttttctggtggatggcgcatgagaattgctctagcacgtgctctcttcattgagcctgatttgttgctacttgatgagccaacaaatcatcttgatctccatgctgtgttatggttagaaacatatctcctgaaatggccaaagacattcattgttgtatcacatgctagggagtttcttaatacggtcgtcaccgacattcttcatctgcatggacaaaagctacatgcttacaaaggtgattatgacacattcgagaggacaagggaggagcaccttaagaaccagcagaaagcttttgaaacaaatgagaaggccagatcccacatgcaggcattcattgacaagttccgttacaatgcaaagagagcatcacttgttcaatcaagaatcaaggcattggagcgaatggagcatgttgatgcggtcgtcagtgatccagactataaattcgaatttccaacaccagatgaccgccctggaccaccaatcatcagcttcagtgacgcatcttttggttatcctggaggccccaccttatttaaaaacttgaattttggtattgacctggacagccgcatagcaatggttggtccaaatggtattggcaaatccactatacttaaactaatatctggagatcttcagccaacttcagggacagtgttccgctctcccaaggttcgcatggctgtattcaatcaacaccatgttgatgggcttgatttaacagtgaacccccttttgtacatgatgagatgctaccctggtgtacctgaacagaaactgagggcacacttgggttctttcggtgttacaggaaatcttgccctccaaccaatgtacactttatcaggtggtcagaaaagtagggttgcctttgcaaagatcaccttcaagaagccacacattattcttctcgatgagccttctaaccatcttgatctggatgctgtggaggcgctgatccagggtttactcgttttccagggaggagtgctaatggtaaaactaagatcgttcattttggtgtaaaagctgatgacttggcatcattctaattacaagctatatgggtgacttgttatcttttacaggtgagtcacgacgagcacctgataacggggagcgtggatgagctttgggtggtgtcggaaggcagggtgtcgcctttcgcaggcacgttcaaggactacaagaagatgctcaagtcttaatctagagccagtgatgatatatatacagagacagcgagtctacaaagaaagacaccaacatatatatctgtatcgtgcagcaccgatgtaacatttaccggcctgaggccaaatcatcatttatgtttatttcatgtggatttactg

SEQ ID NO: 25368 - DNA, 1310 bp, Oryza sativa
  ref <308>: DATABASE ACCESSION NUMBER: AK100810
  ref <309>: DATABASE ENTRY DATE: 2002-08-28
gaggccctgtttcttgacagaatatttgtgatgccttcaaggttgtgccttaattcagtgcacaatacaagggggattattaatcaaagcgatgcgacttccaataaaagtggcaggtgggaaacaagttcatgtgcgatggaatctttgtatgacatagacctcatatcaagaactgttcctgttgttttggacaatccacaatcatggtatgctatagtatcaagaagtacgaagctaggagaggaaggagatgtagcacatgcacaaggagttagcagacaagaactcaaagaaaacacactttactcaaaggcattcctcataaaccgcaccgcaagtcctcttgcttggtttatggagtgcaaggatcggaccaagcgtagctctgtgatgttaccatacaattttctgccatctatgccagcaagaaaactgagggatgcagcaaacaagattaaagtgatacttggtgactacgatgctattcatgtaagacggggtgatctactgaagaataggaaagatcgatttggtgttgagcgaagccttcatcctcatctggacagagatacccatcctgagaacatcaaaagaagaattgcaaagtggattccgcgaggccgtactcttttcattgcttcaaatgaaaggacaccaggcttcttttcacctctatcagacagatacaagttagcatactcatcaaacttcagcagcatattggagccagtaatcgataacaactatcagctgttcatggtcgaaaggttaatcatgcaaggagcaaggaagtttgtgaagaccatgaaagaattcgataatgacctttctctttgcgatgaccctaaaaagaacaccaaagtctgggaagaagcagtttatacagatggctgatggttcgtatttgaccgtatttgaccttccattgcatatgaagtacagctcgcaaactatcactaatggttttgcatagataatagtataatactgtcatatgaatatatatgattaaaaagttttacttctgatctgaagttacactcaagctaggacactcaagtcaaccgacagaacaaggggaagcatgcatgtttcctttcttcagacaagagatgttcaatttgttcctctctcttttttctttgatacacctgggaagagactatatatgctggtgtgtgatgtaacttcatcgtggttttgatttaaaccaaattgtagtgtatatgtaataggcaattacctatcagctaatggtgaatacatctgtaattaatttgtcaatctggaaattgattcctttttgg

SEQ ID NO: 25369 - DNA, 1225 bp, Oryza sativa
  ref <308>: DATABASE ACCESSION NUMBER: AK100811
  ref <309>: DATABASE ENTRY DATE: 2002-08-28
gaccccgaccccttcaatcgcgcccgcctcagccgccttctcttctccagcgtccgatctccccctctcgcctctccgcctcacctccgctccgcttcccacccccgcttcctctctctctcctctccccctctctctctctctctctcctcctcgcttcaccacctcgcgcccaacccccctctctctcctctccacgtcgcgccctctccgcgcgcgcccgcgcttctatataaggaggggggaggtgggatggcggatgggccggggagcccggggggagggggggggagccacgagagcgggagcccgagggggggagggggaggagggggaggtgggggtgggggtgggggggtgagggagcaggacaggttcctccccatcgccaacatcagccgcatcatgaagaaggccatcccggccaacgggaagatcgccaaggacgccaaggagaccgtgcaggagtgcgtctccgagttcatctccttcatcaccagcgaggcgagcgataaatgccagagggagaagcgcaagaccatcaacggcgacgacttgctgtgggcgatggccacgctgggcttcgaggactacatcgagcccctcaaggtctacctgcagaagtacagagagatggagggtgatagtaaattaactgcaaaggctggtgatggctctgtgaaaaaggatgtacttggttctcatggaggaagcagttcaagtgcccaagggatgggccaacaagcagcatacaatcaaggaatgggttatatgcaacctcagtaccataatggggatgtctcaaactgaagataggaccttttcatgcaactgttgctagcgcaggtggattttatttggtgctgcagtcgttagctaatatatatacctacacctcatggtgagcagtgaaggaagtaacttgctaccacctctaggtcccatgtttgtcaaccaggaactgatgctgcttggaagcgtcgagccaaggctgcttctcagatgtaaattactccccgtgaggatagtttcggttcgtggtctagctctgttgttgtatgtatattcaggataatttaacaattggtctttggctgtcattcggttccatataatctgtattgggaggcataaatattcatgttgtatttcgtcctgaactagcgtgttgtactattgagaaatagatgctctctgtaatggtagcaattttactctgattccc

SEQ ID NO: 25370 - DNA, 1353 bp, Oryza sativa
  ref <308>: DATABASE ACCESSION NUMBER: AK100812
  ref <309>: DATABASE ENTRY DATE: 2002-08-28
gagtgcatcgcaaatatcacatcaccgaattctcccgagctccggcgacgtggtcgcgcattcctcttctcgccggcagactcgccgccgtcctccgccgcccctctcgcggcgcagcgattcgtctccctcctccgcaaccgcgcccgagctcccccctcctccccgcatccggtggatggcctcttccgcgccgtccgcggcggcgggggcgaccccgccggaccccctccgccgcgaccgcatcctctccagcaagctctacctcgacgtcccgggctccaaggctccggtggtgtactcgccggcgtacgacatcgccttcctcgggatcgagaagctgcacccgttcgattcctccaaatggggccgcatatgcaagttcctcaccaaggaagggcacctggagaagaaccgagtggtggagccattggaagcgaccaaggacgatttgctggtggtgcactcggagtcgtacttgaacagcctcaagagcagcctgaaggttgcgtccattgtagagcttcctcctgtggcattcattcctaattggcttgtgcagcaaaagctactgtaccctttcaggaaacaggtgggtgggtcgattctatcggccaagcttgcacttgagagaggatgggccattaatgttggcggagggtttcaccattgttcggcagagcaagggggcgggttttgtgcatatgctgatatttctctctgcattcagtttgcttttgtccgtctaaatatttcaagagtgatgatcatagatctggatgcccaccaaggaaatggccatgaaaaggatttcgctaatgatggaagagtttacactttggatatgtacaatgctggaatatatccctatgatcatgttgctaagcggtatattgatcaaaaagtcgagctagttagtgggacaaagacagaagactacttggatcaacttgacaaggctcttaaggttgcagaaagtagatttcagcctcagttgattgtttacaatgctgggacagatatcctggatggcgatccattgggaagattgaagataagccctcagggcgtggtgatcagagatgagaaggtgttcaggtttgcaaaggatcaaagcatcccactactcatgttaacatcaggaggatacatgaagtcgagcgcccgagtgatcgccgactcgataatcaatctctcgaataaaaacttgatagagcttggtagccagcttggctgaacgagtgcttagcctgaatcgacagatcgcagatctactggatgtatatatcctgtctataagaggcttacactaatgtgataatggtattaatataagccacaaaaatcgttatc

SEQ ID NO: 25371 - DNA, 2583 bp, Oryza sativa
  ref <308>: DATABASE ACCESSION NUMBER: AK100813
  ref <309>: DATABASE ENTRY DATE: 2002-08-28
gtatttccactctctcctctcctctcttggactccactcgccctcgcgactccgcccccgccatggacgccctcgcggggcgcctagccgcggcctccgtctccgaccacccctcctcctcctccgccgccgccaccgatggggccaacgccgaccacctcctccacgtcatgcgcgccgtcgagggcgccgaggccaccatccgcaaccagttggaagagaataatcgcctcaaagaggaactgatgcagaaaacgcgacaattgcagaggattcgggaagatgctgcatcccaagcttcttccagtggagtagcccaagaccgccgctcattcgttgctactaagatggatgcgtcaaggtcacctgccagcgctgcgtcctcagataattcccgcaccccctctgcccttcaccacaatggcgcattcgaaagtggagagccttcaatgcagcagaccatcaggcaaaacaatgccctgtccaatggagcatctaaaagatcatcaggggagcagcctgccctcgacagcgctgccgtctcacagttctctactccatcctcccattccctttctcctactaggcatagaaaagaaggcgagcatgatcctaggttgaacctagctggacaggggttattgcctgcttcagagatggcctcgaacatgtcatggaagcatgatcttactgctaagatcaaagaaaatgaggaagagattgcgcaattaagaaaacatcttgctgactactcattgaagcaagcacggatactcgatgataaatatatgttggaaaggcgcattgctcaaatgcggatggcatttgatcagcagcaacaagatttaattgatgcagcatcaaaagctttatcatatagacaagatattattgaggaaaacatccgtctggcatatgcagtgcaggctgcacaacaagaaaggacaactttcatatcttcgttgctgcctcttctgtctgaatatgaaaacctgcagccttctgttcttgatgctcaatccatcgtcagcaatttgaaggttttgtttaagcatctgcaggagcaacttattatcactgaggagaaattaaaagagtcacgttatcagattactccatggcaaactgaattggcgaatgatgccactcttcctgtacactcacctacggatcctcttggaaaagcattggtgacttcaaacaaaagcaacctcgatattgtgacccagacaccgtaccctcatatacaatctccaatgtcttcccctgttcaagttagaggtgattggggtgtagcagggaacaaaaaccgtcaagtcattccaactgatgttcctccaagaaatgttgatcatggtgacatgggaagaaactctctttcaagcaggagggatgtttcttctcaagtatctcagcatgatccacattctgtcccattggactttgagcccgagaatcaaaacccaccattcaagcaccttagtagaagtgacgtatcggatgcttcggagggtgctgaagtccaacatgcacgagaacattctgctcattggggtcatggagactcagttaatttggtatccggcattgaggatacaaacccttcatatccgtatcttcctactgttcttgaggagcctggatcttctttctctgaagctgctgaggatgatccactgccaggcatagagggccttcgaatcacaggtgaagcttttcctggaagagaactccaagcaagcgggtactccaccaatggaaccaccagttgtaattttgagtgggtgcgccatttagaagatggctccgtaaatttcatagaaggagcaagacaacctaactatttggttactgccgatgacgtggacacattactagctattgaagtacagccccttggtgatagaaaaagaaagggggaaattgtaaggttttacgctaatgatcaaagaaaaattacttgcgatcctgaaacaaaggagcttattaagagaactcttgaaactggtcatgtatcttatgaagtccaactacctgtgaaatttttagatatgtgggaaccagctattttggcaataaagagggaaggctacagtattaaatgtactggtcagcgtggtgttgttctcacagagaaatttcagcaagcaacttctattaatattccttacgggcgtccgacagagttcttgattacatctgctgatggtgttgaatataatttaaagcctgcagaaaatgcactgccgcgggataccattgttctggttttaagattgttcagaattatggctgttgagaagaggagaggaagaaagaagagccttttcttcaagtaggtttggctcctataccgtggtgtataatttgtattcgtgattggctggatgtatgtaattaagcgggtgataggtttggcatattctttcggctgtatcttctgctgtaaaggaccataggcgatttaaacacaagggccccaggtgatgggagttttcttcttcttatttttttcccttattccttttagaaacatgagttttgtcgttgcaagggatggaagcgtgccgctgattagaattg

SEQ ID NO: 25372 - DNA, 2506 bp, Oryza sativa
  ref <308>: DATABASE ACCESSION NUMBER: AK100814
  ref <309>: DATABASE ENTRY DATE: 2002-08-28
ggggcgaggaccagtaccaatggagcaaccacggcttgagctcagcagcctgggaggtcaccggagtagcgaaaatccagagagcagagatgagaaaaccgaagaggaggtagacgactgcccgatcgaggaggtgcggctgacggtgccgatcaccgacgacccggcattgccggcgctgacgttcaggacatggctgctggggctcatctcctgcgcgatgctggccttctccaaccagttcttcggctaccggcagaatccgctctacatctcgtcgctgtccgtgcagatcgtcgtcttgccgctgggcaagctgatggctgcttgcctccccaagaaggtgttcagggtgaagggcacggcatggtcgttctcgctcaacccggggccgttcaacctcaaggagcatgtgctcatcaccatcttcgccaacaccggatccaactccgtctacgccgtcggcattatcaccattgttaaggccttctaccgccgggagattcatcctcttgctgccatgctgctcacccagacaacccagctgatgggatatggttgggctggcctcttcagaaagtttcttgtggactcaccttacatgtggtggccttcaaacttggtacaggtttcactcttcagagctctgcatgagaaggagaagaggccaaagggagggacgacgaggctgcagttcttcctgaccgtgctcatcaccagcttcgcctactacattgtgccgaactacctgttcccgaccatctccaccatctcggtggtgtgcctggtgtggaagaagtcggtgacggcgcagcagatcggctccggcgtgtacggcctgggcgtcggctcgttcggcctggactgggcgacggtggccggcttcctcggcacgccgctgtcgacgccggcgttcgccatcgtcaacatcatggccggcttcttcctcatcgtctacgtgatcgtgccggcggcgtactgggccgacgcgtacggcgccaagcggttcccgatcatctcctcccacgtgttctccgccaacggcagccggtacgacgtcaaccaggtgctcgacacggcgacgttcgagttcagccaggccgggtacgacgccgcgggcaagatcaacctgagcatcttcttcgccttcacctacggcctcagcttcgccacgctcgccgcgacgctgtcgcacgtcgcgctcttccacggcgggtcgatatggcggcagaccaaggcggcggtgagcgggcagggcggcgacgtgcacaccaggctgatgaagcgcaactacgccgcggtgccgcagtggtggttccaggtgatgctcgtcgccgtgctcggcctctccgtgttcacctgcgagggcttcggccagcagctgcagctcccgtactggggcgtcctcctcgccgccggcctcgccttcttcttcaccctccccatcggcatcatcaccgccaccaccaatcagcaacctgggctgaacgtgatcaccgagctgatcatcggatacctgtacccggggaggccgctcgccaacgtcgccttcaagacgtacggctacatcagcatgtcccaggcgatcatgttcttgcaggatttcaagctgggccactacatgaagatcccaccacgctccatgttcatcgtccagctcgtcgggacggtgctggcgtcgtcggtgtacttcgggacgtcgtggtggctgctggagagcgtgagcaacatctgcgacccggcgaagctgccggaggggagcccgtggacgtgccccggcgacgacgtcttcttcaacgcctccatcatctggggggtggtcggcccgctgcggatgttcggccgcctcggcctgtacgccaagatgaactacttcttcctcgccggcgcgctggcgccggtgccggtgtgggcgctgtcgcgggcgttcccgggcagggcgtggatcgggctcgtcaacatgccggtgctcctcggcgccacggggatgatgccgccggcgaggtcggtgaactacctcatgtggggcgccgtggggctcgccttcaactacgtcgtgtaccgccggtacaaggggtggtgggcgcggcacaactacgtgctgtccgccgggctggacgccggcgtggccttcatggggatcctctcgtacgccgtgctgcagtcgaggggcatcaatggcgtcaactggtgggggctgcaggtggacgaccactgcgccctggctcgttgccccacggcgcccggggtcagcgcccccggctgcccggtgcagtgagcagagcagaccattggcatcaatcagctgggaaaacttagggcagttaggattataggtctatatagctcctcaagtttataaatgatcgttgaccaaaaatggcattggaaaagatcagcacacagcactactgtgtaattgtgcgtaaaacaaaagcgccgtatgtaactatgtatgtagtgatgaatagtctgattatatgtcaaacgcatgtgcttgttctgc

SEQ ID NO: 25373 - DNA, 1059 bp, Oryza sativa
  ref <308>: DATABASE ACCESSION NUMBER: AK100815
  ref <309>: DATABASE ENTRY DATE: 2002-08-28
gatttccagttgcagcaagagctgcctcctagctctcttcctgccatccatggcaaatgcttccctccaatcctttcttcttcaccaccaccattctttccttagcaatggtatccatgagggctcctccccttctataattctcaagctcacaacaaacagcaacagcagcatttcattcaagctcttctccaacaccacctcctcctcatcatcatcagtgaccaccacagcatcaacccccaactcaccggtgacccctgctccggtaacagcctcgtctccgccaccgccttcgctggagctcctgggcgcccagctcgccgagagggattaccggcaggccgacgagaccacccgcgcgctcctcatcgagctcgcgggcgagccagctcggcgccgagggtacgtcttcttctcggaggtgcagttcatctccgccgatgacctccgggccatcgacgcgctctggcaggagcacagcggtggccggttcgggtacagcgtgcagcggcggctgtgggagaagtcgcggcgcgacttcacccgcttcttcatcagggttgggtggatgaagaagcttgacaccgaggtggagcagttcaactacagggccttccctgatgagttcatctgggagctgaatgatgacacgccagaggggcatctccctctcaccaatgccctcagagggacacagctcctgggcaacatcttcacacatcctgcctttgaagaggagcaagaagatgaattagcagcagaggagaatgacacacctgataacactggtcagagtaaggatggcagcaaagggaaggagaggccaaagttcatgagagatttcttcaagcctgactactccttttgagattggggggtaattaaaaagcatgggagtttgtgatgcagagatgctggtcatggtgcaattgatttagaaaaaaaaaaaaaggaaacatgtatccgtagttcatctggattgttatgtcctgtaaacatgcgtgggaaactgcacaatatattatgaatataattgtttgagatgtttgctctgct

SEQ ID NO: 25374 - DNA, 856 bp, Oryza sativa
  ref <308>: DATABASE ACCESSION NUMBER: AK100816
  ref <309>: DATABASE ENTRY DATE: 2002-08-28
actcaccaagaccaccagacatgaagcttcacgtcgtggcagccatcctgctggccgtggccgcgtcgtcgtcgccgccgcccgccgccgccgtcacctacgaggtgagcaacgaggcggcgagcaccgccggcggccagcggttcgaccgggagtacggcgccgggtacgccaagcaggtgctcgccgccgcctcctccttcacctggagcatcttcagccagccgagcgccgccgaccggaggcccgtcgacgccgtcgtcctcgccgtccgcgacgtcgacggcatcgcctccaccagcggcaacaccatcacgctcggcgccggctacgtcgccggcgtcaccggcaacgacttcaagacgcaggtgaccggagtgttgtaccatgaggtggtgcacgtgtggcagtgggggctgcaggattacggggcgcattcgtgggtgtacgaggggatcgccgactttgtgcggctgcgcgccggctacccagcggctggttgggtgcagccggggcaagggaacagctgggaggacagctactccgtgacggcgaggttcttcgactactgcgacagcgtcaagccagggttcgttgccgacctgaacgctaagctgaagaatgggtacaacgtcgactacttcgtgcagatcaccgggaagaccgtgcagcagctgtggcaggattacaaggccaagtatggaaactgatgatcgatcgacgcagagaatgaataagacaagagattaccatcattgattgatatagattgttgtaactcatagctatggagtttacacaattattgtattgcttacggatgatagaataaagggacgctgtctagttttcaatc

SEQ ID NO: 25375 - DNA, 2242 bp, Oryza sativa
  ref <308>: DATABASE ACCESSION NUMBER: AK100817
  ref <309>: DATABASE ENTRY DATE: 2002-08-28
ggacctgtctccgccgttcgtcctccccacgatgccgtcgtccgctctccccccgccgccaccttccgccctccccctgccgcctccgtgcgccatcccaccgccgccgccgtcgacgacgaccctcctcccctccctctccctcctgcccgtcggagctcggcgccccctcccccttgtactctctcccttgtggcggcgtctgtgcctgcggcggtgtcggagtcggcgccggttcacccctattctcactcatctcgttgcgtagttcgacccggcgctagccttcctccctcttcagatctggagcagcaccggtggtgacggcggctaagaaggaggtgttacgggcgggacgagtaggacaggcggtggggagtgggacatgggacgggcagatggcccggtgcctcctcccccttcatatccccctaccttggcggcagagccggcgtcggtgctcccttcccctttcttctcccgcatcctggccgcctgctcctcctcccgtcctcacctctccacaacgccgccctccccctgcgtctcctccaactcctgccgctccgcctccctcgcacacggctcctctttctcctttcgagtctacgtcaaccacccgctcctcccctttccattcttgtcgttgtagccccgtggctggcgccacttctccctctggatccggcggcatccccttcgccatctacccatccctcctccccaccgcacacccttttcccctttcatccaacactaggtctcaggcggtgccttgatccctccacgaggtggtgtgttggcgaacctgctctacgtcgccgtgtcttcttgagccttcaacgaggaggacacaaatccatggcacatccatcaacgagggtccggtccatcttctcctcgtcgtctcagactatcgactgtaccttgcctcccctcaatcattctcctttcatctctcccatgtcatcctcttctctaaccatgatttgtttgctgtttttttaggggatgactggtgctgcagccatccgaggcacaactgaagagaaaattgtagtccgtgtggattgatgccaattgtatcgcttgcctcaaagagtaagtgcatgctcttgttggcctcaaaattctcttttgaaattatgaatctgggaatgggttcatttaaaaaaaaagatgattctggcaatgaatgcatttttttttactaattgatttgtgtttgcatcttggatttagagacagaataacaagggatttaaggagataataaaaaggtagagatagttacctcatgtatctttttttttctcgataatagaaatgttcgattgtgtctggtgtgccaggacctctgtttatcttggataaagtaaaggtatgtgttagtattatggtacaaattttcaactgactaatatggtactcctagcaagttatactgaacatttctttcttcatgtaactatgttcatggcgcaaagtactaggaaattgtaaacatccgattgggagatggaaccactcggtgtggccaaattctggaagttgatggtgaaagaggctgttgtgcaggtctttgaagacacttcaggagtggacaacaaatacaccattgtgcaattcacagtacaagggtggtgcagctgagggtggcagaagaccaatcatctggaacatctttgaacaacgaagcacgcccgccccgtgtgcgtctttcacgacatgctctggtcccgggtttcttcctgtggtcttctagcgttagaagaagtcgtgtccgtcccggacatctgcaacgtcctctcacgcctttttttggggggacaaacaaagatcaggaaaagacggaccgaacccattcggtgactttcgcggttgccctcactgaaccgacttggatctgaactacgattcagatcaagtcttaccgaaattggatttccttttcgtgccatatgtcgcttagactttactttttcccctttctgtcctttcctctatttgttcgatagggtcttcaatctggacccaggcatgttaattacatctctgtttggctctgccttctagctgtgctatactttcaacacaaatcaagttcaattaggtgtatttcatatatatctacaagcataaaatttgtcctatttagtaaccagaaccaggtcaacgatgtaaatgcaaaaaataataagctgaatacacaaagacacaaatgatatcatagaagtatcgg

SEQ ID NO: 25376 - DNA, 833 bp, Oryza sativa
  ref <308>: DATABASE ACCESSION NUMBER: AK100818
  ref <309>: DATABASE ENTRY DATE: 2002-08-28
gggtgagctcattagcttagctctgtgaactgtgattctactccacttcgaagtccaaagcctctgaggcagaacgccgccatggcggtggtgaggcagctgctggtccacaggctctcctgcagtggcctgcctgcttcccgctgcaagaccagttgctggagcagcggcgagaggctccctggcttgaagtcaagggtaaggttgttggccgtggccatcaagccaccgcgcgccgccgcggggaaggacgagattgtgcgggcggacgacgacgacgacggcgtcagcctcggcacggtgaagctgcccgccaacatcgacatagctcggttcgagacgctgctcttccaggttagctgcatgaagccatgaatgaattcttcagcctaaccgatgcgtattctgaatgaattccgatgcattgctgcgttgacacttactacagtgggggaacagcctctgccaaggcgccaccctgccgctcccggtgcccctgagggtggacaaggtggagggcggtgtccggctaggattcatggcggtggacgacggcgtgacgcaggtgctggtctacatcgactgcctggtgtcgccggcgacggacgcctctgggccggtattccgagcgatcaggaacggtcctatgaaggaccaggagccacctggggagcccaggatcatgagaagcctactcgaggcgctccaaaaatgtatccagtatgcacaagtttgagtgtccaagagaggcgatgcaagcccattatctgaagaaacttggaattctaaattggagatgtaaattccctgagagaaatacatgatacagtacc

SEQ ID NO: 25377 - DNA, 955 bp, Oryza sativa
  ref <308>: DATABASE ACCESSION NUMBER: AK100819
  ref <309>: DATABASE ENTRY DATE: 2002-08-28
gatttgggacacgtgtacataactctttcggtccgggaccctctcttgtttttcttcgttgctcgcgagctcttcccccctcgcctcgcctccccacccaacaagcccgcggcggcgactagggttttgaccccccggaatcccccctcctctcgccgcctccgcctccgccgccgccgccttcctccccgcgccggcgacgatctgctcctcctcccccgccggcatcgctgtttccggatctagcgcaagatgcttccgctctcgctcctcaagaccgcccaggggcatcccatgctcgtggagcttaagaacggcgagacgtacaacgggcacttggtgaactgcgacacgtggatgaacatccacctccgggaggttatttgcacctcaaaggatggtgataagttttggaggatgccagaatgttacatccgtgggaacaccatcaagtatcttcgggttcctgatgaggtgattgacaaggtccaggaagagacttcaaagagcagatcagataggaggccaccaggtgtaggccgcggaagaggaagaggtgatataggtactaagcctggaggcagaggcattgggcgtggccaggatgatggtggcagcaaaggcggtggtggccgtggaaggggaggaattggaggtaaaggtggcatcaaaggtgggggccgcggacgtgggtgagagggaaggtcacttgtgggaatgccgcttttttaaggctttgtgtcacatagattgctttaggagggtgaagaatggactggtggagtaagcattgctttgctttatcattttgtggtatgaccgaaaaatgtttcatgggttcagtagttaccagtgaagaggcagcggttggcctgtctcgaaacaatttgtttgatgtctggaccctcgactatattgaatattattgtggttattactttgacctgttcatcgc

SEQ ID NO: 25378 - DNA, 1348 bp, Oryza sativa
  ref <308>: DATABASE ACCESSION NUMBER: AK100820
  ref <309>: DATABASE ENTRY DATE: 2002-08-28
gcttggtcatactccaagttgatggcaccaaacattgaaaattcactgtcatggcagatggaagtctgaggggtggagtcaacaaagaaggcataaagtactacaataatttgatcaatgagctattatcgaaaggggtgcaaccgtttattacccttttccactgggactcacctcaggcgttggaagataaatataatggatttcttagccctaatatcataaatgactttaaggactatgctgaaatctgcttcaaggagtttggtgacagagtgaaaaattggatcaccttcaatgagccttggactttctgctctaatggctatgcaactggcctgtttgcaccaggccgttgttcgccctgggagaagggaaattgcagtgttggagattcaggaagggagccttacactgcatgccatcatcaactacttgcccacgcggaaactgttcggttgtacaaagcgaaatatcaggccttacaaaaagggaagattggaataactctggtctcgcactggtttgttcccttctcccgctccaaatccaacgatgatgctgcaaagcgtgctatagacttcatgtttggatggtttatggatcccctcattagaggcgactaccccctaagcatgagaggattggttgggaatcgcttgccacagttcactaaagaacagtctaagttggtcaagggtgcatttgactttattggacttaactactacactgcgaactatgctgataaccttcctccatcaaatggccttaacaacagctataccaccgattctcgagctaatcttaccggtgtacgaaatggcatccccataggaccgcaggctgcttcaccttggctttacgtctaccctcaaggcttccgtgacttgctactttatgttaaggagaactatggcaatcctaccgtctacatcactgaaaatggcgttgatgaattcaacaataagaccttaccactccaagaagccttgaaggatgacgctaggatagaatactaccacaagcacctcctttccctgctaagtgctataagggatggagcaaacgtgaagggatactttgcatggtcgctgcttgataacttcgagtggtcgaacggctacacagttcgatttgggataaacttcgtagattacaatgacggaaggaagagataccccaagaactctgcccattggttcaagaagttcctcctgaaatgataaaaaagcaccattgcactcattgcttttctcattgaataataaaagagtatatgttttgcgtgaatttggtacaagagatggaagtaatccagttaaataataaatccctctcttactgc

SEQ ID NO: 25379 - DNA, 1866 bp, Oryza sativa
  ref <308>: DATABASE ACCESSION NUMBER: AK100821
  ref <309>: DATABASE ENTRY DATE: 2002-08-28
gtactaaaccctagcccctcccctcttctcctcttcacaacctcctccccctcgcgccaccgcccaaccatctcccctctcgccggagtactcgccgccgccttgctccaaccaccgaagctccgaggatgatctccgcgatatcgtgggtgcccaggggcgccgccaagctcgtccccgtcgaggcggagccgcccacgcaggaggagatcgacgaggccatcaaggccatcgcccagcacacggaaggtgggagcgacgccgacgaggacgccgacgacggcgaggagaatggcaacatggaggtcgatgccgccgccgatgaggaggaggaggaggtagacgaggtcgcgcaggcaaaggccgcggccaaggcgctcgctaagggcgctgtcgatgacgtcgccgacgagctcaaggagctcaacatggacaactacgacgaggaggaggaaggtctcgagattttcagctccggccaaggggacttgtactatgctagcaatgacctggacccctatctcaagaacaatgatgaggatgacgatgatgaagagattgaagacatgactatcaaacctactgatttgatggtagtttgtgcatataatgaggatgatgtcaattcgctgcaggtaaatttacttgaagaaacagaagacggcgatctaaatatgtttgtgcaccatgaggtgcctctagctgattttccgttgtgcacagcatggatggattttaaccttaagggtggcgacaaagggaatttcgtagctgttggcaccatggatcctgcaattgaaatttgggacctggatatagtcgatgaagttcaacctcacatggtgctaggaggacattcaaaaaagaagaaaaaagtaaagggcaaaaaggcaaaaaagtacaagaagggaagtcatagaagttctgtgcttggtcttgcatggaacaaggaggtgaggaatgttctagctagtgcaagtgcagacaaaactgttaagatttgggatgtatctgttggcaaatgtgcagtcacattggaacatcatgatgacaaggttcaatctgttgcttggagccgacaatcgcctgaagttcttctaagcggatcgttcgataaatcagttgccatgaatgacatgaaagatggtggacagagttgtaataaatggtctgttgaagcagatgtagaaagcttagcttgggatccgcataatgagcactccttcatggttagtcttgaaaatgggatggttcaagcatttgataagcggacagcctcatcaaattcaaattctggtcgtcccacgtttactctgcacgcacacgagaaggctgtatcttccatctccttcagtccatctaccccaaattttcttgcgacaggctcgactgacaaaatggtgaagctatgggatttatcaaacaaccaaccatcgtgcatcgcctctctgaatccaaaactcggagctattttctcggtatcattttcgaatgacagtcccttcttgttggccagcggaggatcaaaaggcaaattaaaagtctggaacacactaacggaaccggctgtagctaataaattcgggaaatagatccgtaggaaattcgacaagctttccgaggaccgatacaagtgatgctggaaacataatagcagtcaacattgctggctcaagcggtttctggctatacattgctacgcacatgaggatagatttctagttgtgatgtaagcttttcgttttgtccatgttatcaagtccaattttgttgaacgagtggaatgcaaacaatcgattcatgtaccttttggcgcttgtgcaacagaaagtgatgaaagggttttgcagtggatatctcttatcg

SEQ ID NO: 25380 - DNA, 3826 bp, Oryza sativa
  ref <308>: DATABASE ACCESSION NUMBER: AK100822
  ref <309>: DATABASE ENTRY DATE: 2002-08-28
gagaatcctcgcgtacttgagctgtcatcccagctaaaataactcagcaaaagctctcctcttccgttactgaagctggcttctgtagtaagagaatcttccatggctacatacaagaaaagctgtcattttgatctgcagcccccacaaaaaacataatcttttctctgataggaggaattattatcgctaagcatttcatggctttctcttcttcaccagcatgtaggcaaggccagctgggtatgcatgcattctagctagaatgccaagccaagaagagattaaggcatctctcccggcatctgttaaaaatttgcaagaggtaaaggctaaaaaagaggaggagatcagggacaagagaagtggcaaggagaagatggcgatcaagagggaatattaaaggcaaggagggagaccaaaaggagggtggttgtggggaaagagaggcaaagggagaagctttcgctttcccggctgctgctttcctccctcttcatgggctgtaactcttataccactactacctgcacatgagcacaggctcattggcaagaagcttgcagctcattgcagagcatcgcagtgcggcgtctcttctcttcttaccccagcgagaccccatttccacggtgggagaagcaacagtttcgccgctgatcggcggcggccggccggtggttgccggggagctgcatgctaactgcagagaggaggcacgagaggatccttgatagtaaggtctgtctcgttcgtccttcagatatcctaatattgccatcgcagcgtactgctggatctctctggcaacaagtgccaccatgctgcagtacctggacttctctcatgctagcacctcaaggaagtggtcacacaagaagcagggcgaaggtacggtgatacacggatttgaagccccaaggaatagcatggagttcaccctggaggctccacaaagctatggcgtcttccaagaggatgtcccgtactcctgcaacatgaggcaacaatacccaaaagctggtctcaaccacagctcatccccaatcaagaggatcatccatgaggacgtatccttcagaacaaatgaagttcagaagagaccaagtgtcattgccaggttgatgggcatggactcacctccaatgagtacaaccgccggtgagcttgccgccggccacacggaggagaaaaggcaagacatgataacctccacaaggccaatgccaagaagagatccttctgaaatggtctcaaccaagcatgtctccttcgtgcaacacaagggctccatgaagcattcgccgaagcaagctgaggtctgtgcctacgacgacagcatggagctctttggtcagctgagcaaggcgatcagcagcagtgaatgggctaaaccgcagccgcgagagcacccgcaggaggaggagctgcagaagttcaagaaggatttcgaggcgtggcaggcgagcaggatgtgggagcagtcgagagctctggaattggagagccatctcgacgacgatgacgtcaggtgcactgacatcgtgccttacaggttccagcacagagggaaggataatgccggcaagaagcacacgcactccaatggcgacgcacactggaggaggagcaaggagagcggcaccggcaccggcacgtcgatctccggcagccggacgttctccctgacgagcgcggacgccagctcgacgcggctgccgctgtcgagattctactacgaggaggagaggctgctgtcgccgaagaagatagtgatcctgaagccctgtcccgagatgagcaccgacgacatcgaggagtcgtcgttggggtcgccggagatggtgaagaaggagaacaacatggaggccttcctcgaggaggtgaagaagcggctcaaggtcgagctcgaagggaggatggcttccgacgacagggcggcggacaggtgggccgccggcggcgacattccggctgacccgaagcagattgctcggagcatcgccaaccagatcagggagaccgtcaccaaggacctgcactcggcgttgctccggtcggagtcgacgcggtcgtaccgcagcgacatcccgctcaatggccagagccagatggactacatctgcagagatgccaggaagcacctctccgacaggctgaagaatgtgctccgacgagagccggagaccgagccgccggcactgtctcaccggagaagaaccgcctcggcgtcgttcaacgaagagccgaggccgaagccgaggcatgaggtggcaaggaagggcaagataaggagcaaggaggagaagaagcacgcgatcgagttcgacgtcaggtctttcagacgtggccaccacaaggcgtcaccaactccggcgatcgactccgacccggtatcgccgaggaacctcatcaggtcgttctcggcgccggtgtcggggaccactttcgtgaagcttctctcggaggagccgcgggtgctgaccggagcacggctgcagcgcaagcaggaaggctacgggagcaggccgccaccgccatcgtcggaggaggagaggaaggggaggaaggacacgttcaacatcaagggcagggtgtccaacctgaggcagaatctggggctgagagcgaagctgttcggcaagaagctccactccgccgacgagtcgccattccccgatgatctccctccgatcggaacgctggtcaccgccccttccgtcctcatccaccccggcgtcctccaggagaactccaccgaggtgccgccgagcccggcgtcgtggtgcagtagccctcctgatgagatgagcaggggaggttacccgagccctgtctcgccattggaggcttcgttcagcgagcaccgatctcccttgaagatggcggctagggacatgagttcgagtgcttctgaaccagagcatccatcgtcggagcaagctcaaaccgatcaagaactcgcagaaacaagtccaatccaggacgacgacgacgacgacacagacgagatagataaccccatcaaagcttacatcagagcaattcttgtcatcgccggtctgtacggacagagacgaagctctgaccaactcttctcagaccgcgaggtgaaaccgatccccgcgtgggtgttcgaggaagtcgagtcgtcgtcgtcctcctcagccccggccaccaccgactgcgacgctgcggccaccggcgtcgaccaccgcctcctcttcgacctgatcaacgagtcgctgccgcgggtcgtccagtcgtcgacgacgctgtgcgcgttcagcaggtggtacggcgcggcgccgaggagatcccccggcggcaagaggctactggacgggctgtggaacaccgtgcaggcgtggctggcgccaccgccgccgacggactcgcccaactccgtggacgagctgatcggccgcgacatgagcatgtcgccgtggaacggcccgttccgcgaggacgtcggcgcggccggcgcagagatggaggcggagatactggacgagctcgtcgacgagacgctctgggacgtgctgctcaacgtcggcgactgattgactgactgatcggtctcgtggatcaactccttgagtatacctgtacattttggggcgtgttttttttttttcgttttgtttaactctgcttttcagagtgcttgctgggtttgtggcaaggtggtgttggtgagtgcaaaatgtccgtaagctttgtgtgttgaaggatactgaatttgtcatcacaaatgcataaggaagcttaaaaaggagtgaagaaaaaataaatcgactgtagttgcatatgcagcttcatttgc

SEQ ID NO: 25381 - DNA, 689 bp, Oryza sativa
  ref <308>: DATABASE ACCESSION NUMBER: AK100823
  ref <309>: DATABASE ENTRY DATE: 2002-08-28
gaccagcacacggcgacctcatcggctcatcctcctcgattccggcggccgactcaaatccgaatcgccccaagagagagagaatggcggcggcggcgctccgaccggcgatcctccgccgcatccgcctctccccctcccctgcggcggctgcgggggccgcggcggcgtcccagccccacgccctggcgcggtggctcgcgcggcccatgtcctcccacgacgcccacctcacccgcgacgaggtcgtcgaccgcctcctcgacgtcctcaagtgccaccccaaggttgacccctccaaggtgagtcccgaggcgcacttcgagaaggatctggggctggacagcctggacacggtggaggtggtgatggcgatcgaggaggagttcaagctcgagatccccgaccaggaggccgacaagatcgactccctcccgctcgccatcgagtacgtcgccaaccaccccatggccgcctgacctcaccgatccgtcgtgccgtggtgaggcttttcttgatttactatttttgttctgcgggggatgaataattttgctggagtggttcaggaaaacttgtccctggtactctagattatgtgttatgttgccatcgatgtcgatctctaatgtaacatccacaatttcggttttgtgacaatatgatgctagattcttgctcttttgctc

SEQ ID NO: 25382 - DNA, 1231 bp, Oryza sativa
  ref <308>: DATABASE ACCESSION NUMBER: AK100824
  ref <309>: DATABASE ENTRY DATE: 2002-08-28
gggttggagtcgccgctgttcctcccctcgcctcgcagcctccgcctctcctcgtctttccggctcaatctgcggagagggtggaggcgcgcgcgggccactgccaccgtgaggcagccgcactcgggcaccgggacctcgggaaccctagccggctggccccggtttattgcctgccccttctggctgctagcggccgggctgcttgacgatttgtgggtttccctttcccatttgctcagacactaaatcatcaaatagaggaagcaatttagtgccacggtggtcaagatggctgggcagtctgaccctcatctttctatcttctcaccctcagaggtggagttcgtggcggaggatgagattgtcgagatcgtccctaacattcgcatggaggccctcaacatgatatgcggggattttgggcccttcttcccgcaaattgcaagcaaagtgcctctttggctcgcggttgcactcaagaagcgtggcaaatgtaccatacgcacacctgactggatgactgttgaccgcttgacgcaggtattagatgcagaaagagagtcacccaaagaatttcagccattgccgttccactatattgaaatatctaagcttctctttgatcatgctcgtgatgacatctcagatgcatacctggtaagatctttgattgaggacatccgagatgtcagattccataaggttgagactggtctggagacaatatctggccgtactcatgctgtaaagctaaaaaatctctctgcaatggaagtgaatatcgtgcgtcctttcatggtgagaactttacaagcattctataagcatgatagcccacagatgattcagcaggcagataacacaggtagcagaccaacaccagttacagaccgtggtccaagaagagatctaaggcgcaggtaacaagcaggatgtgtatctatcccttgaaaattttactgtgtgtagattgcagtaaatgaaggtacttgtgatctgtatctcactagctagaagccaactgcgtttccccaatttgttgtgtgtgtaccaaaattttataggactaataacatttgacatggttttgtttttgaagaagcgaagatagtaagatacatcaattatctgtcacaaaagggagattcctcatgtattctggatggatgtaacttatgtgatgtatttttactatttctggcataacctaaatttcctgactttattc

SEQ ID NO: 25383 - DNA, 937 bp, Oryza sativa
  ref <308>: DATABASE ACCESSION NUMBER: AK100825
  ref <309>: DATABASE ENTRY DATE: 2002-08-28
ggcaggcagaagcactcctcacgcgtgtttggaagagaacactacctgggacttggttgctgacatcgagaagcttagagaacatcttggcatcccagagtggcaggtgtttggtagttcatggggaagcaccttggctctcgcgtacagcgagagtcaccctgataaggtcactggcattgttctaagaggcattttcttgcttaggaaaaaggaacttgattggttctatgagggtggtgcagcagctattttcccagatgcatgggaaccatttagagattttattcctgaggatgaaaggaattgtttcatagctgcttatagcaaaaggctaacttcctctgatgctgatgtccaggctgaagctgctaagagatggacaatgtgggagatgatgactgcacatcttatccaaaatcatgagaacatcaagcgaggggaagatgataagttctcattggcattcgcaaggattgaaaaccattattttgtgaataagggatttttaccctcagactcgcatctgttagacaatgttgacatgattcgacacattaaagcttttattgtacagggccggtatgatgtttgctgtcctatgatgtctgcctgggatcttcataaagcatggcctgaagcagaatttaagatggttccagatgcaggacactccgctaacgaggttggtgttgctgccgaactggtatccgccaacgagaagctcaaaagcatgtttacaaaatgaagcaggtgctctgatttcaaagggtttcatcgcatagctgatgcagaaatccagaagcgttttctctggtttcattagtgttgccagaaatacagaataaacagctcgtagtttgaacagccttgtgggcactgtggtgtgtcaaacgatgtcattataatctcaatcatagtttctggccttgtttcg

SEQ ID NO: 25384 - DNA, 2674 bp, Oryza sativa
  ref <308>: DATABASE ACCESSION NUMBER: AK100826
  ref <309>: DATABASE ENTRY DATE: 2002-08-28
ggttccgtttcgcagtcgtcgtcgtcgtctccgatgatgataagctgcgactgcgagatggtggtggaagagcactgggaatcaacctaaccagcagcagcagcagccacagcagtgagcttcttccaggccacagaaagagagagagagaggggaccaactgaaaagagagagaagctagaaggagaggagtccaaacttccaagacacccactactgctgctactgtgttcgtgttcctctcttggcctctctcttgtttgagaagtggtcggtaatctcgagggaagtacggagccacgcggttccaaaatctcccgtcttggcctggttcctgttgacgcggcagatgattttcacggagaaatttgagagcttcccgtagtttgatgttccaagcagccaaacctaaggagctccagtggtgaggagaggggggcaagatcaaatctcggtgcatatttctgcaatccgaagactgtgatattttgcaacaaccagagctgaatttgccaaagtggaggcagtattgggttcttagacttctcagggacaagatcttgcattggacttgaaattcacaacaccatcgaactgaaagaacagtagtttgttggatttgggggatggagaggcaatccagcagccggctcggcgctctggagaagctgaagagcttccgggggatagagaagcagagaagcttcaagttcctgtccatggagaagcagcagagcttcaagaggaacaaggacagccctgggaagaggggtgacaccgagctccaccttgcagcaagggctggcagtgtcccccatgttcagaagatcttcgccgcgagtgatccggagctggtgggggaattggctgctcgtcagaaccaggacggcgaaaccgcgctgtacgtgtctgccgagaaggggcacactgaggttgtgagtgagatactgaagttttgtgatctgcagtcagcagggctcaaggctactaacagtttcgatgcgttccatattgcggcgaagcagggccatctggatgttttgaaggagctcttacaagcatttccagcattagctatgacaacaaattccgtaaatgccactgctttggatactgctgccactcagggccatattgatattgtcaatcttctgctggaaacagatgcaagcctagccagaatagctagaaataatggcaaaacagttttgcattcagcagcaagaatgggtcatgtggaggtggtaacagcattgttaaataaagatccagggattggttttagaacagataagaaaggacaaacagcactgcacatggcttcgaaaggccaaaatgctgaaattctgcttgaattgttgaagcctgatctctcagttatccatgtggaagataacaaagggaacagagcattgcatgttgcaactcggaagggcaacaccgttatagtccagactctaatatcagtcaaagagatcgtaatcaatgcagttaatagagcaggagagactgcttttgctattgcagagaaactaggtaatgaagaactttctaacatcctgagagaggttggtggtgaaactgcaaaagagcaagtaaaccctccgaattcagcaaagcagcttaagaagacagttagcgacattaggcatgacgtccaatctgggatcaagcaaacacgtcagaccaagatgcaattccaaaaaatcaagaagaggattcaaaagcttcacattggtgggctaaacaatgccatcaactccaatactgttgttgcggtgcttattgccacagttgcctttgcagccatatttactatccctggtaattttctggaagatatgaaagatccacatgatcccaacatgaccttagggcaagcatttgtagcaagcaatccggcgtttataatcttcttggtatttgatgccttggctctttttatctcgcttgccgtcgtcgttgtccagacctctctaattgttgttgagcagaaagccaagaagaagatggtctttgtgatgaacaagctgatgtggatggcatgcctttgcatctcagcagccttcatagcactaacatatgtcgtcgtgggccgtgatgatcggtggctagcttggtgtacaatggcaatcggcaccgcgatcatgctggccacccttgggtccatgtgctactgcattatcgctcacaggatggaggagaagaacatgaagaagatcaggaggtcatccaccagccagtcgtggtccatatcagtcgattcggatacagagctactgaacaacgaatacaagaagatctatgcactttaggataacaatataacctgtggtcgagtcttgtatatatcgaagcccgtttgcctgatgaaactccatggcattcagcggagtttgactcacaaagtatatttaggcctagaacatggcagctttgtgcaactgaagcctccttttgtgtagagaaaggaggccatccatctcactgcatttgctactatatagattccaggtgatactttgaagcagccacttttttgtaggcatcataggagtattggtaaagcagaatgtactcttaatgctcaccaatgtgtatctgtggatgatgataatgaaaaaccatgcaattatactagtatagatagtggaataaactgccattttctgcc

SEQ ID NO: 25385 - DNA, 2702 bp, Oryza sativa
  ref <308>: DATABASE ACCESSION NUMBER: AK100827
  ref <309>: DATABASE ENTRY DATE: 2002-08-28
gccaagtatcaactatgtcatatattttggtatgctcatgtttttagctgtacactttcacctttgtactgtactctaacaaaacatacagttcatcaaatttctagatagaacaggagggaatgctagcttaattatctgcgtggccatcctgttaaggaggttgtaaagtcgattgtaaacttttgaggcgtagtgtaatgtcatttcacgccatagatgcaaaaaaaaaaaaaaaaaaaaaaaaaaaaaaaaaaaaaaaaaaaaaaaaaaaaaaaaaaaaaaaaaaaaaaaaaaaaaaaaaaggcttttcactcttgcccctgggctgacttttgccctcccttgggcatccatgtcctctccctccctcccctcccctcccatccctacccccaaaatcgccgaccgaccgcccccaaatcccatccaagagccgtcgcctcctccaaagatcggatttcgagaccccccagatcggggggagagatccccgtgtcgtctggtgtggtgggtcggcctccgccccccggccgccgcgcttctcttgatctttctttcttttttttgatttttttgcgtttcccctccgggagaggggaggggaggagggttcttggatgggctgctttccgtgcttcgggtcgggcggcaagggggaggcgaagaagggcggcggcgggcgcaaggacggcggctcggcggatcgccgcgtcgcccgggtcggatcagataaatcaaaatcacagggtggattggactctaggaaggatgcattcatcccaagggatgcgaatggtcaacctattgctgcacacactttcacttttcgtgaacttgctgctgccactaagaacttcagacaagattgtctattgggggagggaggttttggccgcgtatataaaggacacttggagaatgggcaggctgttgcagtgaagcaacttgatcgcaatggacttcaaggaaatagagagtttctggttgaagtccttatgctcagtctattgcaccatgataacctggttaacctaattggatactgtgctgatggggatcaacgtctccttgtatatgagtttatgccattgggatcacttgaggatcatttgcatgatattccacctgacaaggaacctctcgactggaatacacggatgaagattgctgctggtgcagccaagggcttggaattcttgcatgacaaggcaaatcctcctgttatttacagggatttcaagtcatcgaacattcttcttggtgagggataccatccaaaactatcagactttggcctggcaaaacttggccctgttggtgacaaaactcatgtttcgacacgtgttatgggaacttatggctactgtgccccagaatatgcgatgactgggcagcttactgttaaatctgatgtgtatagttttggtgttgtgttccttgaactgattactggccgcaaagcaatcgacaacaccaaaccacttggagagcagaacctagtggcatgggcccgtcccatgtttaaagaccgcaggaaatttcctaaaatggctgatccattacttgcgggccgatttcctatgcggggcctgtatcaggctttagcagttgctgcaatgtgtttgcaggagcaagctgccactaggccttttataggagatgtggtcactgctctttcatatcttgcttcccagacatatgatccaaatacacctgttcagcacagtcggagcaatgcatctacccctagggccagaaaccgtgttggtgcgaattttgaccagcgtcgtcttcactcaccaaatcaccaacaatctccagatttaaggaaagaaggcaccacaacatcaaaatatgaagctgaggttagcaggactaattctggcagtggctctggtcgacgagctggcttggacagcatggatgtgacaggttcacagatgggtagtcctgctcacgcaggaaggaagagggaatcatcgcggagtactgataggcagcgtgcagtcgcagaggccaaaacatggggggagaattcaagagaaagaaagtggccaaatgctcgtggcagctttgatagtacaaatgagtaaacctctgaagcagaaggttcagttaagtcgtcattctaggggaaaaaaaaagatgaatcacttgcagaacccaactgggtcgaattaggtacatggggcattttcgctccatctcggctctgcggtctatgtgaatagagcttctctttttcttttttctgtcctggagacaccaccgctgcttcagagctctcctctcgtccatacgaatagcatcaccgcgatctcatcgtcgacgcgcctattcctggcgtccattcctcgtgattgatcatgcaaatgtgccttttattcatcatgaagacagaaacaccgtttggctggaaatgtaggtagaaagcaaaagagaaaatttgctctggagctatccattgggtatctcatgtcgatgttgttgcatgatgagtgtcagcggctgcaccattgttcctgagtgttctagctctatgtgaagtgaagtctgcgtaccgagggatgtgatgttcttttttcttttcttttcttttctttttgtctcaatggtttgtacctagggggtacggcattttacctgtgtttcatacacctgtcatttgacaatttcatgtcggagttatctgttgtttt

SEQ ID NO: 25386 - DNA, 917 bp, Oryza sativa
  ref <308>: DATABASE ACCESSION NUMBER: AK100828
  ref <309>: DATABASE ENTRY DATE: 2002-08-28
ggggccctccaaattcccaaggcgggcctcgagtcgagcccaaaccccttcgccgccccgccatgcagttccccttcgccgccggcgattaccccgccgaccaggtcgaccccgactacctctacttcctcagccacatccgccccgatggcgactcctacaccctcgagctcccctccgatggcgtctcccctccttccctcgtgaagtacgaggcccccgccgacaccggcagcaccgacggcgagtgcgtctccgatccctcccctggccgcgccagcaccaaccgcccgccggaggagaaggagtcgtcggtggaggtggacgccgagcctcctgccccctcctggatcgactccctcgtcgacatcgacgaggactaccgcctcttcctcaagcacacgcgcgtggtgaacgacaacatggtgctcgagattgacggcgccgtcgtcacctacccgtgcgccgcgtcctccgagagcagcagcgaggtcgaggatgcgcgggagaaagaggtggccatggattcagacgagccggtggtaattcttccggacccaaaagtatgcgactgggtggcggtgggtgacgcatccgtgcgaacattagatagtaagaagaagaggaagatgagttcaagcaattccaataatgccggcccttccatccccccggtgagaattttttatacatctccaatcgttgttacctgtggcactgttgtttctttgaattgagcagcgtatgcacgttttcagtccagaaatagttctctgtttttcgcctaatagaatatacgcaaaagaagatgatagtagtcttcgatatttcagtacgattcaacaaaaggcctgttgatggacatgtatgaataagctgatactgtattgtaccaaccagaacactattctctagcg

SEQ ID NO: 25387 - DNA, 1545 bp, Oryza sativa
  ref <308>: DATABASE ACCESSION NUMBER: AK100829
  ref <309>: DATABASE ENTRY DATE: 2002-08-28
ggtgcgctgctattgctataacagcttaggctttagctcgcctcgcctccaagcaaaatccccatttccttctcctctccaaaccctagcaaaggctatctctctcttcgccgccatggaggatgacgacgcggggggcggaggcggaggcggcgaggcgtccccgccgcacgcgggctccgccgcggcgatggcgggggcggggagggacatcgcggcgtcgccgacgagctcgcgtcggtgacgcagacggtgaacgggtcgcacaggttcgtgatccaggggtactcgctggcgaaggggatgggggtggggaagcacatcgcgagcgagacgttcacggtgggagggtaccagtgggcgatctacttctaccccgacgggaagaaccccgaggacaactccgcctacgtctccgtcttcatcgcgctcgcctccgagggcaccgacgtccgcgccctcttcgagctcaccctcctcgaccagagcggcaaggccaagcacaaggtgcactcccacttcgaccgctccctcgagtccggcccctacaccctcaagtatcgcggctccatgtggggttataaaaggttctttcggcggactgctcttgagacatcggattttcttaaagacgattgcttaaagataaattgtactgtgggtgttgtggtatctactatggattactcaaagccacattcgatacatgttccagaatctgacataggctaccattttgggacactgttggacaatcaggagggtgtggatgttatatgtaatgtggcaggagaaaagtttcatgcccatcagttggtcttggctgcccgatcttcctttttcagatctgaactttttgagcatgaatcagatgaagagaagaatgaagttgatactagcaatgaaatcaaagagattgtcattgatgacatggagccaaaagtgttcaaggctgtgcttcattttatgtacagggacaatcttgttggtgatgatgagttgtctgcatcaagctcggactgctctatctttgatactttagctgggaaattattggctgctgctgacagatatgagttgccaagactacggttattgtgtgaatcttacttgtgcaagcatatttctgtaaactctgtggcaactaccctagcattggctgaccgacatcatgctatggagcttaaatctgtttgcctaaaatttgctgctgaaaatctttcagctgtaatccggaccgacgggtttgattacctcaaagacaactgccccgcgctgcaatcggagatactgaggacggtcgccgggtgtgaggaggaatgcagcagcggagggaagagccagagcgtgtgggggcagctctcggatggcggcgataccagcgggcgcagggtgaggccaagggtctgaacacccagccactgctatgccaaaagcggcttgttttaaagtgtaactgtgtaagcgaattgctgctgtacaaatgggacggctaattggtttgtggcgacatttaaaataatagcatcagtctgttatactacc

SEQ ID NO: 25388 - DNA, 757 bp, Oryza sativa
  ref <308>: DATABASE ACCESSION NUMBER: AK100830
  ref <309>: DATABASE ENTRY DATE: 2002-08-28
ttggagaggcttgaaattgaagcagtagctgccgcctgccgagagttgcagcttggcatgcagagccttcagctctcttcagaagtgtgagctctgaatctctgatgatggcgttggaacaacaagaaggttttcaggttatatacatgatcgatgggcagtgcgactgatgaggtaggagatgggattaacgctgcctggctccctgaatgccatccgagaagcgtgccgctgtggccggctgcttcctggttggcattgagggagtcatgcagggtttgctcatttccatctacgacgacgatgtttatagcaagcacggcttcctagctcaggaactattcacacttccaccgggcgtgactatcatgcaagcaagactgagaaaagcactggaatggaagactaaaaggacagcgctttagtgaattcgttgcagccccttacgctctcttgtgagttgtgactgaatctatgtttagccagaaacaaaatttgagcatatgttaattttcttcgaagatacctttcatgagagggtgaaagatgggaaggagtagaatgcagtttttgtgccgatctttgtatttgctttagggtatctgatgatacaattgttatgaaggaactatattcccaccatccggatttaactaatttattgtataaggtcatgatcaattgtttagatggttgctatctatttatacgaatgatcaggcagtgtgtcctttatatattttttttggttttgtct

SEQ ID NO: 25389 - DNA, 1709 bp, Oryza sativa
  ref <308>: DATABASE ACCESSION NUMBER: AK100831
  ref <309>: DATABASE ENTRY DATE: 2002-08-28
gaggcaacctataacaactccacccctgagaagaagcaagttgctcctttggtgatctttctcctcataccactgacaatggccaccgagtgtgatgtgaacaaatctcgccgcttcgatcttggcatgtcgaggcggacacgaagatcaacaagtctcatcacttgttatcaagatcaacaggtgcagccccttgtgcagcagctacgtcaagatgccaagctgaagacattgttccagtgccaggatacagagctgcagccaccatgtccatatgaagatcaggagttgaggattctacaggcaccactgcaatgcgaagttgatgcacaggagacactgaatcaacaccgtgatgagcaggaggagaaacttcaccattatctagatgaagagcatgagaagaaacttcaggatcatttggatgaagaaccggagaagaaacttcatcattatctagatgaagagcaggagaagaaacttcaggatcatctggatgaagaaccggagaagaaacttcatcattatctagatgaagagcaggagaaactgttccaggatcaagacgaagaggagaaaacaccaaagcaatatcttgatgaggatcagaagacattgcagcaatgtcaagatgaggagaaggcgccaaatcaatacgaagatgaagacaacactacagggcaataccaagatggggagcagaagacagctgaacaatgcgaagaagagaagacatcagagaagtatcacaatgaagagcacaagtcactcgaggcacagcagcaatgccaagacacgaagcagaaggcccaggagcaacgcaaaactgtgaagaagccgatcacgccgccgttcgccgacgacgtgccccggttctcccttcaggatctgattcaagagaagcagctcctcatcgtcggagaagccaaagccaccagcaagctcggaaatggggagaaagccattattgctgatcataaacttcccgtgcctccggctgctggtggcgcgacgttggccatggtgataaagcgcccagacggggggaagaagtcgatgggagtgattcgccgttgcgtgaaggcactgaaccagatggtcaaggccaagcatggctccaagaagaacaaacctttctaatcaagtgagtacatgcatgcatcagagttccctagtagaatcagcacatctcagtataataatgcacctaatgcaaaaacatggttttggaggatagtttcagatgtgcagaatctgccaagaaactctagagcaaggataaccatctacctgaacgaataatcttgatcaactagtagggtatcatccatttgctgtattatctgagttgttttatggcatttgctcagcaatgtaattactcaatgatgtaccagataaacatcagagtctagctagttcacgcgctttgaatgcatcctctgcaaagttactacacgaagtatgaacacgagggaattgcccagttctaccgacactctctggtcagagatggtgttggtgcacgctccctttccatctttttgagagtcacgtccccttttcaatttggtgtatgcatgatgaatgttgagagtgcacgttagtgaaaaaaaaattgagtttgtgatgtttgtgaggtgctcttgattgaggatgcaacatgccaacaagtatgtacttcatcacatatttctgctcttttgatg

SEQ ID NO: 25390 - DNA, 1654 bp, Oryza sativa
  ref <308>: DATABASE ACCESSION NUMBER: AK100832
  ref <309>: DATABASE ENTRY DATE: 2002-08-28
gacacccatggccatggtgcaatacgtcaccggctacctgtgcctctccttggctctcctcttgctcactctcgtcctccacaaggtggcgaggaaggcgaccggtaatggcgccggcaagccgaggcttccgccggggccgtggcggctgccggtcatcggcaacctccaccaggtcgcgatgggcggcccgctcgtccaccgcaccatggccgacctggcgcgccggcacgacgcgccgctcatgtcgctcaggctcggcgagcttcgcgtcgtcgtcgcctcgtccgccgacgctgccagggagatcaccaagacgcacgacgtcgcgttcgcgacgcggccgtggagctccaccatccgcgtcatgatgagcgacggcgtcgggctggtgttcgcgccctacggcgcgctgtggcggcagctccgcaagatcgccgtggtggagctcctcagcgcgcgccgcgtccagtcgttccgccgcatccgggaggacgaggtctgccgcctcgtcgccgccgtcgccgcggcgcagcccggcgaggccgtgaacgtcagcgagcggatcacggcgctcatctccgactcggcggtgcgcaccatcatgggcgacaggttcgagaagcgggacgaattcctgggagggtctcgccgagggggacaggatagcctccgggttcagcctcggcgacctgttcccgtcgtcgaggctggccagcttcgtcggcggcacgacgcggcgggcggaggcgaaccaccgcaagaacttcgggctgatagagtgcgctctcaggcagcacgaggagcggagggccgccggcgccgtggacgacgacgaggacctcgtcgatgtgcttctcagggttcagaaggaagggagcctccaagtgcccctcaccatgggcaatatcaaagccgttatccttgaactttttggtgctgggagcgagacatcagcaagtacacttcattgggcgatgactgagctcataatgaatccaaaagtgatgctgaaggcacaagatgagttaagtaacgtcatcaaaggaaagcaaacaatatctgaagatgacttagttgaactgaggtacttaaaacttgttatcaaagagaccttaaggttacatcctgtggtgccactacttctccctagggaatgtcgggagacatgtgaggtcatggggtacgatatccccataggtactactatgcttgttaacgtgtgggcaatcggtagagaccctaagtattgggaggacgctgagacatttagacccgagcgatttgaggatggacatatagacttcaaaggaacagattttgaatttataccgtttggagctgggcgaaggatgtgccctggtatggcatttgcagaagcaatcatggagctcgttctagcctcgcttctctatcactttgattgggagcttcctgatgggatctcgccgaccaaggtggacatgatggaggagttgggtgcaactattcgaaaaaagaatgatctttatctcgttccaactgttcgtgtgcctatgtcgactgccctatagctgtttacacttaagagacaaaatatttgtctcatctgtacgcgcctatatgataaactatataacttttgatggattgatgtactcctactttgcatcct

SEQ ID NO: 25391 - DNA, 1037 bp, Oryza sativa
  ref <308>: DATABASE ACCESSION NUMBER: AK100833
  ref <309>: DATABASE ENTRY DATE: 2002-08-28
gtccttcccttcgcctcgtcttctcctccacctccaccaaactcctcccccccccccccccaaccaatcttcctcgaatcctccggctgcgccaccacccaccccgcgcgcgtcgtcgtcgtcttcgtcgtctccgccgccggctgctcgattggcgccggccaaggaagcggcgaggcggattcactgcgaaggcgatatggcggcagcagcaacggcggccgacgccggctccgatccctccgcggccctcgccgccgccgccgccacatccacctgcgcccactgccagcgagaaattccatcgtcaaacattgacttacattcggcacactgcgcacgtaaccttcaaaagtgtgaacactgtggagaaatggtggccagaaagcttatggacgagcactacaatgaaagccatgctccagtaaattgcactctttgcaaggaaattgtaacacgcgagatctgggatcttcataaaagtgaacagtgcccacaaaggattgttgcatgtgaatattgtgagtttgagttgcctgcggttgagcttcatgaacatcaggatgtatgcggaaaccgaacagaattttgtcaaacatgcaagaagtatgttagactacgtgaatggattgggcatgaaatacagtgtcatgcaaatgcaaatgcaaatgcttctgcacagacatcaagtgcccgaatcattccagagagagaagtgcgtcctcctccaccagtaagaccgccacggcctatgcatggtgcacagcacaagcgtctgctcttcacaattgcggtgactggaatcgcagttatgattggttcgatactttttcagagggaggagagtttctaagtccagtgtctatggtctctccccatcgagttgattccaacagcaacagcataaagagttaccttgatgtataatttacccctcataatcagtctataaaatcactttgtttgtttgatagtacagtccctggcatggctttgttaaaagaattgaaataaccatgaagatgcccattattctc

SEQ ID NO: 25392 - DNA, 1836 bp, Oryza sativa
  ref <308>: DATABASE ACCESSION NUMBER: AK100834
  ref <309>: DATABASE ENTRY DATE: 2002-08-28
gtgaatccaaatcggaagtaacccgtcgtcgtcgtcgtcgtcgtcaatttggagaacccgcggacgcggcatgggtgtgcagcaactgggaggcgccggcggcgggcgcgggggcggccggcggagccgccgaggtcgccgtgaggcaccaccgcgccttgcccaccggtgcgccgacgaaggactccgggctcctctccgcgtggatgcaatcaagggaagccacagtacagtctcctgtatggcgcaggtgcgagcatggaatacacccatttggtgaccctaaagcatctgagcatgaaacactacagcaaaccttgacagcactgctgaagttctcttgatttgtgcattaagcgatccacttttatgactactataaaggtcacatggaggcttgagatggacctgctttgctcttatttagctgggcagagaaatattatcattctgggtgaagacgttctctgcgaagagtctagcaaactttgtgttcatccaataggaccaatacagacctggaggcgaatatcgtgcaaataatcctgagatgtcaaagctgccgcgcaaagcagttcatgaaaaaaaaaaaggtgataatgcatacaccatgtaccagcatctgcaaaccgtcctgtcaatgtggaattccccttcccttggagctatttccagataaacaaatgaagctattgcaattgcaatgaatagaacaggagggatactcaggggaaggtggtgagatgttgttgatgagtattctccaatacttgctcatctcaaaagtctgcagaatggagacgctgccacaagttccattaagcagattatgatggtggcactggagctaggccaattagtttgattaagcattctgccggtccttgggaacttggtctttcagaagcacaccaggatggtagggtggatggtggattcagaagttgccaatatgtccttatggctagtgtcatgggcgtggatgaatatggttttggttctgtggctatgaatagctactggatgtgttcaagatgtccacactaatggccctgttcttgatgagacaatccttgcaaatcctgatatatctgatgtaattgaggatgaggaggtttccaagatattataatgttgagagggctgtctgtggtcaagtagcaggtgtcattgcgaagaagtttactggaagtgcagggccagtcttttggatgttttctaactcctggaatactctgcaagttgagagaggccaatgattatgttggaaagaatttgcagggcatgggtggtggagagatggttgtagctcctgtagagtgtactagatagcacaggattcgttcctgacttcctgacgaagctactatagctggaaacgcttgtctgtgttggctactagtgagcaggtatttgtgacaggcaaaacaggtgaaactctcttggtcaatcagtggttgaggtcagggcactggagatcattgctgcgagtacatgatcggtggctgtgtagttggcaaatcctccctgtttcacaatgtaagtcattttagtatttcccatatttatattgatgttaatgaatctagatatattgtgggaaatgttagaatgacttacgttgtgaaacgggggaagtaagtaggacatgctgctaaatgaggatcacagtgttttgtcctgactagtggcggatcgtgagcctaggcaagtttaacaacaaatatagtatacacaaatctatacaaatttgtagatcattttagagtgagcatttgctttgctattttacactaaatcgttataagtatgtacactatatactattgttgtttc

SEQ ID NO: 25393 - DNA, 2036 bp, Oryza sativa
  ref <308>: DATABASE ACCESSION NUMBER: AK100835
  ref <309>: DATABASE ENTRY DATE: 2002-08-28
ggcccttgtcgtccaaccctcctctcctcccctcctcgtcgcggggctagggttacgccccctcctcctcctcctcctcctcctcctcgtgtgggggcatggccgggagcgaggcggcggcggcgcaggaggcggagatggacccggacttctcgggcgggggcggtgggggccccagcttcgagttcgccttcaactcggtcaacttctccgaccgggtgctccggatcgaggtcgtcgcgggggacgacgacgacgacgacgaccacgcgcccggctccagccgggacggcggggccggctcgctctcggattgggcgcgccaccgcaagcgccgccgcgaggagctcctcaaggagaaagagtctgaagcagtcatgccagaccagataaattgcaaagtagaaccagaagaatgtgatgcatatgaagaaaatcaagaagaacctgtagcaatgatggacgactctccacccagtgttggccctgatggtgatgatggaccaagtatggactcaccttggagtggtggggtgagcacaccagttctaagagtaaagaacatttatatcagttcagcgattcttgcagcaaaaagtcctttctttttcaagcttttctcaaatggcatgaaagaatctgatgagaggcaggcaacccttagaattactgattcagaggaaaatgcccttatggagcttttaagctttatgtacagtggaaagttgacatcaactgaccctactcttctactggatattctgatggctgccgacaagtttgaggttatttcgtgcatgaggtactgcagtcagttgctcacaagcttgactatgactacagaatctgcactactctacctagatcttccatgctccatttcgatggctgctgcagttcaacctctgacagatgcagccaaggaatatctttccaacaaatacaaggatttgactaagttccaagatgaagtgatgaacatccctcttgctggaatcgaagccatcttgtcaagtaatgacctccaggtggcatctgaagatgctatctacgatttcttgatcaggtgggctcgcgcacaataccctaaatcagaggaaaggcgtgagatcttgagttctcgtttgcttccgctcgtgcgattcagtcacatgacctgtaggaagctgcggaaggtcctaatatgcaccgatctggaccatgagcaagcaaccaagtgtgtcactgaggcacttctatataaagctgatgctccacacaggcaacgtgctctcgcagcagacgtaacaacctgtcagaaatttgcagagcgggcttacaagtacagacctttgaaagttgttgagtttgaccgaccctacccacagtgtatagcatacttggatctaaagcgcgaagagtgctcccggctcttcccgtcaggtcggatgtactctcaagccttccatcttgcagggcagggcttcttcctctcagcacactgtaacatggaacagcagagtacgttctactgcttcggtctcttcttagggatgcaagagaagggctcaatgagcgtgacagtagattatgagtttgctgcaaggacaagaccgtcaggagagtttgtgagcaagtacaagggtaactacacgttcaccggtgggaaggcggttggttacaggaatctctttgcgataccatggtcgacgttcatggctgacgacagcctcttcttcctcgacggcgtgttgcatctgagagctgaattgacgataaagcaacccactgtctaatgtactgctgccaaactcaagttggctttgcgctcgagtgggtgatagtgcgaaacatcacatgctgcagatatcgtattgttttttttccccttcttctatgcttaaacccttttgttgatagaaactttgcaaatgacaagtggaaaaaaaaaggactaaaaccggtctcttttactggcattgtggaagaagcttatgctgctccagtcgattgtgaaaaggttaccataccagctgaagatatgatatatgagcgcc

SEQ ID NO: 25394 - DNA, 1514 bp, Oryza sativa
  ref <308>: DATABASE ACCESSION NUMBER: AK100836
  ref <309>: DATABASE ENTRY DATE: 2002-08-28
gtccttccccagacactgcactactgcagccccccgaccccgattgatcgcacgtatcgccggcggcattggccaagaactagcagccgcgcagcggatgcaaagcctctcccgctccaccctcctcggcctcgtccgccgccttcgcttgtcctcccctccatcccccgcgccccaaccgcgccgcctcctcttgaccgcctccccgccgccgccgccgccgccgacgacgactgtctgttgttctcgtccggcggccgcgccagggcgagatgctcggacgatggcggtggccctggcggcttctcccgatcgatccatgggccgtgaatcccgatttcgtcatggatggaggagtctgaccagcagctctgaggaaaaaggagcgctgaaagatgtaccggccgctgccatgctgaagaatagaaatgataacgagaagaaacggagtaggaggaggaagcctggaataaccatccttaagaatagcggacaccgtgatggttctatatttaagggcaaccgtggctggaaaatagacttccgtattgcaaaccctgatgagacccagttcgaggccatgatgctgtcagatcctggagattgcaagccagatgaaatagcatgtgttatgcaccaaccatgtcccatgctgcaaattttttcattgaaattggctaaaacttccattgatcgttttccagttgagttgtatggatacatagcagtgcgggatctcatggatccactgcgcaattatgttgtccgtcgcagcagggatgataccattgccgtgaagccgggttctctcatcggaatgactggacccaagcgtggcataaaattctgttcatctgccctaattgagtatgatatgagaatcaagacaggagaacaagaagaggatgatatacagctgattgacggtgtattaggcatctttgatgatctaagcaagccatcgtgtaaaccgttcagaagtcgcattgatggagttggtggggcagttgacatcaccgttggactgcttcccagtgcagtggaggccatatttgaagtttccatatcagaagtccaaagttgtttcgatctcaccgtgtgttcttatgctggtgggttaagccaacaatttaagatctttcagggcaccattggtgagtcgtgtggcttgagaaggtccgtggttgctgtaatgttggatggtatgttgcacctgaggttcatagctcggagaaaaggctctaaacgggatcatgaaattgcttgttcaatcagagcaaagaaacatggaagctccacccaccagttaaatactgagctcgcttccttcttggtcaaggtgaattggtcgacattgcctatgtaaattccttatcttttctgttattccttaaattttttgttagaagagataacctgcttcatcccgttaattccttaaatttttgttagaagagataacctgcttcatcccgttaatgcatctccatcaatggtggatgtttgaaatgacc

SEQ ID NO: 25395 - DNA, 1812 bp, Oryza sativa
  ref <308>: DATABASE ACCESSION NUMBER: AK100837
  ref <309>: DATABASE ENTRY DATE: 2002-08-28
aaacgatctctcctccttccctagtccagactcccgacgcgaccaagcgccgccgtcgccgacgcttccccgccgtcggagatggacttccaggtcgtcgtcctcgccgggggcacctccgagaagctctcgcccctcgtctccaaggatgtccccaaggcgctcctccccgtcgccaaccgccccgtgctctcctacgtgctcgacctcctcgaggccagcgacctcaaggacatcatcgtggtggtggaggggcaggaggccgcgcgactcgtcggagcttgggcctcgagcgcctacctagaccgccttctcgtggaggttgtggcagttccagaggacattggaacagctggtgcactacgagctatttcaaagcgactgactgcaaatgatgttttggtgattagcggcgacctagtaactgatgtacttcctggggctgttgctgctactcatagaagaaatggtgccgctgttactgctttactatgttctgttcctatcagtggtccttcagatgctgcttcttctggagggaaagataaagctaaaaaaccaactcgactgaatatagttgggctagacataacaaggcaattcttgttgcatattgtatcaggaaccgatgttggaaaagatgtacgtgtttacaagcgaaaaatccgagctgtaggcgagatggaaattcgaagtgatctgatggatgcacatctgtatgcttttaagaggacaacattacagaatatactggaagagaaagaatcataccgtagcattagacttgaagtcctaccatacttagtgaggagtcagttgaaatcatcttcatcaggaggtgagggaacaaccgttgatgaaactggcgatactacagttccatccaatagtcatttgcagtgtctatcacagcatcgcatacttgcaccatctgcttttaagaaagatttgttatcatctggaggaacatataggtgctgtgtctatattgctactaaaagcaagtactgtcatcgtttgaactccattcaggcatactgtgatatcaaccgagatgttgtaggggatgctagtcacttgtccggttattccttctctgcacagaacaacatcatccatccaacttctgtgcttggatcgaagactacaatcggaccacaatgcatgcttgctgagggttcacaattaggtgacaaatgtagtgtgaagcgatctgttattggccgtcattgtcgaattggttcaaatgtaaagattgtcaattctgtcgtgatgaaccatgtggttattgaagatggttgtcacatacaaggttctgtgatatgcaataatgtgcaacttcaagaacgtgctgttttgaaagattgtcaggttggtgctggttatattgtaactgctagcagtgaacacaaagcagaatctctcagcaagaaagtagagcgattttgatagtgtggttgaccttgaacaattttgtttgctaagtcagatacagccgtacaaggagttaagaagggagggggtaacatgtatttcgaaaaaatgatttcaccgtgataccccaaaaaaatagtgtgctcttgtctattctaacagattgagcttggacttgacagttgaagcgcttctagcgagattgatccatgatattatgagtaaactatgtgtatccgtttgttggccctgttcctgttattgatttgtaattttcttgtcaatttgggtggtacagtaattcatttggtacaccaaggtggttcttgtcgctattttgtaatacattatgttagctttgggcggcttactccctcc

SEQ ID NO: 25396 - DNA, 1484 bp, Oryza sativa
  ref <308>: DATABASE ACCESSION NUMBER: AK100838
  ref <309>: DATABASE ENTRY DATE: 2002-08-28
ggtatcaaggagacagcttagcttagctgttgttgttgcagtccagtcagagagcagagggcactgcaccgagaggatcgagcttccaagaacaagtgaagctagcatggggtggtggctcggaggtggcctgccggtcatcgccatgctggctctcaacgtcgtcgcggcggtgttggtgtcgctcgtcaaggtcgccatggacggcggcctcaaccctctcgtcctcgtcactcttcagcagctcacggccgccatcttcctcggcccaattgcctacttcaaagagaggaagtccaggccaaagctcacactggagatcttcacttatctcttcgtcagtgctgcgctcggggcagctctaaggcagtacatgatcttcgttgctttgagatacaccacggcgaccttcgtcactgccatctccaatatcgctcctgtcctcacattcttgcttgccatcctaacacggtcagaatcactgaacctgaggagaaagacaggcattgcaaagcttgtgggcacgctgatatcagtagcaggagccatggtgctgacattttacaagggcgtggctgtcacccacacaaccaagatccaccatgcaacagcagcagcagcagtagcagcagaagcagccatgagcagcaggaactggacgctgggcacggtggccatcctgggcaactgcgtgtgcctctcctgctggttcctcctccacagcaggctcgccaagaagtacccccatgtctactcctgcaatgccttcatgtgcatgttcagcttcctccaggtggccgtcgtcggcctctccacacaacgcaacgtctccgtctggatcgtcaggaccaagttccacatactcaccatcctctacgccggtgtggtggggtgtggcctttcgtttgtgctactgacatggtgcatcgagaagcgcggtccagtgttcgtcgcagccttcattccggtggtgcagatcattgtttcagtgattgacttcactgtcctccatgaacagctcttccttggaagcgtgctgggatctgtacttgtgataggtggcctttatcttctgctgtggggcaagaggcaggaggccttgcacctccctccaaaagttgctgaacatgataaagagcagcaacagcaacagcaacagcaacagcagcaacaacagcagcagcaagtgcaactctgaatgaagagtggtgacagcgtcccctttgggattttaacaaataagttctccaccaacttttttttttgtcaatcagggcagccatgttgttgtacaattaatccgagagcactatcatgcatgaagttatttaggttttaattgatccaaagaatactagaaatgatctaaaccaacactgagttaattagctaccacttcagaaatagatcctgtatgcaatagtttaactgcaaccatataagaattctacgtgtgatttatggataaaccgtgtaattccatg

SEQ ID NO: 25397 - DNA, 2054 bp, Oryza sativa
  ref <308>: DATABASE ACCESSION NUMBER: AK100839
  ref <309>: DATABASE ENTRY DATE: 2002-08-28
gcccgagtcgtcgccgcctcgcaaaatttccgacgcctcctctcctctcctcctccgccgcgccattcttcgccgccgccgcccggctccggcggcgccatgggctccaccagaactccttctatagccattcctgtggattcagatgcctctcctaggaaaaatacgccagagactgtaacaagtcctcttgtgaatggtgaaaagagtattttccgggatcaggttagaggatacagtgcacttgggagtcctttgaggagagaagttgggaacagatctataacaagatccttctgtattgacaacactgacttggaagatggtaaggctgaaaaagacagagataggccttcacatttcctcagtctcccaaagatacagaatcaggctcttctatctggtcttgcctattgcatatcatcctgcagcatgattttagttaataagtatatcttatctggctatggtttcagtgctggaatatttctgatgctttatcagaacattgtatctgtgactatagtgtccactctatcgctctctggtgttatcccaactgaaccactaacttggaagctaatcaaagtttggttgcctgtgaatatcatatttgtcggaatgctaattacaagcatgtttagtttgaagtacatcaatgttgcaatgctgactatattgaagaatgttgccaatgtattgactgcttctggggagacatacttctttaaaaagcagcatgacagacaagtttggatttctctcacgttgatgataatttcagcaattgcaggaggaataacagatttgtcttttaatgcaattggttatacttggcagatcttgaactgctttctaacggcatcatattcgcttacattacggcatgtaatggacagtgccaagcaagccaccaaatctgggaatttgaatgagttatcaatggttttactgaataatattctttcagtaccacttgggattatcctcgtgcttggtttcaatgaagtggagtacctttttgaaacgcctctcttaaggatgcccatgttttggatagtcattactgctagtggagttttggggcttgctatcagctttacttctatgtggtttcttcaccagtcaagtgcaacaacatataggtactgaatgaattgtagtggctttttaaaaaatgtttatcttcatgtgctctgtcttcatgaatttctaatgtcaatattgctcctgatatagtcttgtgggctcccttaataagatccctctctctattgctggaatccttctcttcaaagtgcggacgagcatggagaattctttcagcattttgtttggtaggcttttttttaataacaagggaaaaggtactatgttatagatatcacattcactaataagattcatacccattatcgtgcaggtttattggcaggagtattcttcgccagagccaaattgcttaataactctcagtcctagtcgtaggccaagctttataggttatacaaggcagaattattctagtcagtcagattcagaacaggatgctcgctcggattatgttcctgggaaatttgtgcagatgtaaagatccttctccagctaacaagaagagagattggcaacacatttgttactatggggccatggggctgcttcagttctttttcctcgaaatcagtatggaccccctgttgtcgctctcgtggttgtggtatacgtcctcactttcacttacgatcgaaaggccgataatactcaaatgcaggcagtttggggaaaaaaaaaaacaattgacgggtcgccgcatttgtaatgttgtgaaattgcagcggttggatcgaaatgggattggtgtttttgtgcgttgcacggctgcttggcctgctgctgtgttgagtatactgtatatacttgtgcagtttaattttgtgttgcccttccctatatgttcttctacaccgtgtagggctgaaggaaaatgcccaagctcctcatgtgcagaactcaaactcatgggatacagtgatactagtgcagaatttgaactg

SEQ ID NO: 25398 - DNA, 3820 bp, Oryza sativa
  ref <308>: DATABASE ACCESSION NUMBER: AK100840
  ref <309>: DATABASE ENTRY DATE: 2002-08-28
ggctgccctgtggagcctcaaattctactcgcgtaagtccatcttttttttttactgagtatattacacgcttcacacgaatttctcttttttttaaactaaacgaatttctcaatcttgttaatttcatccgtgctatactggaacaactgtaacaattttgggggcagagaattttggggggagggaatcaatcttgcaccagttggtctcctttagaatctggatatggttctttagattctttctgatgtttttgttagaggatggtgtgatggtgcctttctttttagtgtttgtttgatctggaggggcattagaggtggtgtttttgggttagatggggatcttgaagtgtgtgacgataatcatttgggggtagttttagatctgccggttttgtgtttgtgttcttggggttgattgtttccagattgttggtgtgcttatagggcctaggggtgagaattgagataagaagggaaggtgatatgctgaaattatgtttgatttatctctgatttgtactagaccatcaactttgctacagtactttatttgattaatagttaggctgtgaatccatgaaaatatgcatcatttggatttgtcaatattttttttgcatgtatgcttcaggttcttttgcatcttcagctccacatcaggagtgatccctgttacttggtgccaccactttctctgctaagtgattctttatttgtgataatttaaaattaaaatacaaaacactatttttttactacaagaaatatgtagatgcatgcacagaaaaacaatcacagttgcctagccatatgaactaaaattttagcatatcactacttataacaaaagtacgttggcacatatatatatatgaggaggcgtttccagtagaaattttgattgggtcatagatttgttgttagactcttttctttgagcgtcgtgaattggagtaggaatttacatatgttgtgattttctttggaattaaagtggattacttttaaagtttgattttaaagaataattttagatagacttttatatgtgttctaagaaattattaaaatagaactagacaaacaaagtggtaaagaaaacccttgaaataaatttagaattaagtcaacttcgattatatatattcgtagttcaaccagcattcatcatgcaataaagtaatgattttatttataccctgagtaagttttttttaaaataatttatcacccatataaaggaggcaattctcgctctcactaacatattgaactatttttgtcactaaatgtggactgggatagcaaattgtatccaacttaagaatgtcatattaccaaatgtcccagttataaaataataattatatttacacaccatgactttgtaaaataaaatactgtaccttttttttaagatgacttgtcattttcttttcatgcagccttattagattatgttgtactatcaaccaaaactaatgtcttgccttgtactgtttccacgttcatggctgatggcctcatgggccaatgaccttgggggttgctaaaagtcagaggagcctgatcccaatatctcatattcccagggacccctccgtaaatttgtgtttttgcccacgaagaaataggaaatcgtctcgccgttcgccaccacggtgactcgactagtatttcccctcgctcgccgtcgactcctccgctcgccgccgccgccgccctcgccgtcgccgtggcctccgccgatccgatcccaatccatcccggcgaccgcgagcagggcgcggggcttcgtcgttcgtcctgctgattccgccgcatcgcgtcgcggttttcatgactgccctatagatcagctcctgattggaaggactgtagttccatgagatagaagggcatattgaagtagaatttggcctttggtgaatctaaatggacagtggcttgggaagaagttcagagacatccttgaaagccttgccatcaatggcaagtaatgcaacaaggaatactgatcctgaccaacagggtgttcgattcagttccatggaccagcctccatgttttgcaagacctggtcaatcgttccctgcttttcctccactctttggggttcagtcttccagcttgtatttacctgatgacattgaagctaaaatcggtaaccagttcgaatcaaatccttccccgaataatcctacaatggattgggaccctcaggcaatgctgagcaacttatccttccttgagcagaagatcaagcaggtaaaagacatcgtgcagtctatgagtaatcgtgagagccaagttgctggtggttccagcgaggcacaagcaaagcagcagcttgtcactgctgatctcacttgtattataattcagcttatttcaacagctggttccttgcttccttcgatgaagaacccaatcagcagcaacccggcactcagacatctcagtaacacactttgtgctcctatgatcctgggcaccaattgtaacctgcgaccaagcgcaaacgacgaagccacaattcctgacattagcaagacccatgactatgaggagctgatgaatagccttaatactactcaggcagaaagcgatgagatgatgaactgccaaaatccttgtggtggggaagggtcagaaccgattccaatggaagaccatgatgtgaaggagagtgatgatggtggtgagagagagaatctcccccctgggtcttatgtagtattgcaattagagaaggaggagattttagcaccacatactcacttctgcttgatctgtggcaagggttttaaaagagatgctaatcttaggatgcacatgaggggccatggagacgagtacaaaactgctgcagctcttgcgaaaccttcgaaagattctagcttagagtctgcaccagttacaaggtactcgtgcccatatgttggctgcaagcggaacaaagagcacaagaagttccagcctctcaagacaatcctgtgtgtgaagaaccactacaagagaagccactgtgacaagagctacacctgcagccgttgcaacaccaagaagttctcagttatcgcggacttgaagactcatgaaaagcactgtggccgcgacaagtggctatgctcgtgtggaactaccttctcaagaaaagacaagttatttgggcatgttgctcttttccaagggcacacgcctgcactccctatggatgatatcaaagtaacaggagcatcagagcaacctcaaggcagcgaggcgatgaacaccatggtggggagcgctgggtataacttccccggtagctcatcggacgacatcccaaatcttgacatgaagatggctgatgatccacgctatttctcgccattgagctttgatccttgcttcggtgggcttgatgacttcactcgacctggatttgacatctctgagaatcccttctccttcttgccctcaggatcatgcagcttcgggcagcagaacggagacagctgatcgaggccaacgttaacgatgacggcaatggccttgcctacctttgtgtaccttgtctagccctattcttcctctgttgaaggagccattttaggtcattccttcttcctgaagtgtactttattttatgatcatcagtaatgatcaagtactttttatctttccttatagattgagatagcccaatcttggtatatatatgcaagaagcgtttctaattatctgaattggtgccattgttgtagtgcctacaccttgtcataacatgacatcaacatgtacatgacaataaaattctctttctgatg

SEQ ID NO: 25399 - DNA, 2160 bp, Oryza sativa
  ref <308>: DATABASE ACCESSION NUMBER: AK100841
  ref <309>: DATABASE ENTRY DATE: 2002-08-28
gtgagtgcttactacctgatgcaaatggaatacatgctttactctcttgttactatttaattatacaacgctgacaattgaaggagggtttgctggtgagtgcttactacctgatgcaaatggaatacatgctttactctcttgttactatttaattatacaacgctcttggatgatgcatttttggagtatgctagttggattatctgtagtatattggaaagcatgtactgttagattaatgtttttctttttgagttttcaaaggctttgaaagttttctggcctaaaaaataagagtttggaggaagagacatctctccaaacaatttttaagaagaaattgtgagcgtgttggagattgaacaaaaaacgtcggggttgaaaccacacactccttgcaacttcaccatcaagtgcatctcaaagttttctggccaacatctagttaatgtgtacaggtattgttgttgatttgtttgctgatgggaagatcatacctcagctacaagaagtaaatttcctctgcatctctttctattcattttttaccagtctatatgctacgttggttgcatcagatttcatgcttttgagcatgtatttcttattccttggatcagttgaatgcatggtcaagcatggatgaaattacttgatatctacatatcttgaagtttgtaataaattttaatttatctcatgatgtgttgatttattacccttagtttggctggcttgctatagtgatatgtgaatttgtcgacaaaaaatcttatgcatcccaatatcaatagagggtgctttggatacaccaacaaaagtaagctacttgtgtgaccttagtgttcttaacaaaaaaccttacgtgaccttagtgtcttcggcatccatggattactctcctttgcgacccttcctttcaagcctaattgaccaaatggctgatatgattctctgcaattgaaataatttgaacaatttttcaaaacatgtaaaagtgcagctgagagaaaattcctggacgctacttttgtatatctatattcttttaactttttggaacacttccacagttttttattttctactggatttaatttcaacattgttacaggttgaaacctggttggaaatcgcgaaaaagctaatgccagatggacggatcattgttaactgtggtggagctgatgctgctgtatctcttgctaatgatacgggcctttcgtcctgggttcagaattccacaattaaggcactctgtgctgcatttccggggcagctcaactggaagagactatcagagaaagagagtgtaaattacgttgcattgacgggtcctcttccaaacttggatgagtggtctacctcagttcctagtgagatgagcacaaaagtgaaacagtgggtaccttgcgaacttgcttgaggttgagaatgaacaatttcttctagatgtaccctatttgcttcaacaacttgtgtgccccctctgttgatggctctctttctgtgtgttttaggcatatgcctctgatgcaacactgaaatgttcaaggaatagaagtgcaaggtaattgagccacactcaaattttgtttctgaagttaagtagcatagcgaagtgaagcataagttgaactcagtgaatgtgcgaatgttggaaggttgtcaagacaaacaagcagcacgaagttcagaacatactacacgacagttttgtcatctcttactgttaatattcatgcatttttgtttgaaggaaaaatccatgtcagcttcgtaaagtgacaaattggtttgtctgaacagctgtccagtagctttcactgacaaatactgttcgttagtagctttcactgatagatgcatggatggtacttcccccttcatgagggctctgaagaaagcaaccatgctgtactgctgcttgtgtgattgagcagaatcaatgcaccggaggagtaacatgcctccatgccggttgcgctctgcatacttttttctgttctagattgattgtgacgatatatcacatgcctggtaaatgttcagggtattaagcgcatgcactataatgaatgatgatgctcgatggcatgatcttgttgtgctaacttgttgggttacttgatggaaatcatggaactctatgtctct

SEQ ID NO: 25400 - DNA, 1386 bp, Oryza sativa
  ref <308>: DATABASE ACCESSION NUMBER: AK100842
  ref <309>: DATABASE ENTRY DATE: 2002-08-28
gtgccacctcctccacccacctcacccaccacctctctctctactcctcctcttctcctcctccgtctcgagcgagctctctccttccttgtctcgggtctcggcattgcatttgcattggggggcattgctattgcttcgcttgcgcttggccacccaccatttcggcgcggagaggagaccgcttcacccgccgatctgcgagaaaccctctccgcctcgcctcctccacctcccaatcttaacccaacctccccccttcctctcgcgtcgaccccttgctttgctcctccttcaaccttcttctttcttggagtttcttgagagagagagagagagagagagagagagagagagagagagaggggggagcggtcgcaggaggaggaggacggcggcgtctgctgcgaccgacggggagcggcgaggatgagcgcgtccaggttcataaagtgcgtcaccgtcggggacggcgccgtcggcaagacctgcatgctcatctcctacacctccaacaccttccccactgattatgttccgacggtgtttgacaacttcagtgccaacgtcgtggttgatggtaacaccgtcaacctcgggctatgggacactgcaggtcaggaggattacaacagactgagaccactgagttatcgtggagctgatgttttccttctggccttctcgctaatcagcaaggccagctatgagaatgtttcaaagaagtggatacctgagctgaagcattatgcacctggtgtgcctatcatccttgtgggaacaaagcttgatcttcgagatgacaagcagttttttgtggaccatcctggtgctgttcctatcaccactgctcagggagaggaactaagaaagcaaataggcgccccatactacatcgaatgcagctcaaagacccaactaaacgtcaagggcgttttcgatgcggcaataaaggtggtgctgcagccacccaaggcgaagaagaagaaaaaggcgcaaaggggggcgtgctccattttgtgatctaatcatcagtagacgacgaagaagaagaacgatgaagttgccaggctttattattgttgcgtcttgcttcagcgaaacagcattcatggtccggggatcctagtttactggcagctgcagcaaggcctctttgtcgaggcaatgagcgatccgtttgtttcattttctcctttctgccttgtgattatctcgtgtgactgacaagtcgtggcaattaggtaactttcctagatggtatttcctgtgtttgaggaaaaaaattcttgttatccctgtttcataagtagacatgatgtaatcgcactcagtttattcttttccttcttatttcacttcaatggaaaattatgtttccccttc

SEQ ID NO: 25401 - DNA, 700 bp, Oryza sativa
  ref <308>: DATABASE ACCESSION NUMBER: AK100843
  ref <309>: DATABASE ENTRY DATE: 2002-08-28
gaatcgcatccatctctccagaggcctccatccaaagccgcgcaaaacgccaccacccacaccacgctgcactcgcgacgcgagggaccccgccggcggcggcgcgaggaggagaaggagaaggagagagagagagagaggatgatcctggtggcgatcgtggcggagctgctggaggagtacacggcggcggtggcgcgcgccatggagctcctgctgtcgcgggcgccgccccgcatcttcccgcgccgcgtccgcttcctcgtcctccggagcctccccttcgcctcgccgccgccgtccccgctctctcccccgccacccttcaccgtcgccgccggcacccgctgatcgatcgatcgatcggtccatgacggctccacgtacgtacggcaaccagcaaagacagtacgctggctgctgaagtagtctcgccttcgaatcatgaattaacctgctcgcgcgtgtgcatagttcaactcgtgatgtttgtagcagcgtgctagattactagctagttgttgtgttcttgcagcttagtaattaattaatcatttgcttagcttctgatcctgaaaaagcttgcatgtagttgtagcccagcgactgagttacggtcacgggctcacggccagttgactcggagcgagaagatgtgtgtaatctgtgtgaggttttgaattacttgaagaaaatttgg

SEQ ID NO: 25402 - DNA, 2162 bp, Oryza sativa
  ref <308>: DATABASE ACCESSION NUMBER: AK100844
  ref <309>: DATABASE ENTRY DATE: 2002-08-28
gaacctcgcctcccttccctcgctcttcccaagtcacagctacgcacgcacgcacgcgcaccacgaaccagcacgcgcaccacccaatggcggacgacgcgtacgacgacctcccaatggccggcgcggaggaggaggtggacgacgtgatgaaggacgagctcgacgaggagggggactcctcctcccccgtggcaatgaaggtcggggaggagaaggagatcgggaagcaggggctcaggaagaggctcctcaaggaaggggaaggatgggatcgccccgaatccggcgacgaggtccaagttcactacaccggcactctcctcgacggaaccaagttcgattccagccgcgatcgtggaacccccttcaaattcagcctcggccaaggggaggtgatcaaggggtgggatgagggtatcaagacgatgaagaagggggagcaggcggtgttcaccgttccgccggagctcgcctacggcgaggccggctcgccgccggcgatcccgcccaacgccacgctgcggttcgacgtcgagctgctctcctgggccagcgtcaaggacatctgcaaggacggcggaatcttcaagaaggtgctcgccgagggacacaagtgggagaatcccaaggacctcgacgaggtgctcgtcaagtacgaagcgaggctcgaagacggaactgtggtatcgaaatctgacggtgttgagtttgctgtcaaagatggctatttctgcccggcgctttcaaaggctgtcaagacgatgaagaagggcgagaaggtcctcctcactgtcaagccacaatatggctttggtgagcaaggcaaaccagcttctggagctgaagctgctgtgccgccaaatgctaccctgtacgtcgatcttgagttgctctcctggaagacggtcactctgatcggcgacgataagcgcatcctgaagaaagtcctcaaggaaggggagggctatgagcgccctaacgatggagcagtagttagagtgagatttatcggcaagttggaggacggcactgtgttttccaagaaagggcatgatggtgatgagccatttgagttcaggacagatgaggagcaagtcatcgaagggctggacagaactgtggtcaccatgaagaaaggagaggttgcattggtgagattaccacctcaacatgctttcggatccactgagactaagcaggatcttgctgttgttcctgcaaactccacagtctggtatgaagttgagcttgtctcattcgagaaggagaaagaatcatgggatttgaaggacaatgctgagaagattgaagcagctgccaagaagaaagatgaagggaatgtgtggttcaagatgggcaagtatgctaaggcctccaagagatacgaaaaggctgcgaagtacatcgagtatgacagctccttcactgatgatgagaagaagcaatcgaaagcactcaaggttagttgcaagctcaacaatgctgcttgcaaactgaagctgaaggaatacagggaagcagagaagctctgcaccaaggttttggaactggagagcacaaatgtaaaggccttgtacagaaggacgcaggcatacattgagcttgctgatctggaactagcagagttggatgtcaagaaagcactggagattgatcctgacaacagggatgtgaagatggtgtataagacattgaaggagaagatcaaggagtacaacaagagagacgccaagttctacggcaacatgttcgcgaaatggaggaagctggaacacatggagaacaagaaggtgcctgggaagcaggaggcacagcctatggccattgacagtgccgcttgaggattagctctgctttcttttttctgaacctggttactgctagtactactgtctctactggttgtatgagtatgaaatatgaatggaaaatggtagttaatttgccctttgcttgatagttgcagtctttgcaactctgcacccatatgtgctcagctttgtacgagaagtggttgccgtcatttgaagatgtgatgctgtgattgtattgtggtgttagaagagcaaaaatgccataacgacactttggactgcgctactaatgttgttctttcttgtttctattgcaatatggtataacatctgtgccttgtacgc

SEQ ID NO: 25403 - DNA, 905 bp, Oryza sativa
  ref <308>: DATABASE ACCESSION NUMBER: AK100845
  ref <309>: DATABASE ENTRY DATE: 2002-08-28
gaaatccccaaatcctcctccctcatcagtcgtcacgcccaccaccccaccaaatcctcccttcgtcatgcccggcgccggctctcccctcctcccttgccggcgtcctcccctcctccctccgccagcgcgcttcaatgaatgcacggcggagtggccagcgagctctcggcggcgcggatggaggctgggtgtggccgacgagctccccgcagcaggcctcaacgccggcgcagatggcgatgagctcggggcggatctggcggcttcgacgcctcctcaccggcatgggctcggccggcgtctccctcctccctctgccggcatgagctcagccggcgtccctctcctccctccgccggcaccagctggcctcttccccacctcagccacctcctcggggccgagcagcgccggctctcctctcctcccttcaccggcggcggcgcggatctgggcccatcctccctcggccaacgacgagccgcttgtggtcgtcgtcttcctcgcttcgtctccacttccggctggcgacaaggttttggaggcggcggcgcggagcggagcacgggaacgacgacgaggtcggcgacgcggagcgggagggcgcgaggtgacagcgagtcggaggcacgccctccacaatgcaggttccagccgtttctccgccacgcgtggtcttgcgctagcgagaaatcgcgcttccctgtgtgggggcgaggagctctggtggggcgcgcgacctagcgccacgcacgcgcaaatccgagctggcgacgtgaggtaacgctccacgtcaccgcactgtgaaaggccttagaacaaattgtgaagatgcactgaacatcaaaagtgtgtaaataaaatgttatttccattgaacttctaaaaagttaaaatatccc

SEQ ID NO: 25404 - DNA, 2192 bp, Oryza sativa
  ref <308>: DATABASE ACCESSION NUMBER: AK100846
  ref <309>: DATABASE ENTRY DATE: 2002-08-28
gaaacaaattcacaagaagcctttcttccccaaggtagaggtccgtccgaccgtcggagaagatggggaggggcgacgaggcggagaaggaaggcaagcgccgccgcggccgcggccgcagcagcaggagatcccgcgacgcctcctccgaccccgaccccgactccgcctcctccccttccccatcctccgcctcctcccccagccgcagccccgaccgccgcagccgcagccgcagcagcggcagcaagcggaggaaggcctcctcctcgtcacgccggcatcgccaccaccaccacaagagcagcggccggtcccgccgctcgcgcgacgacgacgatgaacggcggcgccggcggaggcggcgggacgaggagcgcgggaggcgcggcggcgatgcgtcggagtcgtcgggatcgggctcggaggagccggatagggcggaggaggcgcgggagatcgtccgcgacatcctcggtgatttccccgccgtcgccggggagctccgtcagcttcttcaaatgatagataatggtgaaggcattgatatttctggaatttctgacaagccattggtgaagcgcctaaagaaacttttcagatcacttaaactgagagaaagctcaaatggggcttacttgttgccaccaaagagtgtacccacccttgatgttgttggatcagcattagtagctagcggtgaactggctgataatgaaaataaaaatccagcgtcaccaactagacaggaacaaccatcatccaattttgatgtgcaaaataaaaatgatagcactcctgaagagccagcgaaaaatgatgctgatgaacgaccccctaaacggagggtaattggtcctgctatgccatcacgcgagttactagctgcagctgctgaaatgacagaggctcttagatcccgggatgctgaagttgaagctgatgatggttttctcataggccccccaccgcctgccatggtcgctgaagcagcatctgcaaatgaagctgagcgatttgaagaggttactcgaatattggcggcggatgagaactcgccatatgatgttgtgggcatcaattggaagatgtcatctgataacatcaagaaaaggtactggaagttatctcttctagtgcatcctgacaaatgtcctcatccttcagctcaggaggcatttgtgaaattgaataatgctttcaaagacttacaggaccctgaaaagagaggtgtgatagatgagaagataaaaaagaaagaggagatggaacaatttgaggtcgagcttaaagcaatgcgcggggccgcagaatggaggcggctacaaggtgtatctcttgagggtgatgatgaacttctggcagttccaaaacaggcacaggcacctaaaagagatgaatggatgaccacattgcctcctgaaagaaaacctggagtaccaatgcattcgactacgtcatttagtatgaatggtaaagaaggacgtggtgatacaagtgtctggacagatactcctcttgaaagagctcaaaaagcacaacagaactacttagaagcctacaacaaagcaaaggcaattgcagatgcagatgaagaaaagattaaaacctcagacgcttcattggtggatacatacaattcctccaagcgatcagtatctctcgtgcaaaagcatcgagaaagcaaaaaggagaaaaagaagcagaagcagcgggataaagaagaatgggaaggaaaccacccatggaagccttgggaccgtgagaaggacctgactgctgggcggcaaaatgtcaatttagatcctgagaacatggcacaaggattgtcgtcccgattttcgtccggagccgttcagaggaacttcctctgagccattttgagatgatcggctaatcacagatgaaacatcaccatgttggtcaccagtacgctggtatgtatttgctgtaaggttgcataggatgcttgttagttatgatgttaagatgatccatgttataagtgtaacgtatgttagatgggttgggttcgcatgtccatttcccagaaatgaatatttgcattatcgagagagagctctagctacctatctctactgaacgactgtgcataccggttgttttgaactgtatatgaacttttccagacagtttaatggtacctggtacttaatggtacatccttaagg

SEQ ID NO: 25405 - DNA, 1094 bp, Oryza sativa
  ref <308>: DATABASE ACCESSION NUMBER: AK100847
  ref <309>: DATABASE ENTRY DATE: 2002-08-28
gatcgcttcccctatcaaccctcagaacccctcccctccccccccccccccctcccccgaaaacctccgcccgccatggcgaccgccgcccaggccgccgccgcggcgttcctctccttcctctcctcctccccgccgcaccacaccgcgccctcatcctccgtctccttcctggcagcccgtgtgctgcccgcctccctcagggccgctgccgcggggtccccaacttccgcctcccgctcccggggccgaggtgtcgcggccgtcgtcgctcagctccccaccgcgaatccagaggtggcttctggggagaagaagatccggtggtcatcacgagcggtgaggtcatttgcaatggcggagctggaggctcggaagatgaggtacccaaccactggcactgaaggactcctcatgggcatccttgtcgagggaactagtgatgcagcaaaacttttgcgtgctaatggaattacgctgctcaaagtgcgcgaggaggcagcaaatgtgcttgggaaatcagaaatgttctactttagtcctatgcacccaccattgactgaagctgcacaacgagcgcttgattgggctatcaatgaaaaactgaaatcaggtgaagatggagaagtaaccgccaatcatctgctcctggggatatggtcagataaagagtcagctggtcataaagtattggcttcccttggttttgatgatgagagagccaattcactggccaaaacggctggtgaagaggctgctatgagtcctagatagcaaaaggagccttatagtttactactgaacttccctgtgatgcaatgtgcttgcgtttggaacctcaagtaacttcttggcgactccagtatcatggcccacgcattaagttaacttgaagagattgcttctacaagttttagggctttattaagattgttagactgaatgaaatatgtcagactcccctattgcccatacctgtaaaagcagtgcaatgtattttcaaaatgagcatttctgttgcttgctcagctggattggtgcaattctattaaaagatccttttgaaagataaagattttgaacgggttcagagc

SEQ ID NO: 25406 - DNA, 1446 bp, Oryza sativa
  ref <308>: DATABASE ACCESSION NUMBER: AK100848
  ref <309>: DATABASE ENTRY DATE: 2002-08-28
gtatgtgactcccgtgatgaccgcgcgttgaccacgcctcgctcctctcacgctgctcctcctcgctgattccaatagcgacggcgattccaccgattccgccgctgttggatctccactaattccatcgattccaccaatttcgccccaaagcggtgactccgccacacaaaacccagccgcgatgactccgccgtgcgcatcctctctcgcttgctcctcactcgaccagcgctgagccaccaccgcacaatcgcatccccttccgccggtgccacgcctgggactgcccccgacgactatggacgcacgcccccattgctcctccgcaaatagctcctgagcttcatgcgaagcccgcgccggccccacaaaagtctctcctccgagaatccctccccacggaatccctaagctcctctctcttcctcagggagcgtcgccgatccgtcggtcgctgctcaccctcccgtcgccggatcccctcccatcatcggctgccacccggcgtctatcgccgtcgctgttggatgcaggtcgttgtccggcgttgactgccctcgctattggatcaaggctgtcgcccatcgtcgggcgtcatcaactgccaccgccgctcgctggctcgccgcccgatcgagcaggccagcacccatctccagcgcccaccaggtgaaccaggtacagaggatgtactggaggcgtgggggctaatcactaatcagtcagatttttgtggatcgagcttattacctgagttttctcctcttcggtgatggagccggttcaggtgaatgtgctcttatcctgatacgtcatagtgaatcattgtggaatgactgaaatctgttttattatggaatgagcaaaaattgtttacttgcgtcgatgtcgagaaggctatatatgtcgggagctgtttggaaaatgttttaaaacattattgggaaagtattttgcggggcagtttggaaagggttttattggagcaacgctgggaattgtacttttattggatcaataatgattggaaaggattttatcggagaaatcttgattaggaaggcattcccatgagttgcaaatccaaggaagttaataacaccacttgtctacagtattacaagttaattgatttattccattacgagctaaagcccactgtttgatattgctttatcccgctgctttgccattagaaccaacaaaaggaggaatgccattagctgaggcagattcaataccaaagttgattgtttgattctaaacgtaattatcatggtttcttctggtcctttaatggtgatattaagatttgggcaaaattagtacaagagctacatgtccaaaataccttggtagcttcccacttctactatctctccaatttactcttaaattgtatgatacaacattatcaagtttcatagtagttattttggaccc

SEQ ID NO: 25407 - DNA, 2279 bp, Oryza sativa
  ref <308>: DATABASE ACCESSION NUMBER: AK100849
  ref <309>: DATABASE ENTRY DATE: 2002-08-28
gaccctcgcgccatggccacgccacgtggccatctccccgcctgcgtcgccgccgtcgcggcggcggcggcgctcctaacctccctcctaccgccgcccgtcgcgggccagcccctcggcaacttctgcggcgacagcggcaactacacggcgaacagcacctaccagggcaacatccggagcatctccgccaccctccccaagaacgcctcctcgtcccgcacgctcttcgccaccgccaccctcggcgccgtcccggacatcgtctacgcgctcgcgctctgccgcggcgacaccgccaacgccaccgcctgcgccggctgcgtcgccgccgcgttccaggacgcgcagcagctctgcccctacaacaaggacgccaccgtcttctacgacgcctgcgcgctccgcttctccaaccagaacttcctcgcctccaccaacggcgacaacaagttcctcatcctcatgaacacgcagaacgtgtccgcgccggccaaggtgttcgacgccgccgtgggcgtcctcatcaacgccaccgccgactacgcggcggcgaactcgtccaggcggttcggcacgggggaggaggggttcaacggcagcaagatttacgggctggcgcagtgcacgccgacatggcgacggccacctgccggagctgcctggggggaatcgtcgggatgatgcccaagtatttcagcgggaagcagggcggcagggttctcggactgcggtgcaactacaggtacgagatatatcctttcttcgacggggtctcgctgctgcagctcccggcggcatcactgggagcgccgccggcgccatctccggcggccgtaaacgtcacgccgccggccaccaccaccggtaccagacgacgagggaacaccactggtagggttttagccattgcattgcctatagtcgctgcaatactggctgctgtagtaatttgcttttatatctggaagaggaagacggaacgagcaagaaagccatcaatagcagatccaacagacccagcggacatagaaagtattgattcacttattcttagtatatcaactttacgagtggcaacaaacaactttgatgacagcaataaacttggcgaaggaggttttggtgcggtttataagggagtcctccctagtgatcaagaaatagcagtgaaaaggctatcgcaaagttctcgacaagggatagaggagttgaaaaatgagcttgttttggttgctaagcttcaacacaagaatttggttagactccttggtgtttgcttggaagaacatgaaaaattacttgtgtatgaatacatgcctaacaaaagcctcgacacaattctgtttgatcctgatagaagcaatgtgctggattggtggaaaagattaaagatagtcaatgcgatcgctcgaggcttacaatatcttcacgaagattctcagctgaagataattcaccgggacctaaaagcaagtaatgttctgttagattccgattttaatcctaagatttcagattttggcttagcaaggctatttgggaatgatcaatcacaagacgtcacgaaccgtgttgtcggaacatatggatacatggcccctgagtacgctatgcgcgggcattactccatcaaatcagatgttttcagctttggcgttctgattttagaaatcgtcacgggaaggaaaaacaatgtctcctacgactccgagcaatcggttgatctcttaactttagtgtgggagcactggttggcaggaacagttgtggagcttgcggattcatccatggcggggcattgtcctggagaccagatcttgaagtgcgtccacatcggactcctgtgtgttcaagaagaccccacggagaggccaatgatgtcgatggtgaatgtgatgcttagcagcagcaccgtgtctttacaagctccatctaggccggcattttgcatccaaaagagtagtgtcaactcagattcgtactcggagccattccgtggagctaatcagtccacagtatagttggccataaggcccgaggcccgaaggcccggcccacggcacgcctttttggcccgtgcctgggcctccccaccggcacgctgggctggcccggcacggtcgggccggcccggcacgatgggccggtaggccaggcccggtacataaagtacagggactaaaaatagacatataaatgtaactgtctaaagaatagggaccttaaatagacttattttagctatttatataccccagcccaaagaagagggaggc

SEQ ID NO: 25408 - DNA, 1060 bp, Oryza sativa
  ref <308>: DATABASE ACCESSION NUMBER: AK100850
  ref <309>: DATABASE ENTRY DATE: 2002-08-28
gtcccgaagctagcagaggcacatattttcagaaaccaagaacacacacttcgcggagagtagtttggatcggatcgggatcgggatcggtgtgtcgaagatgaacgatgccgacgtcgggaagcagatccagcagatggtcaggttcatcctgcaggaggccgaggagaaagccagcgagatctcggtggccgcggaggaggagttcaacatagagaagctgcagctggtggagtcggagaagcggaggatcaggcaggactacgagcgcaaggcgaagcaggtggacgttggaaggaagatcgagtactcgacgcagctgaacgcggcgcggatcaaggtgctgcgggcgcaggacggcgtggtgggcgagatgaaggaggatgccggcaagagcctcctccgcgtcaccaaggacgccaccgcctacaggaaggtcctcaagggcctcatcgtgcagagcctgctccggctgagggagccgtcggtggtgctgcggtgccgggaggcggatcgcgggcacgtcgagtcggtgctggaggcggcgaagaaggagtacgccgagaaggctaaggtgaacctccccaagatcctcatcgacggcaaggtctacctcccgccgcccaagaccgcccgtgacgcccatggccccttctgctctggaggtgtggtgattgcatcgcaggacggcaagatcgtctgcgacaacacgctggatgcgagggtggaaatctctttcaagcaaaagcttcctgagatcaggaagaagctcttcagccagaaagtgtcacaataagcaattttttcgggttcttgatatccaggaataaaacaaagacgtggttcacaatatgtatatttttgttgtattttggagtactattcccttctgtcagttaaagtgcacaggccgtgtatgcaactagtaaggccaaaagttcatttcagtgaaagcaaatgtctcgttgtgtaaaacactatatatatctctttgtgtaaaacaccatgagaagttgagaaccctttgagttcatcacaaaacattgattgcaattgcacc

SEQ ID NO: 25409 - DNA, 830 bp, Oryza sativa
  ref <308>: DATABASE ACCESSION NUMBER: AK100851
  ref <309>: DATABASE ENTRY DATE: 2002-08-28
ggagtattagactactcgtagtagttgttgcaaatctggtcagaggaggaggagagcatccaagcctagctaggatcgatcgacgatgtctgatgtggtggctatggcggggcaggcgtacatgcggcagctccaagcccacccgctgcgcaccaaggccatcacctccggcgttctcgccggctgcagcgacgccatcgcccagaagatctccggcgtccccaacctccagcgcaggaggctcctcctcatcatgctctatggatttgcttatgcgggaccgtttggccattttctccacaagctgatggacaggtttttcaagggaaagaaaggaaaagaaactacagccaagaaggtcttagtggagcaactaactgcgtcaccatggaacaatatgatgtttatgatgtactatggtctggtggttgaagggagaccttttagtcaagtgaagagcaagctcaagaaagactacgcatctgtccagttgacagcttggaagttctggccaattgttagttggataaactatgaatacatgccgctccagctccgagttcttttccacagctttgttgcatcgtgctgggcagtatttctgaacctgaaagcagcaaggtccattgccactagtaagaaggcgtaaaacaggtagcacggcatgctgttgctgccgacgttctactggtcaggactcactaagaagaagaaaccggactcaaacggctaagattagatgccgtcattttactctttcagtctgcttgttgaactaatttgtactacgtactaactttatccctgatataaaacgacgtatgttattt

SEQ ID NO: 25410 - DNA, 2032 bp, Oryza sativa
  ref <308>: DATABASE ACCESSION NUMBER: AK100852
  ref <309>: DATABASE ENTRY DATE: 2002-08-28
gactctctctcacacaccacgtcccatcccgtcgcgtcgccgcacattcacccccacacccttgccgcgccgccccgcctgccgtgccgtccggcgaacctacctagcctagcgctagcctagctgaagccggcaagcaagtgcaaacagtgcccaggaccaccaccaccgccattgccgccacctctccctacagctgttcgactacgccattgtcgtcactcactccaccgtactacactcgccttcttctctctcctctccgacacgacagcgacttctccctcccgccaccttttccctccaagaaccaccccccaagaaagcccagaccagagagacagtgtgccgatggcgatggcggtggagggtgcgggtgcgggggtggtggtgagcgagccggaggtggtgtcgataccgccgacgccgagggggatgtcgacgccggatgggacggcgacgccgccgccggcggcggggaggggcgcggcgacgccggcgacgcgggtggtggagaggctgcggggttacctggaggaggtgggacacctgacgcggctgaacccgcaggacgcgtggctgcccatcaccgagtcccgcagcggcaacgcccgctacgccgccttccacaccctcaacgccggcctcggcttccaggccctcctcctccccctcgccttccccgccctcggatggagctggggaataatatcacttactgttgcttatttctggcaactgtacacactctggattcttgtcaagctccatgaagctgtaccaggaaggaggtacaacagatatgtggagcttgcacaagctgcatttggagaaaaactgggaatgtggctatctcttttcccaactatttatctgtcggcaggcagtgcaactgcgttgatccttgttggaggggagaccatgaagctcttttaccaaatagtttgcggcccaatctgttcaccgagtccgatttcgacgatcgaatggtacttggtgttcacatccttggccatagtcctttcccagcttccgaatctcaactcgatagccggcgtttcactcatcggtggcaccaccgcaataacatactgtaccatgtcctgggttctctcggtcagccaaccgcagcctccaacagtctcttatgaaccacaagcatacacttctcttggttcatctttgttctccaccttgaatgctcttggaataatagcatttgcattcagggggcacaatcttgcacttgaaatacaggcgacaatgccgtcgactttcaaacatccagcacatgtcccgatgtggcgcggggccaaagtcgcatatgccctgtttgcaatgtgcctcttccctgtcgcgatcggaggttactgggcctatggaaacatggtgccacagggagggatgctgacggcgctctacgccttccacagccacgacatcccccggggcctccttgctgcgacgttcctccttgtcgtgttcaactgcctgagcagcttccagatatactccatgccggttttcgacagctttgaggctgcctacacgggccggaccaaccggccttgctcggtctgggtgagatcaggcttcagggtgttctacggcttcctctcgctgttcatcagcgtcgcgctgccgttcctctccagcctcgccggcctgcttggggggctgacattgccggtcaccttcgcctacccgtgcttcatgtggatctgcatcaagaagcctgagaggttcagctcaggatggtacctgaactgggggcttgggctgcttggcactgcattcagcctggctctctgtgtgggtggtgtctggagcatcatcagcagtgggatgaagttcaagttcttcaagcccccaagctagattgaccagcaatttccagtatcaaacttgcaaaatcagtacaaattctggtgtgtttgtgatattttcagacaatggaaaagcatatcccagctggcctccgcattgtgggtgtgcttgtcatatggttatatgaatgatatatgatgatgat

SEQ ID NO: 25411 - DNA, 1369 bp, Oryza sativa
  ref <308>: DATABASE ACCESSION NUMBER: AK100853
  ref <309>: DATABASE ENTRY DATE: 2002-08-28
gactaaaacctcattaattgatcaaggcagcgagtagccccagctaaccattacacgggcattccatctccagccatccctagggctgtaattaacatggctccagccattgccaagcctctcctgagcgatctggtggcacaatccgggcaagtcccctcgagccacattcgtccggttggcgaccgcccggacctcgacaacgtcgaccacgagtccggcgccggcattccggtcatcgacctgaaacagctcgacggcccggatcgccgcaaggttgtcgaggccatcggttcggcgtgcgaaaccgacggttttttcatggtgaagaatcacgggatcccggaggaggtggtggaagggatgctgcgcgtggcgagggagttcttccacatgccggagtcggagcggctcaagtgctattccgacgaccccaagaaggcgatccggctgtcgacgagcttcaacgtgcgcaccgagaaggtgagcaactggcgcgacttcctgcgcttgcattgctaccctctcgagagcttcatcgaccagtggccctccaacccaccctccttcaggcaagtggtcggcacctactcgagggaggcgagggcgctggcgctgcggttgctggaggcgatatctgagagcctcgggctggagaggggccacatggtgtcggccatggggcggcaggcgcagcacatggcggtgaactactatccgccatgcccacagccggagctcacctacggcctgccggggcacaaggaccccaatgccatcacgctgctgctccaggacggcgtctccggcctgcaggtccagcgcaacggccgctgggtggccgtcaaccccgtgcccgacgccctggtcatcaacatcggagatcaaatccaggcgctgagcaacgaccggtataagagcgtgctccaccgggtgatcgtgaacagcgagagcgagaggatctccgtgccgacgttctactgcccgtccccggacgcggtgatcgcgccggccggcgcgctggtggacggcgccctgcacccgctggcgtaccggcccttcaagtaccaggcctactacgacgaattctggaacatgggcctccagtccgccagctgcttagaccggttccggcctaacgatcaggccgtctgattatggtccataaacttttcttgaaaaaggaaaagattgtgatccataaacaggccatgcaaaatatccttacatccgatgcgacgtgttataccactaaaaaaggtgctcctctaccctagctttctcgaaaaaaataaaacaaagtggagcactaccaatctagatctatgtgacgctaaacaatagacatgtgagtgaaatatgttttggc

SEQ ID NO: 25412 - DNA, 1310 bp, Oryza sativa
  ref <308>: DATABASE ACCESSION NUMBER: AK100854
  ref <309>: DATABASE ENTRY DATE: 2002-08-28
ggcaaagcaattttgccattctcccgtttcaaacccgcgctctctctctctctctctctctctccccctccctgccgctgctgccgccaccgccgcggcggcgccccgattcggtgatcccccgctcgcccatctccgccgtgacgtatcggcgacgcggagggagccccccaccccccacctccggatctagggtttcgaggcccaggtggcgttgcgctgcgcccccgctcctccgcctctcctccgccgccgagggttcgcgtgaggtttctgcgtattaccagctctgtacttaatttactagtgagaagcaaaatgaagtgcaatgcttgctggcgggagttggaagggcaagctgtatcaacaacctgcggtcatcttttatgtacagaggatgctaagaaaatactgagcaatgatgctgcatgcccgatttgtgatcaagtgctttcaaaaagccatatgagacctgttgatacaaatccaaatgatgattggacaaatatgtcaatggctggagtttctccacagatacttatgaagagtgcatacagaagtgtcatgttttacattgggcaaaaggaactggagatgcagtacaagatgaacagaattgttggtcagtgtaggcaaaagtgtgaacttatgcaggcaaagttcactgagaagctggaagaagttcatactgcataccagaaaatggccaaaaaaatgccagttgatggaacaagaggttgaaaacttgtcgagggataagcaagagctacaagaaaaatttgctgagaaatccaggcagaaaaggaagcttgatgagatgtatgatcagctgagaagcgagtatgagtcggcaaagcgttcagcaattcaacctgcgaacaactacttcccaagagcccagccagacctgttctcaggcgtgcccaacataatggatagcagcgaccctctgagacaaggattggctggtcttcctgaaactccagggcggagagatgagggatgggctccaccaccaaggcaacgtcggtccacctctggaccatttgagctgtctgcgggatctcctgctcacaatgcggcgcctccggttgatattaggcccagacagccagcacggcccgtattcggcactgccatgaataatacttctgcagctctgcgaaatatgataatctcgcctgtgaaacgtcctcagctttcccgaaaccgtccacatatgttcacgtaatgtcctccttattgctcatgcatgtatttcacatctaaatgaagcagtttgggaatgaaaattgatgtccaacttgccc

SEQ ID NO: 25413 - DNA, 1209 bp, Oryza sativa
  ref <308>: DATABASE ACCESSION NUMBER: AK100855
  ref <309>: DATABASE ENTRY DATE: 2002-08-28
ggtccgtacccaaaattgccaaaatcaccctccaattcctttcccctcctccctcccctctgccgccatggccgcctcctcctcctcctcccccccttgacccacaccaccaatcgccccaaatccatgagactccccgcgccacaatccagccctgccgcacgaggatgtcccagtccgacgttgtctacagctgcggatcttgtggataccctctgaacctttcatcttctaaccgaagcacatctgacgtaggatcctcataccaaaagtctgtgaagaaaggtctgatttcattcattactgttgatctgagccgatttactcaggtagacgagatatcttgctttcccctcacctggcgtagctatcggccaaaaactaagcttctctgccgaaagtgtggggcatctattggctatgggtatggtgaaccagctgttctgtgcagctttgatccagccagttcatcatctagtacatcccaaaagtatttaataaaaatccaggctctccagccttcggatagtactcagtagtctgtcaacttcagccaaaatttggaaagagaggaaatggatgacaacgtggaaaactatatcaatttcctatcagatgattgcttgatttgtatatttaacaagcttgaaagtgaatcggacaggaatgcttttggcttaacttgtaagaattggtttaaggttcgaaacattgcccggaaatcaataattttccattgttcttttaaccctaaagtatataaggagcacgccaattgcctttcaaagttattggcccgctcaccttatcttaacttggtctccctcgctgggcttacagaactacctgacacggctttaaatcagctgagaatttctggagcatcattgcagtccctttctttctactgctgctctggtattacggatgatggtttagaggtggtctcaatcggatgccctaatttggtgagtcttgaactctaccgctgctttaatattacagatcatggtttggaaaatctttgcaagggctgccatgctttgaagagtcttaacctgggttactgtgtagccatttcagatcaagggattgctgcaatctttaggaattgcccgaatatttccacaattatcatagcatattgcagaggtttatccggtgttggattcagaggttgtccaggtacactttctcatctagaagctg

SEQ ID NO: 25414 - DNA, 2320 bp, Oryza sativa
  ref <308>: DATABASE ACCESSION NUMBER: AK100856
  ref <309>: DATABASE ENTRY DATE: 2002-08-28
gaattagggtggggtggtaggcgaaattactaacttaccctcgccatttcgacgcctcctccgtggtgtcgtcgtgcgcgagctatgctgagtttgcccttgcccaccgcttccgcctccgccgatccccatccctcccgcgagcaggagcaggagcaggagcagggctagccgtcgttcctcctgctgcttccgccgcatccatcctgataccagatgtgccgccaccagccaagggctcggctctctcccgatgagcagcttgcagctgaagaaagcttcgcattatactgcaagccggtcgagttgtataatatcattcagcgccgatccattaaaaatcctgcttttcttcaaagatgccttctttacaagattcacgcaagacggaagaagaggagcctgataaccatatcactttctggaggcacaaataaagaactgcgggcacaaaatatctttcctctttatgttctgttagctagacctactaataatgtttcacttgaagggcattctccgatatatcgattcagtcgtgcttgtttgttgacttcttttcatgaatttggaaataaagactacactgaagcaacattcgtcattcctgatgtgaagaacttagcaacctcccgagcttgcagccttaatattatccttatcagctgtggacgagctgagcaaacttttgatgacaataactgttctgggaaccatgtggaaggctctactctccaaaagcttgaagggaagtgtttctggggtaaaataccaatcgatcttcttgcttcatctttgggaaattgtgtgagcttaagtttgggacataccgtggaaatgtcttccacggttgagatgaccccaagcttcttagagccaaaatttctggaggatgacagttgcttgacattttgctctcagaaggttgatgctactggttcatttcaactgcaagttagcatatctgctcaagaggctggtgcaaaagacatgtccgagtctccttatagtgtttattcatataatgatgtgccaccttcgtcattgacacatattataaggttgagatctggcaatgtgctttttaactacaaatactacaataatactatgcaaaaaaccgaagtcactgaagatttttcttgcccattttgcttggtaccatgtggcagctttaagggtctaggatgtcacctaaacgcatcgcatgaccttttccattatgagttttggatatctgaagagtgccaggctgttaatgttagtctgaagactgattcttggagaacagagcttttggctgagggagttgatccaagacatcaaacattttcgtaccgctcaagatttaagaagcgtaaaagggtggaaatctcaagtgataaaattaggcatgtacatccacatattgtggattcaggatcacctgaagatgcccaggcaggatctgaagacgattacgtgcagagggaaaatggtagttctgtagcacacgcttctgttgatcctgctaattcattacacggtagcaatctttcagcaccaacagtgttacagtttgggaagacaagaaagctgtctgttgaacgagctgatcccagaaatcggcagctcctacaaaaacgccagttctttcattctcacagggctcaaccaatggcattggagcaagttttctcagatcgtgatagtgaagatgaagttgatgatgacattgctgattttgaagatagaagaatgcttgatgattttgttgatgttacaaaagacgagaaacttattatgcatatgtggaattcatttgttcggaaacaaagggtactagcggatggccatattccctgggcatgcgaagcattctcgcagtttcatggacaagaacttgtacaaaatccagctctactatggtgttggaggtttttatggtcaaactctggaaccacagtctactggatgcgcgagccatgaatgcctgcaacacaattcttgaaggctacctgaacggaagctcggatccaaagaaaaattgacgcatacaaatcattggccaacctgtagagtaaaatgcacttgtactggttctggccattccaatagtttgttttgtttttggaaaaaaagatgtctgaagaattgaaagctaacatgtgttttggagggaagaaaattgaaggctggggcggtcattgtttcatttagaactcttctcgattctatttattgtaattgatgttactcataactgtagagcagtatcaagaccaaactgtaatgatatggttagcaatatttacataaaagtttattttgtttgttgttt

SEQ ID NO: 25415 - DNA, 2021 bp, Oryza sativa
  ref <308>: DATABASE ACCESSION NUMBER: AK100857
  ref <309>: DATABASE ENTRY DATE: 2002-08-28
gaccgggcttaagccgctgggggcggagaggcaggcaggcaggcagtgcgccattagcgtcacatggggtgggctcttgtacactagccattaatacggcaggtcgcccatcccatcgcgtctcctccgcttaaatccccgcggctccctcctgtccgtggttgcagctcgctcgccgcgctagagcttagctccgccgccgccgccgccgccatcgccggtcgagctagctctttttggtagtgtagctaaggctagcaagaggccgggagcgcgggtggtgtggccgcggattatctgggtgcttgcttgtgcctccggatcggccgggggtgatcgaggcatggacgcggtcatgtccgccgccgacgacgcgggcgcggcgtccggccgggaggacccaccgccagccgtggtgctcgtctccgccggcgccagccactccgtcgcgctcctcgcgggcaatgtgctgtgctcgtgggggagaggggaggacgggcagctcgggcacggggacgcggaggaccggctggtgccgacggtgctgagcggcttcgacgccgccgcgccggggatcacgtcggtcatctgcggcgccgaccacaccaccgcctactccgaggacgagcagcaggtgtacagctggggctggggagacttcgggaggctcggccatggcaactccagcgacgtgttcactcctcagccagtcaaggccctgcaggggataaagatcaagcagatagcttgcggcgatagccattgtcttgccgtcactatggcaggtgaagtgcaaagttgggggcgcaaccaaaacggacagcttggtcttggaaccactgaagactcattgctcccacaaaagattcaatcttttgagggagtttgtgtgaaaatgattgctgctggtgctgaacataccgctgcagtaactgaagatggtgacctctatggatggggctggggtcgatatggaaacttggggcttggtgatcgcaatgatcggttggtacctgagaaagtatcttctgtggagggagagaagatggtgcttattgcatgtggatggcgccatacaattactgtttcttcctctggtagtttgtatacttatggttggagcaaatatggtcaactagggcatggtgattttgaagatcatttagttccacataaactagaggccttaaaggatagctctatatcgcagatttcaggtggatggaggcatacaatggcgcttacatcagatggaaagctttatggttgggggtggaacaagtttgggcaagtcggagttggtgatactgatgatcactgtttcccagtacaggtcaagtttccagaggatcagaaagttgcccaagttgcttgcgggtggaggcatactcttgcatttacagaaaagaaaaatgttttctcatgggggaggggtactagcggacaacttggtcatggtgaaatagttgacaggaacaaacctgtgatgattgatgccttaagcccggatggtcctggctgcaagaaattagagccatcaacagctgtaccatttgcagccaaagtctgggtctcgccatcagaaagatatgccattgttcctgatgaaaaagttccaaattcaggtgaaggcacggcacgaggcaacggggcggacgcaaatgtaccagagaacgatgtaaagaggatgcgtgtgcattcgtaggggcctggacctcccaatttaactccctagtacactatccaaaaaccccctatgtgcaactgtttcaccgcacgtttccatccagtgctgtcccatttttgtgcatcccattctgcccaagtgatgatttccacgaacccctcctggtgttgttgagatccagtacctattagggttatcgcagctgccactgtctgtaatcgatcacctgcttagaggtgattttagcaaaaaaccaacctgcaccgttgtggacatgtgtttggaatgtttttaacttctgttggaagacgcaataagtgcttggttctgatct

SEQ ID NO: 25416 - DNA, 2538 bp, Oryza sativa
  ref <308>: DATABASE ACCESSION NUMBER: AK100858
  ref <309>: DATABASE ENTRY DATE: 2002-08-28
gtgctccttgtgctcagtggatttatcctatcacaccatgatgtgaaaaaatggtggatctggggctactggatctcacctctccagtatgcgatgaacgccatcgcagtgaatgagttccttggacacaagtggaaccgccttgtccaagggaccaatacaactttaggaattgaagtgctcaagtccagggggatgttcactgaggcaaaatggtactggattggcgtcggtgcactcttcggatacgtcattgtgttcaacatcctattcaccatcgctctaggctaccttaaaccatcgggaaaagctcagcaaattctttcagaggaagcactgaaggaaaagcacgccaatatcaccggagaaacgatcaatgatccaagaaactctgcatcttcaggacaaactaccaacacaaggagaaatgctgcaccaggtgaggcaagcgagaacaggagaggaatggtgctccctttcgcgccgcttgctgttgccttcaacaacatcagatactctgtcgacatgcctccggaaatgaaagcacagggtgtggatcaagacaggctgcttctgctgaagggagtcagtggcagcttcaggcctggggtcctcactgcactgatgggagtcagtggtgctggcaagacaacactgatggatgtgttggccggcaggaagacgggaggctacatcgaaggtgacatctcgatctctggctacccgaagaagcaggaaaccttcgctcgggtctctggttactgtgaacagaatgacatccactcgccaaatgtgactgtttatgagtccctggcttactctgcttggctcaggctgccctctgatgttgattcagaaacaagaaagatgtttatagagcaagtgatggagctggtagagctgaatccactgagggatgcgcttgttgggctacctggagtaaatggcctgtcaaccgagcaaagaaagaggctgacgatcgctgttgagctcgtcgcaaatccttcgataatattcatggatgagcctacatctggccttgatgcaagggcggcagcaattgtcatgaggacggtgaggaacaccgttgacacaggcaggactgttgtctgcaccatccaccagcctagcattgacatttttgaggccttcgatgagctgttcctgatgaaaagaggtggagaggagatatacgtgggtcctctaggacaccattcttgtgaccttattgaatactttgagggagtcgaaggggtcagcaagatcaaaccaggctacaacccggcaacatggatgctggaagtaaccacactggcacaggaagacgtactggggatcagctttacagatgtctacaagaactcagatctctaccagagaaaccagagcttgatcaagggcatcagcaggccaccacaggggtccaaggacctcttcttcccaacacaattctcccagagcttctccacccagtgcatggcctgcctctggaagcagaacctctcctactggaggaaccctccctacaccgtcgtccgcttcttcttctccctcatcgtcgccctcatgttcggcaccattttctggcgcctcggcagcaaaagatcgaggcagcaagacctgttcaatgccatggggtcgatgtacgcggcggtgctgttcatggggatctcctactcgtcgtcggtgcagccggtcgtcgccgtcgagcggacggtgttctaccgggagagggccgccgggatgtactctgcattgccatacgccttcggacaggtggtggtggagctgccgtacgtgctggtgcagtcggcggtgtacggggtgatcgtgtacgccatgatcggcttcgagtgggaggccaagaagttcttctggtacctctacttcatgtacttcacgctgctctacttcaccttctacggcatgctcgccgtcggcctcaccccgagctacaacatcgcctccatcgtctcctccttcttctacggcatctggaacctcttctccggcttcgtcatcccccgcccgagcatgccggtgtggtggaggtggtactcgtgggcgtgcccggtgtcgtggacgctgtacgggctggtggcgtcgcagttcggcgacctgaaggagccgctccgcgacaccggcgtccccattgacgtcttccttagggagtacttcggcttcaagcacgacttcctcggtgtcgtcgccgttgctgttgcggggttcgccacgctcttcgccgtctccttctcgctctccatcaagatgcttaacttccagaggaggtgatgatcgatttttgctaactcagacctgatcgattacccacttccaatgtaacagttttttttttcctttttttcaactctattttggttttgtaacaaaattcgtagtatagtgcagtcagaaatgaagcaaacaggagtatatatacaaagctgatagtgcagataatttgttttacatgcatgaaatctgttaattttgattctattttgtacatgtagtattaattgaaaagaaatgaaagcc

SEQ ID NO: 25417 - DNA, 1269 bp, Oryza sativa
  ref <308>: DATABASE ACCESSION NUMBER: AK100859
  ref <309>: DATABASE ENTRY DATE: 2002-08-28
gtttttgtttgtgttcatgagtgtgagagtgttcctaggctaagccaacatttggtatcagagcctggagatgaagatcggagatggctcgacctccgatgcctccgtggagcgcgtcgtgcccaattccagcgtcatggagctgctgctgctaaccagggccaactaccatcagtgggccttggttatgcgggtgagcttggaggcgctggagttgtgggacgcggtggaagcggtcaccaaggataggcgggcgttggccaccatcttgcacgcggtaccaccgaagatgaaggtcgggctcgccgtgaagacgtcggcgaaggaagcgtgggactcggtgaagaagatgcgagccggcgacgaccgcgtgaagtcagcgagtgtgcaacgcttcatgaaggagtttgagaacatgatgttccgcgacggggagaccgtcggcgactttgcgatgcgcatcaacgggcccaccgcgagcctgcgtgaccttggggaggagatagaagacagccacgtggtgaagaaggtcctgcgcgtggtcccgaagaggttgaagcaagtcacggtggcaattgagatgctcgaggacatggatgatatgtccgttgaggagctcgtcgggcggctgcaagtggcggtggacgccgacgttgaagatcaaacggaggtccatggcgggcagctacttctcgctgaggagcagtgggaggctagcaggcgtcaacgcggcagcaagcagcacacaggcagtggggtgcgccatgacaatggcaagaaaggcgacgaccatggtggagactgcgaggatgacgatgacgacggcagcagcacgagctcagggctggatcgacaggatcccgtcgaatgtgctccacttgataggatcccgtcgaatgcgctccattcgattgcctggcttgtcaaactaagctagttcaacaggtccctatttttgcaaataaatccggataccaacttttgtttttgtgactttttattaaaataataatatttctaagaaaatgccagcgcacaccacgagtgtgtttgggtctacatgcatgtagtagagtacgcggacatctgatgtttgataaaagatgtccctcctttttgtggctttctctgtttttttcactggaacaaataagatgtccctcctttttttaatcactttcaactacgtggtacgacacattgaaggtccagtgtagtgcctctttaaaacccacctatcaggcctcttgaagcctatcagcccccttg

SEQ ID NO: 25418 - DNA, 1712 bp, Oryza sativa
  ref <308>: DATABASE ACCESSION NUMBER: AK100860
  ref <309>: DATABASE ENTRY DATE: 2002-08-28
ggctccattccgcccgcgcccccgtgctcgtgccagtgtggtgtgcggtgtgccacccgcccccctttcccaatccctccggtctcccctggaaaaacattttttctcttcccaaccactaacacagcaccggcggccattaacgcgctccgccgcctccgccgatcctcggctccggctcctcctgcagacgcgtccgccgcagcggccacggcggatgctatgaatttatcagacctttcttcttgatgtcatgagacagtccgcctttattccacatatttagaattttagatagtagtgccttgtggataagaatggtagcgggagagatagctgttctaagatgagactgcggttgcatctgctgattctttgcttgatcattttatttctggtttataacatggcgagttaccaacataaacagacaaagttggaagcaaaatcccgtccatttgatacaattacggtgtctgacaaagtgtcttctaaggtgtctaaaagatctgccaatagggttggttttttaccccatggtatagtggaaccttactctgacatggagttgaagccattatggctcacaagaagtgcgcaatcaaaggattctagccagaaggatcggtgcttgcttgccatccctgctggtatagatcagaaaagaagtgtggatgctattatgaagaagtttcttccagagaattttacagttatgttgttccactacgatggtaatgttgatgggtggaacgatctaccttggagcaaaagtgtgatacatatagctgcttctaaccagacaaaatggtggtttgcaaaaagattcctccatccttctgttgtctccatgtacgagtatatatttctttgggatgaagatctggaagtagataactttcacccaaggaggtacttgaatatagttaaatcagaagggctagagatatctcaaccaggtcttgatcctaaattgtctgaaattcatcatcggataactgttcgtaaaaaggggtggagtttccacagaaaagttaatcggggaaacaaagattgtgcaaaagagggaccgccttgttctggatgggttgagggcatggcaccagttttctcgagatctgcttggcgatgtgcttggcatcttatccagaatgatcttatccacggatggggcattgattacaaatttgggtactgtgctcagggtgacagaacaaagaacattggagtagttgatagtgaatacatagttcatcgaggggtacagacattgggaggtccttcagtaaagcgatcccatggcaaaaacaatgatccacttcaccagaaaactgcagaagcgcaacaacagatgagagtgaaggcaggccttgatatgcggacaaaggtcaggagatattcacgatcggagcttcgggatttccagaagcgttgggagcgggccaccagggaagacagagcatgggtcgatccgtttgctcgcccacgaagaaaaaggaagagaactgatagacaataggttagcgagtgtttcgatcatgatttgtatttttttttcttttgcaacaccagttttggagcgtagagttttcggtcgccacattatgtgtagaaaatttatgaattctttacaggtggtatctacagtttttttaaggtaacacatgacgaaactcccgaaaagtttgagcaggaaaagtttggttgtatgg

SEQ ID NO: 25419 - DNA, 2764 bp, Oryza sativa
  ref <308>: DATABASE ACCESSION NUMBER: AK100861
  ref <309>: DATABASE ENTRY DATE: 2002-08-28
gatttagctgccgcactcaatggacaatcgtaaccatgggcggtgctcgttgccgcggctcgccgttggcgccgccgtcctcctcctcgccgtctccctagcggccacgccggcggcgagccatgccgggcacgatgacaccggcttgcacagcaactacctcgtcatcgtgcgcaagccgtacgcgtacgacacgaacctgtacaagaacgtgtcgagctggcacgcgtcgctggtggcgtcggtgtgcgacatggcgaaggaggcgctggagagggacccctcctccgtgtcccggctcatctactcctaccgcaacgtcgtcaatggcttcgccgcccgcctgacgccggaggaggtggaggagatgtccaagaacgactggttcatccgcgccgacccggagaagacgtaccagctccagaccacccacacgccgcagctgctcggcctcatgggcggcgcccgccgcggcggcgtgtggaacaccagcaacatgggcgagggcatcatcatcgggatcctcgacgacggcatctacgccgggcacccgtcgttcgacggggcgggcatgaagccgccgccggccaagtggagcggccggtgcgacttcaacaagacggtgtgcaacaacaagctcatcggagcgcgctcctacttcgagtcggcgaagtggaagtggaaagggctgcgcgacccggtcctgccgatcaacgaggggcagcacgggacgcacacgtccagcacggcggccggctcgttcgtgcccggcgccaacgtctccggctacgcggtcggcacggcgggcggcatggccccccgcgcgcacatcgccttctaccaggtgtgctacgtggagaagggctgcgaccgcgacgacatactggcggcggtggacgacgccctcgaggacggcgtcgacatcctgtcgctgtcgctcggcgacgagcaggccggcgacttctccgacgacccggtctcgctcggaggctacagcgctgccatgcatggcgtgctggtcagcgcggccggcggcaacaccggcccgggaccgagcaccgtcgtcaacgaggcgccgtgggttatcaccgtgggggcaggcaccaccgaccggcggttcgtcgccaccgtgaagcttggaagcggggttagcctcgacggcgagtcgctcagcgagcccaaggacttcggagccgagatgcggccgctggtgcacgacgtgggcgacggcatgtgcaccaccgagagcgtactgagggcgatgaatgtcaccggtaagatcatcatctgcgatgctggtggcgacgtgagcgtcgcgaaggccaagttggtgctccgctccggcgccgccggcatgatcgtcatcgcccctcaggtgtacggttcggtgatcgtcccgaggccgcacgtcctcccgacggtgcagatgccattcatgatagggcagaagatcaaggcttacatccggagcacgccgagcccgacggcgaacttcatcttcaaagggacagtgttcaaagcgaagtcgccggtggccgcgcccttctcgtcgcgggggccgaacaggcggagcagggggatcctcaagcccgacatcataggccccggagtgaacatcctcgccggcgtccccaagatcgaggacttggcgctcggggccgaggaagtgatgcccaagtttgacatcaagtccggcacctccatggccgcgccgcacatcagcggggtcgccgcgctgatcaagaacgcgcacccgacgtggtcgccggccgccatcaagtcggccatgatgacgacggccgattacaccgacaacctccggaagccgataaccgacgtggacggcgcgccggcgacctactacgccatcggcgccggctacgtgaacgcgcggaaagccatcgacccggggctcgtgtacaacctgtcgtcgctggactacatcccctacctctgcgggctcgggtacaaggaccagaaggtgaactcgatcatccacccggggccggcggtggagtgcgccaagatgcccaaggtcgatcagaaggatctcaactacccgtccatcacggccgtcctggacatggagccgtacgaggtgagcatcaaccggtcggcgacgaacgtcggggcggccacctcgacgtacgccgtggaggtggacgtgccggcgacgctggcggtggaggtgaacccggcgaagctggagttcagggcgctgaacgaggtgctgaactacacggtcaccgtcaagacggcctccggcaaggcgccggccagcacgatcgaggggcagctgaagtgggtgtcggggaaaaagtacgtggtgcgcagcccgatcctcgtctgtgccggcaccggcggcaagagcgccgcctccatgggggctgcaccggcgtagagcactggtcgagcggagcctaagagatagcagcttgatgatgattactagattgccacgcgtgttaacgtttgatggtgctttactcttcgctcggtaggtttaggctcatgtatgtggaggctagcgaattaatcctttcctccgcggaagtggggtgacgggtttttcttgctgtttttaccactagtgcacgcggctgatcttgaccattcattgattttgtactccaggggacgagatgtgatttcatccccggccccttaatcatgatatatgttcatttattctttttttcctgtttctcaaatagatgcagacgtgacactcctctcaaatagatgctggtgtgttatatatgct

SEQ ID NO: 25420 - DNA, 2147 bp, Oryza sativa
  ref <308>: DATABASE ACCESSION NUMBER: AK100862
  ref <309>: DATABASE ENTRY DATE: 2002-08-28
ggcccccctgttgcttcgcttccttccagatctgaaacccatgtgaatgctgctcctgctgctactttgagatagagcattgcgtgttcttggattggtggatgatgaggtgaaagtgaagagggggagagtgtgtttcctgtttgtgagagatttttttctctgaataaacctggagccgtggaggaggaagcagatcctatcgtgtagctcccgcggcggcggctgcggtggtggtggggaagaggaagaagaaggcggtggcggcggcggagccatgacgtacttcccggaggaggtggtggagcacatcttcagcttcctgccggcgcagcgcgaccgcaacacggtctcgctcgtctgcaaggtgtggtacgagatcgagaggctgagccgccgcggcgtcttcgtgggcaactgctacgccgtgcgcgccggccgcgtcgccgcgcggttccccaacgtgcgggcgctcacggtgaaggggaagccccacttcgccgacttcaacctcgtgccccccgactggggcggctacgcggggccgtggatcgaggcggccgcgaggggatgccacggcctggaggagctcaggatgaagcggatggtggtgtccgacgagagcctcgagctgctggctcgctcgttcccgcggttcagggctcttgttcttatcagctgcgaggggttcagcactgacgggctagccgccgtcgcgagccattgcaagcttctgagggagttggatttgcaggaaaatgaagtggaggatcgagggcctaggtggctttcctgcttccctgattcctgcacatcacttgtctcattgaattttgcctgcatcaaaggggaggttaatgctggttcactggagagacttgttagcaggtccccaaacctgcggagtttgaggctgaatcgatctgtatcggtagatacacttgcaaagatactactgcgtacccctaacttggaggatttggggacagggaatttgacagatgacttccaaactgagtcctactttaagcttaccagtgctctggagaaatgcaagatgttgaggagtttgtctggattctgggatgcttctcctgtttgcctgtcatttatctaccccctgtgtgctcaactgacaggattgaacttgagctatgcacccacacttgatgcttctgaccttacaaaaatgattagccgctgtgtgaagctccaacgcctttgggtactggattgtatctcggacaaaggcttgcaagtggtggcctccagttgcaaagacttgcaagaactcagggtatttccatcagatttctacgtagctggttattctgcagtgacagaggagggacttgttgcagtatccttgggctgtccaaaactgaactcactactgtacttctgtcaccaaatgactaatgctgcactagttactgtcgccaagaactgtccaaatttcacacgattcagactttgtattcttgagccagggaagcctgatgttgtgacaagccaaccattagatgaaggctttggagctattgttcgtgagtgcaagggattacaacgtttgtcaatatctggtcttctcacagacaaagttttcatgtatattgggaaatatgcaaaacaacttgagatgctttctatagcatttgctggtgacagtgataagggtatgatgcatgttatgaatggatgcaagaatttaaggaaactggagataagagatagcccgtttggtgatgctgcactcttggggaattttgctaggtacgagacaatgcgatccctttggatgtcatcttgcaatgtcacgttaaaggggtgccaagtccttgcgtcaaagatgccgatgctcaatgttgaggtcataaatgagcgggatggtagcaatgaaatggaggaaaaccatggagatctgcctaaagtggagaaattatatgtgtaccgcacaactgctggggcgagggatgatgcaccaaattttgttaaaatcctatagagctagctgagagtagcaaggaatcctcttattccataaggtaacccctttcaatacattattttcaaagtgcctttctatagttaatgagtttgcctgttactctgttagcctattaatactagtgctgtttgaacttgct

SEQ ID NO: 25421 - DNA, 1191 bp, Oryza sativa
  ref <308>: DATABASE ACCESSION NUMBER: AK100863
  ref <309>: DATABASE ENTRY DATE: 2002-08-28
gggagcattacaagccactggccttccccgtcggcccttaccatgcccgctccggcgtgccggcgccggagaaggcccagaggctgaaggagcaatgcgtcgacgaggtcgtccagctgagcggcaggagccgccacgacttgctcgagcagatgaggagcgtgctggatcgagcaaaggagtactacgccgacgagatcggcatggacgacgaggcgctggcgcagatgctcctcctcgacggctgcttcgtcctcgtctcgctccgcgggacggagcggctcaagcagctgactccaggatggaaggcggaggagagtacggagagcttgttgtcggagaactcggacgatcgttgctccgattgctcggatcagcagggcgacgaggagaatcagatcgccgcggcgaacaacggcggcggtggcggcgacgatagctggcaccatttcaacgtcgcgcgtgatctcttcctcgcggagaaccagatcccgttcttcgtggtgcagaagatctacgagcttctcgtcaagaaccgtccatacgcggagcgcggcgtcgtgggcgccgtggaggcgtacgtgcgggaggtgatggccgtgtacgcggatggagccggcgcgcaggcgcagccacccgccgccgaccacgtccaccatctgcttcacctcagccacatgtacctgagaccaaggacccggcgccagagctcgcgttggagcggcggcggcggcgcgaccgtgggccggctgcgccgcgcgacgcagctccgcgagctcatggtgcggctcaagaagctggagatcggaggcaaggcggctccggcgggcagcatcctggacgtggcgttccacggcggcgtgctggagatcccgcggctggagatcgacggcggcacgtggaggcagatggcgaacctcatcctgctggagcaagggagcccgcacgtggggctctacgtcacggcgtactgcgccttcatgtcgcagctcgccggcaccgccgaggacgtggcgctgctctgcgagtccggggtcatcgagcaccagctcggcggcgacggcgacgtcgccgacgggctcaggaggctctgcgacggcatcatcttcgacgccgacgacgacgcatacaactacctcaggccggtgtaccgggcggtcgaggagcactgccgcagccgcacgctgaggc

SEQ ID NO: 25422 - DNA, 1644 bp, Oryza sativa
  ref <308>: DATABASE ACCESSION NUMBER: AK100864
  ref <309>: DATABASE ENTRY DATE: 2002-08-28
ggtggtcgcctccctcctccggccgccaccatgctgctccgccgcctcctccactcctcccgccgcctcggccaccgcctccaaaccctaactccggcgagcgcagccaccgccgccgctgcctcgtcctctcccgtctccgcgcggagggcagcgagaagggggacgtgttcgaggggatcttcaaggaagaggctgccaccgccgccgtcgcttctggagagaaggctccgggggcaggcgccgacgagctgtggacgctgagtggggaggatgagaaggatcctttcgcggaggccgtgctcgggggtgggcttgaggggatcggaggtgatggcgctgcgattgatgaggccgatgcgggggaagacgaggaggaggaagagcgaaaacggctagagagaagggcgagggagcaagaactaatggagacactcaaaggtccaaatcgtgcatttggtgatctcattgaggcctctgggattacagaggatatgattgctagtttgatcctcttaaaggatgttaggggtgttcctggattacctcccctaagagaaatagaagatgaaactatcgaaaaaatgaatgcaacatcaagcagagctgatgtagaacgccaaaagcaagaggaaattgctaaagcacgtgtaagacaagtcgatgagaaaggaagggcttatggaacagggaaaaggaaatgcagcattgcccgtgtttggattcagcctggtgatgggaagttcattgtcaatgacaaacaatttgattcttacttcccaattctggatcatcgggctgatcttcttcgcccatttaccgtgaccaaaactttggggcgttgggatgttacttgtactgtgaaaggtggtggtgtctcaggacaagttggagctatccggctagggatcagcagggccttgcagaattgggaaccaggactacgcccaaatctcaaagcagctggatatttgacaagagactcacgggttgttgaaaggaaaaagcctggaaaggcaaaagcaagaaagagcttccaatgggtcaaacggtaacaggtacctgctcttgttttttttctggtcatggcgttctgtatttgcagttggactgatattttcggaaggtccttttgagctctatactcatatattccagcctttaccgataatgggcataatgagacacaagcattctggttttctttaatgttgacaattgacacagcaaactgatcccagggaaaaaaaaatcatttgacctaattaagatgcagaagatacattgttataagctgtcattaaaatgggctgggctaccgatggaattcgttgtctagctcccagaagttatttctgttttgctgggatggcatggctgtatgcctgtatatcagctgctgccacatttttcctccatgtatgtctgtgcatgctctctgactatggtaaatgagaagttatgcgtccaactctgtaagcagtaataagaccaaatggaatattttccaaacgtgagatgtcattgtgcttctctctgagcaatccaccaccttgttcatgaaagctatgggcgagactgtaagttatcaatattacaaaccctcgagcttctcgatagtcgatgccttgatgttatcgtatt

SEQ ID NO: 25423 - DNA, 1588 bp, Oryza sativa
  ref <308>: DATABASE ACCESSION NUMBER: AK100865
  ref <309>: DATABASE ENTRY DATE: 2002-08-28
gacatcataccaagtgtcctccttcctcctcatcctccccaaccactgcatccgggtcggcgtcctcctcctcctcctcctcctcgcaggtaaagcagcatccaagcatcctttccaatccatgctcagagttggaagtagagctgctgctgatgatggtgtgtggatcggtgctggttggtttctcgttcttgcttgagtgtgagatgtgatgttgatgtgcgtgtgtgtggagtctggactggaaggtttcttgagttcagagtgcagatcagagaatcgtacttttgctttttacagtgtgttcttggtttgcccacacgatctgttcatcttttgtttcttttgttttgcctttcatgaacaaacgaccacagctctgcttgcctgctactgtccttctcagtttggcaaatgaaaggatattttttttagggaaagaaagcgaaaattactagtgctagaaagcagtggcaagtgagaataacacttctgcttgattgattaggttaggagtttatagatagttcttccctcttggtactgtcagtctgtcactggtgtgtaagtagagtgacagtgttgatgttcttccttgagataaacggcgatatccttttatcacttcctgagagagcacggcacgctttactcccttttattctgtaaatattgttctcttccatgggttacagtttgtgtttcgatacagctttgcttgccatgattttttttctggccacttttttagttagagaagctaaagaacttacttttggtttcgggttaggcgtgccgtagattcatatgcaattcatggtccgcttgtttcttttgattattgagcttgagtgattcggtaacatcacaacagtacacccacatatcatggacacatcaagtgcgtgtagtttatttagtatttagtgttttgagtggagacggcaatagctggattctgtatttggtggtgactccttattggttgattgtgacctaaataaatattattgatttgctaacgaatgctggcaaacctttgcccgttttttcgccttgcactttcatgaactaaatgattcttggaatctaggagtattaattggacagactcttggattctactctagatcaataaggttgactacattgataggggattccctgtagaatactgtgcatcaaaatgaataccgattaatagtcaatatgtagacatgaccatttcgctggtcattcaacacattttggtgcgtacattgctttgttctagcagtatttttgctgaccagtgtacaaaatggtaggctagagctataatgctttacatccttttcattgcatcagcgcagtggaaattaacttccacttgacataatgctcccaggccccatcaggattggtgtggggttgtttatttatgtggaatagtttgagaactatattgttttttaagtaattccacttgtacagactttcttgttgctttcttaccagtcctttatactgaaactgattgtccggtcattctagcagtcacctgcattacaacggaaattgatttgcaacaactctgtttcggacaagc

SEQ ID NO: 25424 - DNA, 915 bp, Oryza sativa
  ref <308>: DATABASE ACCESSION NUMBER: AK100866
  ref <309>: DATABASE ENTRY DATE: 2002-08-28
gacccacaaaatcctcctcaaatccccttttgctccctctctcctcccattggcgccggctggttctcccctcctcccgccggcgccggcagacgtgcgagttgaggacaaagacgacgacgagctctcccctccttcctccgccggcgtcggctctcccctcctcctgccggcgtcggcagacgcgtgagttgaggacgaagacgacatactcgcatttcctcctcccccctcccctcccgtcgccacaagctatgcggcggccacgcgaatcgagcgacgagctcgacgctgcgtggagcgacccgacgcgaaatcatcgagcttgtctccggcaagcaccgagctgagcaacaagtgggcgggggcaacgcggagcagcggacgtcctctcccctcccacggccgcgagctcggcagcagccgccggatctggccaggcgtggggcagtggtggcggagatggagcttggcagtgcaagtcaagtcggcaggtcgagctacccggcggtggcgcggagcggggctgcagccaccgtcgacttctttcacggtggtcaaggaggccttctccatcgctcaggtctggtggcttcgtgtgctgcgttgcttttccagttttttttagaggcgagttccccgcgtcttacctgagggacgagagcctatgcaaaggcatgagggcccacaccctctctcctccacggcatcacgcagttgaggtggaggcacgaagtaactcaccagcgtgctgcactgtgaaaggccttaacaaccacatccttctccatgacctatccacccattctgtgagcatatgcagcagtgcagcacatgtaacctacccaccctgtaagattggtctaatcgccgataaaatacacattttgggagagacggatcatttcagcagtc

SEQ ID NO: 25425 - DNA, 1448 bp, Oryza sativa
  ref <308>: DATABASE ACCESSION NUMBER: AK100867
  ref <309>: DATABASE ENTRY DATE: 2002-08-28
caaaaaagaagggaaggacgacccagaagttcctgccgggggtagcggcgcggcggccgtcgggcggcggcgagaagaaagaggaggaatcttgggccgctgtaatctttccttcgaacccgaaccctccttctcctccctgcaccatctccgcatggaatcggggcccaaatcggaagcaaaacaagacgaggagggatcgagtgcgatgggcggcggcggcggcagcagcagaagcagcaaggtgtatcacgagaggcaacggctgcagttctgtctcctccacgccctcaacaaccttatgcaggaaaaggaatctttcacccgagctgagttagatgggattgctggaaatctcgtccagattgatccaaataaggagcactggactcctatgtcattgatttttaagccccaccacaacgtattcaccgggaactatgatgtaaatgtactcatcacagcattagaagctagaaagaagaaggtaatctggcatgatcatcggaaaggggcttcttcaatcgatctggatgcagatgcattgtttggtctgatgatcaatgtacccgtcaggaggttcagagggctttggactggccggcattgggtggcaattcgaagcattaatggcacttggtttaatttggatagtgatttttctgcacccaaggagtttcaggacaaagaaaaacttattgcatttctagacagcattctcagtcaaggtggagaagtcatgatagtgctgcaagatgaataacaatgctgcttcaaatgccaaaagtctacagcaatagcttgaagcttctcatatgtgacttgcagttgttacttgttgttacccgtacatacttcaggactgattttgtagtgagatgcatctgcagctgcaattcctctgaaaacttaccattttgttggtgagcataatggatagggccattcagtacatggaaggtccaattctccaaacgtacagctgatgattttctactactgtcacggtccatggcctttctgtttaattgttcagcaagtcaaatgcaaacaagtaatgagcagagacagaaaacctgcttgctgagacatcgactgtgcacaattacatgtttcttatgccatagtgcatgaaaaccaccttttttcttggcggagggagtaatattgtggtgttaatcaattgtcaatgaaaacatgttgcttgtgctgtttgcatggatatcacctttttttttggggcggaggggattgtgttgatagagatagtgtagttttgctgcaatagttgtatatgttatgtggaaaaccacattaagtccgcattttggggcactcatacaatttgttgattcatcttgtaaaatggaaagttgtagctttgttttaagtagtgttagttttgctgcaatagttgtatatgttctgtggaaaaccatattaagtcc

SEQ ID NO: 25426 - DNA, 2390 bp, Oryza sativa
  ref <308>: DATABASE ACCESSION NUMBER: AK100868
  ref <309>: DATABASE ENTRY DATE: 2002-08-28
ttggcattagcaaatccaatctcgacgtttcgatcgcccgtcagctacaagacttagaagatatgatgaagcaaaccgcaatggatgaaactacaacaatctacgaaccagagcaggttttcaaacaaaataagccccaaaaacagagcacacagatatgctctattcatgccctttatgacctcatcgcaaccttcagtatttctcaatgagaagctgtacacaaatgtggcttcggaggattgctgaagatgcataggataaatgtacaccgtattttgtgcatgtggattacaaaccaatttgatacaaaggctgaagcattcaacatccaaggcagctatctgagtctatccagtagggacgctgagcatttgcttgacctgccatcacaaggagaagaaatatttgaaccaccaaagaccaagaatatggacttgtttgatgaattcaagacagcatctaagcaaggggcacatataaaattatcttccttgcaatagtattttcaaacaaacaaaggtatatatgacgacaatttcattcgccgttttgtgctctttgtgatcaatcggtgttttcctgtgcccaactactcaaaggtatgtaagcttggcatacctaaattttgtataggatgtcaatgcaatcagtgcaattaactggacaagcttgactttaaaccacctaatgaaaagcattaaaaaaaattaataaaaaaaggagtcaatcttgaaggaaacctaccacttttgtaggtaatgcaactgcacaattattattttgtaccaacaaaagacaagttgtttttactcaattgtacttgttgcagttatggtactgggagaagctacgagctgacaatttggatccaaccatagattatactatgcgcgacaaaccacttattcaatactgggacaagcacaaggcaaaaaaaaaagataatacaatggtaaagggaagtagtttgtcatcctgaagtaacaaggaagggaacagcatcaaatgggcacacagacgactagtctcaggaagctaacttttttaccatctaccaaagcactattttcgaccagctaacgtcaatgagttattctgtactagattgttgacgacatcacacttgctatagaatgctccaaatcctcacaaatccgaaaagataagaatgtccaagacataacaagagacagcgaagagagcaaacaatcagaatcatgtatccctactgataagaaaccaaacccaccaactcaaacgcctgtcattgccaagtcactttcaggatcaacacgaagactgcgtaaatcaacaattaaatcaaatactgatttcgtctacaatttaggggctacaaagaagaaaccaaaggatgcgcaagcacataatttaatatccaatgagttcaagtgcaccgcagaagatgaggaaaccattaaaagtataatgagtgcaccagaatcacaactagtggtgcatatcgatgatgtctcaatttcccaaaaaacaacgcaaattctgactaatccggtgactgaatcaagcatgagctatttggatgatcatataatcgatgcatacgttacttgtctacgtgagaaagatatgaaggaaggtacaaggactagggcagaaggtacggtgttcccagagaaaccgttaataacaaggttgctacaaagagatggcgaacactacgtttccaaagacatcatcgatcgggcaatggctaaagcaacggcaaatagatatctaaagcatgatatgattttcctccccatgaacataaaagaaaaaccattggtaccaggcagtcatacacgccaaacgccgcatcatccaagtgcttgactccgtggcgaattcatccacacaacacaaggaactaagaaaagttaaggagtagagcaatattttcagatgttggaaccagatgaaaagcacataccaactcaatggcctgaccaaaaaattacttcctgggaagtcacggtcgtacagaatttgccattacaaggagatcttgtctcatgtgggctgtttgtattaaaaaacatggagcactgtcaaggcaataggttgtcgaaggaatacacgcatgaagatataaaaaattttagaaggaagttagctgcaatcttgggggacgctcgcaagaagaacgataaaaggaagatctaatacatgctacacctcccaacatactgtccgaaataaatgtctttgttctaattcctttaatataaggagttagtattactgaaaaaatggattgttcctttattattttggcaagtgttttcaatagtttgctcagaacaattgtgtgtgtaccattttgtgcaatatactacaatatcagcagaaacggcacaaacaattacact

SEQ ID NO: 25427 - DNA, 1344 bp, Oryza sativa
  ref <308>: DATABASE ACCESSION NUMBER: AK100869
  ref <309>: DATABASE ENTRY DATE: 2002-08-28
tgtctcgatttccgccgaatttcgctccgctccagcaatgggcgaattgggtgctctccagtccatcgtctaccaccgcggatcgctccgcctgcttgatcagaggaagctcccactcgaggtggactacatcgacgtcaagtgctccggcgatggatggaacgcaatcagagacatggttgtccgtggcgctcctgcgattgccatagcagcggctttggctctggctgtagaggtttctgggttggaggatttcaccggtacgcctgcagaggcagcagtttttgtttccgagaaattggagtaccttgtatcgagccgcccaactgcagtgaacctatctgatgctgcaaccaagcttcggagtttagtttcaaggacagcagaaactgagaaagatgccaaagcaatctttcaggcctacattgatgcagcagagaccatgctagttgacgatgtgtcagataacaaggcaattggctctcatggagctgagtttctcaaacagaaacttgaggtctctaaagatatttctgttctaacacactgtaatactggcagtcttgcgactgctggttatggaactgccttgggggttattcgtgctcttcactctggaggaattctagagaaggccttttgcactgaaactcgtccatttaaccagggttccaggcttacagctttcgagttagttcacgacaaagtacccgcaacgctgatagcagattctgctgcagctgcactgatgaagagcgggtgtattcaagctgtaatcgttggagctgatcgtatcgctgccaatggtgatactgctaacaagattggcacatacaacctcgccatttctgcgaagcatcacggtgtgcaattctacgtggctgcgccgataacttcgattgatctctccctcccatctggtgagcaaattgtgatcgaagagaggtctcccaatgagttgctgaactctgaaggtggcctaggtaagcaagtcgccgcgtcaggtatatcggtgtggaaccctgccttcgatgttactccggcaaatctgattaccgcaatcataacggaaaagggtgtgatcacaaagtctgatgctgatgagactttcaacatcaaagatttcatccagtctgcaaaattgtactctaccatgcagtgaggggtcacctctttagggtagtaaataatctgatgaagcatcctttttcttactatattgaaaaggcccatgttgtactgtcaaaaaaaaaattgctcctagtgaagcagaaaattaggtctttttgcgccacaaaatttgatgtactgtgaagatatatgaccatgtgtgtctcgtgagcc

SEQ ID NO: 25428 - DNA, 720 bp, Oryza sativa
  ref <308>: DATABASE ACCESSION NUMBER: AK100870
  ref <309>: DATABASE ENTRY DATE: 2002-08-28
gacacgtactgtcagtttgggagaagacggcaacacggagcgcccagatgttgaagaagccgaaccagacggaggcgaggcggagggagccgaccagcatcagccaccatcccaacaacggcatcctcccgcctccggccatgctcccgctcctctgcggcgacggcgccacctctgctctgctcgcaggatggagatcggcgccggcggcagacgggatggatggaggaggtcgctctgcggccggctgcctatggcctatgggtcatacgcacaggcccatcaggctggaaatatttcttctacgaaaaaagtaaagttcacctaaggtcccttatcttgtcgtcgagttttaaaaccatccctgaaccggaataccagaggtaatggatcattaatctggtataaactgagtcaccttttgatcccaaagcaatattgctctccgattttggtgacatagtggctgagttagtacggccccacatgtcagcccacaatcttctttcacctctctcctttcttcccatctcaacccaaaccttcaagggagctgacaatgggtggggagaaaggcggcggccagcggggacaagctcgacggctgagtagtattaattctatctctttttttatttctctatgtgtgagtggatttttattttaagattttgtgaaacagtagtattttatatgttgtacgaatattgttaatttttt

SEQ ID NO: 25429 - DNA, 1750 bp, Oryza sativa
  ref <308>: DATABASE ACCESSION NUMBER: AK100871
  ref <309>: DATABASE ENTRY DATE: 2002-08-28
atgggagcatccaaattaatctaccaagaacaccctataataatatatgcatcgccatgatcgaagcgaggaagaagaagaagaagaagctgcagttgcagcagcagcagcagcaactagtaactaataaagtgatgacgatggatcgtcccaacgtcgccgtggccgcggtggggctgctagtggcggcggtggcggcgacgctgccggcgccgtcgtgggggcgatgaaccaggaggagtacgtggagaagaaggcgctgcacaccatggccaccgcggaggagctcggcgggaagaagctggacgcgaacctgacggcggcggaggaggccaaggtgacgtgggtgatcgaccccaaggggacgccgggcgacaccaccttcaccaccatcacggcggcgctggagaaggtccccgaggggaacaagaagcgcgtcatcctcgacctcaagcccggcgccgagttccgggagaagatcttcctcaacctcagcaagcccttcatcaccttcaagtccgaccccaagaacccggcggtgatcgcctggagcgacacggcggcgaccaggggcaaggacggcaagcccgtcggcaccgtggggagcaccaccgtcgccatcgagtccgactacttcgtggcgcatggcgtcgtgttcaagaacgacgcgccgatggccaagcccggcgccgagggcggccaggcggtggcgctccgcctcttcggcaccaaggcggccatctacaactgcaccatcgacggcggccaggacacgctgtacgaccacaagggcctccactacatcaaggattgcctcatcatgggcagcgtcgacttcatcttcgggttcgggagatcgtactacgagggctgcaccatcgtctccgtcaccaaggaggtgtccgtgctgacggcgcagcagaggagcaagaccatcgagggcgccctcgagagcggcttctccttcaagaactgcagcatcaagggagaagggcagatctacctggggcgagcatggggggaatcgtcgcgggtggtgtacgcctacaccgacatgtccaaggaggtggtgcccgtgggttgggacggctggaacatcgccaagccggagagcagcgggatctactacggcgagttcaagtgcaccggccccggctccgacgccaagaagagggtgggttgggcgctcgacctcaccgaggagcaggccaagcccttcatcggcacgcactacatctacggcgactcctggctcatcccaccagaggggacatcaacgtcatctagctcagcttcaacgtcgagcaactcaaccgcggaagcaccgacggcgagtagtaactcaactgcatcggctaataaaaaggaaagcaattcaactgcagaagcgccgacggcgactagctactcaactgcgtcagcgacgacgagtaattccactgcgtcagcgaaggcgactaattactcgagttcaagtccaccggcaaaaggcaagtagttaatacaagtgcagcggcgacgacggcgccgacgcgatgaatcgcgttcattggggccaaccaattctgttttggaagcccgtttaattgttcattctttgtgtcaatttgggccggattaatcaatcggccggctacttagatgtttcacgtacgtgtaacagttgtattttcttcccatttcgtttgggtcttttatcagtgtacgcatcttcaaaactatagtgaattttacacatgttttccttttg

SEQ ID NO: 25430 - DNA, 1982 bp, Oryza sativa
  ref <308>: DATABASE ACCESSION NUMBER: AK100872
  ref <309>: DATABASE ENTRY DATE: 2002-08-28
gatccaaacacccatccgccgccgctggctgaactcgcgggtgatctgatcggagccggaggaggaggaggaggatgttcgtggagggcttcagggtggagagcccgcgcgtgcggtacggcgacggggagatcgagtcggagtaccgatatgacacgacggaggtggtggcgccgccgtcgccggagaaggggtgggtcgtccgccccaagtccgtcacctaccacttcaagaccaccaccaccgtccccaagctcggggtgatgctggttggatggggaggcaacaacggcaccacgctcacggctggtgtcatcgccaacagagagggaatttcatgggcgaccaaggagaaggtgcacaaggccaactactttggttccctgacacaatcatccaccatcagggttgggagctacaacggggaggagatctatgcgccttttaagagccttatacccatggtaaacccaaacgacatcgtgttcggtgggtgggacatcagcagcatgaacctggccgacgccatgaccagggctcgggtgctggacatcgacctgcagaagcagctccggcatcacatggagtccatggtgcccctccccggcgtctacaaccctgacttcatcgccgccaaccagggctcccgcgccaacaatgtcatcaagggcaccaagaaggagcaggtcgaacaggtcaagaaggacatcagggagttcaaggagaagagcaaggtggacaaggtggtggtgctgtggacggccaacacggagcggtacagcaacgtggtggccgggatgaacgacaccatggacaacctgctgggcgtcgctggacaaggacgagccggagatgtcgccgtcgacgctctacgccatcgcctgcgtcatggagggcgtccccttcatcaacggcagcccccagaacaccttcgtgcccgggctgatcgagctcgccatcaagaagaactcggtgatcggcggcgacgacttcaagagtgggcagaccaagatgaagtccgtcctcgtcgacttcctcgtcggcgccggcatcaagccgacgtcgatcgcgagctacaaccacctaggcaacaacgacggcatgaacctgtcggcgccgcagacgttccggtccaaggagatctccaagagcggcgtcgtcgacgacatggtctccagcaacgccatcctctacgagcccggcgagcaccccgaccacgtcatcgtcatcaagtatattccatacgttggggacagcaagagggccatggacgagtacacctcggagatcttcatgggagggaagaacaccatcgtgctgcacaacacctgcgaggactcgctcctcgccgcgcccatcatcctcgacctcgtcctcctcgccgagctcagcaccaggatccagctcaaagctgaagaccaggataagtaccattctttccatccagtggctaccatcctgagctacctcagcaaggctcctcttgttcccccaggcacaccagtggtgaatgcactggccaagcagagggccatgctggagaacatcctgagggcctgtgttggactggcccctgagaacaacatgatgcttgagtacaagtgatataggccttgacaggtcctcttatcaggagggatgatgaacagcaagtggtggaggaaggtgacagttttcttcaacaagaaaaagaacaaaaaaagagagaaaatgaggaacacctgaaagaaataacaagaggccaagtggggaagcaaatgaaatgatcaagtgatattcattcagaaaatgggtgtcattcacttggatcctcttaattgggggcatctattgacagtttgacactctgctccatgattttttttttcattttttgtttttttaattgagatggagacttttttcagctctgctgctagtatgctgtgagctgcatgaacattggttaatattgtgtatgatgataggtgaagcaaggaact

SEQ ID NO: 25431 - DNA, 1535 bp, Oryza sativa
  ref <308>: DATABASE ACCESSION NUMBER: AK100873
  ref <309>: DATABASE ENTRY DATE: 2002-08-28
ggcacactccacactgccgagcaaaatcgctaaacccagcctcgccgtcgccggcgacatgctccgcctctcatgctgccggccgacggccggcggcggcctcgccggcgccatgctccacctcctcccgctgctccgcgcccgcgccgccacccatctccccacctcctctctggacctcagccgccgccgccgcctcctcctctccaccgccgccagatccgccgccgcgacccccttctctgtcgaggagtacctcgtcgacacctgcggcctcaccggcgcccaggcgctcaaagcatccaagaagctctcccacctcaggtcgcccgccaagcccgacgccgtgctcgccgtcctctccggcgtcggcctctcccgcgccgacctcgccgccgtcgtcgcctccgacccgcagctgctctgcgccagggccgacaacatcgcccgccgcatcgcctccctgcgcgaccgcgtgggcttgtcggacccccagatcggcagcttcctcctcgcgggcggcgccaagggcatccacgcgtgtgacgtcgcctcgaggctggagttctggatccccttcttgggatccttcgagacgctcctcaggatcttgaaggggaacaacgtgctggtgctctctgaccttgagaaggtgatcaagcccaacatcgcgctgctccaggagtgcgggctaactgtttgtgatattgccaagatggccaggtttgctccacggatgttcacgtccaatccaaagcaggtggaagggtttgtgcggcgtgccgatgagcttggcgtgccacgcacctcaggccaattcaagtacatggtgggtatttttgctaacatcagcgaaggcagtgccaccgcgaggatggagtacttgagtcgcagtcttggttgctccatggacaagctccgctctgcggtccaaaagttaccacaaattctaggattatctgagacaaatcttggcagcaagatagagttcttggtcggcaaggtcagattggagcctgaataccttttgaagacgccaaagctgttcacgtacagcttggagaagcggttggtggcgaggcattatattgtgcaagtccttgctgcgaagggattgaagggattgaaaaaagatgttcccttttgctcatatgtacagctaggcgaaagttgttttgtaaaaaacttcattgatcagcacgagaacgttgtccctggtctttctgatgcctatgctgcacttcgtgctgggaaagtgcctccagaggtccaacactgacatcttcggacagagttattggaattcattctggcagaatgccttctggagtccaactataacatctttggaggttaattatctttcaagcccatacctcatgttgtgaggatcactaattggtgtgatggttttcatgcatggtcatgcctttttcatattttgatttcagttgtaatatgagttgttgctaacttgctatttatgcagcaacttgatagtttaaatcttgatgctctagtgcccttacagcctt

SEQ ID NO: 25432 - DNA, 2717 bp, Oryza sativa
  ref <308>: DATABASE ACCESSION NUMBER: AK100874
  ref <309>: DATABASE ENTRY DATE: 2002-08-28
tggatgcgctctctcttcaccatgccgccgccgccggcggcggcgccggcggccggcgagggggctcccccatcctcctctgcaccgtctccgctctaacccaccgccttcgagtctgacccgtcgagtgcggcctccggccggcggcggcggagcgagaagagagaaggggagatgacgcgccgccgcccacgtatccgcgcgcttccctccggccggcggcgtaccacggcgccgccgctcccggggaagaagatgcccatcgtcctcctcttcctatcagcaattcaacaccgcgaggacaacaagagtcacatgattccatgaaccaataaggcagcagtgttgtactgttcttcgtctcctctctctctctctctctctccacaaggtgattgatctccatttcgtgtacaaaatcttctttcattacatgatgatgatctgcacctgatcgaattatgatagttgttacatgttcttctcatttcggttacagcaaaatgaaatgacaggttaactgaatatcctcaaatcaatggagcgaaactctgaactcctgactcaaacaacatttcagagattcatcctgaattcctgatacagagtaagccctcccatcccttctttcttgcttgccttgggcaactaccaaaaacccaccaatcatgcaacaatctatgtgcacacacaaaccaggcagttgcttcctagaagagtgagttagtgtgtaggtaagaaaaatgtaggaaaagaaactctccctgatggggactgcagtgcatcagcatgcagttcagttcaggcacgttccctgaaagttctatgcctcccttgcggcaactaaactctgaaaaagtctagtcagttgtggcgtgcagctgagggtgtgtttaggcgctgtttagatgggattaaaacttttaagtccctattacatcggatgtttggatactaattataaatattaaatatagactattaataaaacccatccataatcttggactaattcgcaagacgaatctattgagcctaattaatctataattagcctatgtgatgctacagtaaatattctctaattatagattaattaggcttaaaaaatttgtctcgcgaattagctttcatttatataattagttttgtaggtagtctatatttaatactctagattagtgtctaaagacagggactaaagttaagtccctgaatccaaacaccaccttagttcacgctaaaattggaagtttggttgaaattgaaacgatatgatggaaaagttgaaagtttgtgtgtgtaggaaagttttgatgtgatggaaaagttgaaagtttgaagaaaaagtttggaactaaactccgcctgagtaagagtatatagcacaagaacttccatatcacaagttcacaaccctctctgacactgacctcccaattcactttgcctcacaattaagctggcaatgggtccataggagcacagatccacatcacacacaagaaacttactagtactctatttcaacgagttcactgactgtaccgcagttaaaaaaaaaaaactactgtccatgttcccatatcttcagagtaagccttcttttcctttttcttttttttctttttacaatttgcccagtactatcaaagaaatcacggatttggaaaatagcactgtatgtgtcattcttacgtacagtggtatttcgcaactcatgtacctttgcaatgataatggtatttcctaatattttttcattttttccctcctgaagaatcttcaataatcacctcacacagttttgggcttctgaccgaagcttggctcatcttgtcaccagaaatttcattttgctgggatgctatatccaccaattgcacgtaaattgtagtactactttttaccgtttaggtgcaactcaagtatcaaattagctcttttgcaaaactcttcaaaagtgtgttgatctgtttggttggcttccccgtgtgtttggttcacgttctgtcactgccatgataataggccagagaccaatcattcaacctgcaacttccatacaacaaccagctaagctgatcgattgggttttggataaccagatttaacacgtgttgtggatctttgctacaggtgttctaatcttttcattagtaccattccattattcaatatagtaacagcaattgcgatccgtgcagctgctttcggaagctctcaggctgttttcctgcagtacttggcctgtggaaaaaaatttccctttgctcctcaaagtgggttcctggcacgttgcacacttgtgcacaaatatccattatggtacgcacgtcttgaagctaatggtgccatgccgccctcgtgcctgaaccgagaaacatttgctagtgggaggcaaggaaggcgatggccgatgtaagagcactaattgtctcattgtttccatcacagcaaattgcactgtaagtcatccaacttgtatgccgtgtacttcccatctcaaggactatataacctcaacatgccacctaaaaactaagataatctcgacctctctaaatcaaacaaactggatgggctaacaactctgacttgttcgtccaaccaggcttacatagtcactgttgaaatttgattgggttcagtacaagtctagctagatttttttcagtcaattatttgataggcaggacagggaatcaaacgtgagg

SEQ ID NO: 25433 - DNA, 1870 bp, Oryza sativa
  ref <308>: DATABASE ACCESSION NUMBER: AK100875
  ref <309>: DATABASE ENTRY DATE: 2002-08-28
gaggagcaggaggcgatggtttcccagaatgagagtccgacgccccttccctgtcgccggcgttcgtccttccccgctggtactcccgttccgctcagccacggcttcgacctccaccgccaccgccgggcctccacccccggcatcagcttcctctacgtcgccccatggagctccaccgccactggttagccccgtatgccgtcacccatttcctcctattcctccgctctaggtggcgatggtcgccgccgccgccccacgtgcttccagtgcaggcggaagcggaaggcagcgggctcatccagcgtgcggatgggcgacgatgtggatcgtggccgtggatagggagcccttcttcaactcgacgtcggggaggaacgacggtcgaggaggatggcttcgccgttgctgttgtccacgtcgatctgctcctcatccccttcctctccagtaatatgtggatcgagggtggtgggacatcccctccggcggcgaatcagggtggccttccgcagcattttctgatgaggggtggtagcggatctggaggtcccataccagttctgctcgtggagagggaggagccaacctactctgttgccaacttgctatcttgacaactgcgtggttgcagtaggcaagttggcagtcctgatcgtcatcctcaatattgcagcatcaggccctttcccccttcttaattttttgtattagtcgtgaattactcttttcaatttcgaacttgtttgcatcaagaatttttgctgttcgtatgtatatattctgatcttgtttgcataaagaatttggccaatatttggaagaactgaaaggattgagcttttgcttataatcgaatcaattcttgatttcttgcaatatacaatttgtgattttcttttgcatgcctgataatgtcctcatagctaacagaagcttgtccttctgattgatttggttgtctgccacgttcgttgcaggctacctgttcgacggaatgcaacagggagacagcttttaacctggatcgtgttagctatcattggacggtgctgccgacagagtacagctcggctgcaggactcaaggaggaacaaccacgacttgcagcagatgcccaaatcccaatttcgcgtcctgcctctttcttgtgattcagtttgcatttgcaaatgccatttacagtccttgtagtgctgttggctggcatatcgccattggtctcaactcttttgatgtccagctctagcctctaggacaccagatcaaaccgactggcatcagcatctgcaatgtgcactttggcaggtggatgcacatcttgatggcatggtggaaactagaaaagaacatgagaagattaagccagtggtggtggtgccactggaatgccatcctggtcattatcctcaacatgtccttaatcaacgctcgtcgccggcggccaacaccaaagggcaggggtgatgcagagatgtcaaccccttcatcaacgctcgtcgccggcggccaacacaaagggcaggggtgatgccgagatgtcaacccaggacgagcacaccacaattgatgacctgcttcggtggcaggcgatgccctctagactgatttttttggtaccgagtgtatatgtgtgtttgtaacgataatggcacgatcaattgtaaaaacaaaaaaccattatacccgtattctagtgcagtaaaatatttactgccttatatatcaggcccaatcaattactaagtaacttttttactccctctatgattggatgattcgaatacatattagtaattttttttactccatgaatgtaattttgtttatcacatgatagaaacaaattcaattgtcaagatattcc

SEQ ID NO: 25434 - DNA, 2360 bp, Oryza sativa
  ref <308>: DATABASE ACCESSION NUMBER: AK100876
  ref <309>: DATABASE ENTRY DATE: 2002-08-28
gttggaatacttgggacacataattggagctcaaggtgtggccacagatccttccgaggtacatgctgttcaagattggctagttccaaggaatctcaaacagctaaggggttttttgggactgacaagctattacaggaagttcataaaaaattatggaattatgaccagacccttaactgcattgctcaagaaaggggtgcctttcaagtgggctgaattgcaacaacaggcatttagtcaagttaagtgggctatggttcaagcacctgtgttggctttaccagatttttcccaggaatttattgtggaaactgatgcttgtgataaaggaattggggctgtgctacttcagaatgggcacccaattgcttatttgagtaaagctttaggggttaaagctcaagcattgttcacttatgagaaagagtgtcttgcaatattgatggcagttaacaaatggagagcttatttacagaacaatgaatttgttatacagactaaccacaagagtcttacacatttgggggaacagaaattgactactagcatgcaacacaaagcattcatcaagttgatgggtttgcaatataagatcagatataaacaaggggcagaaaacagggtggctgatgccttatctaggagggatgcagatgaggagttgtcggcaatctctgttggaagacctaaatggttggaatctgtggttgattggtatgatcaagatgaggaggcaaaacagttgctggctcaactgataatcaatctagtaggggtagaacatttcaccttgactaatggagtaatcaggttctagggaaaaatctggctgggtaagtttgttgaagcacaacatgcagtacttcttgctatgcatgccagtgggctaggaggacattctagaataacagccacctataatagaattaaaaatctattctattggccgggaatgaaaaaagatgtttaccagtatgtgtcatcctgtgacatctgtcagcaagccaaacctgaacattgtaagagtcctggtaaactacagcctttaccaattccagagcaagcttggtcaaccattagcatggattttattgaaggtttacccaagtcagaaggctttgatacaattcttgtagtggttgacaagttctcaaaatttgctaagtttatacctctcatcctttcacagcactacaagttgccacagcttttatcaaaaatgtttatgatacatttgggatgccacaggtgataatctctgatcgggacagaattttcacaagtgccttgtggcaagaattgttcaaactagctgatgtcaaactcaacatgagctcttcttaccaccctcaaactgatggacaaactgaacggctgaatcaatgtttggaagcttatctccgttgtaatgtccattcatgtcctaagcgcagtggtctaaatggttatcccaggcccaacactggtataatacatcctttcacagtgctctgaagaaatctccctatgaagtgctctttgcaaggaagccaactccttttggtcttattgatgttggaaaaagtacagtccctgatgtgcaaatttggttgcaaaacagagctcatatgaatgaggttctacatcaacaactgactagagcacaacagaggatgaaacatcaggctgacaagcatcgttctgagagggtttttgcagttggtgacatggtttatttgaaacttcaaccatatgtgcaaatgatagtagcacgaaggagttgtcaaaaactgtgtttcatgtactttggcccctacaagattctggaacgtatcggtgaagtagcttatcggctggatcttctccagagtagccaaattcatccattagtgcatgtgtttttgctcaagaaggtgattcattctggcatacaagtccaggcggatcttcctgaaaactgtgtttctgaagaagctgaggtggttccagaagaaatacttagtcgtcaactcattaagagaggtaattctgcagttccttacgggttaattcgctggactggtttacctgcatcgctggctacatgggagaatctgcgtcaacttcagcttcgttttccaggagctccggcttggggacaagccgtttcttaagtaggggggattgttatgtaattagcttactgtagccatcaggttttgtcactactctgtgtaggctttactgggttatgtgcttgtgtaggcttgatgggtatttgggccttgagctgttgtgtgtgtgtgttttgcgacgtgccgtgctgggccggcggacgcgtcgctgattgagttgccttgtacctttaaaaaggaactctcttgtctgagagagatatg

SEQ ID NO: 25435 - DNA, 4029 bp, Oryza sativa
  ref <308>: DATABASE ACCESSION NUMBER: AK100877
  ref <309>: DATABASE ENTRY DATE: 2002-08-28
tatcgcacaaggaaggaaacaagccgaagaatccacagcattctctcttcctctctcttcttcccccattttgctctcgccgccgcccacgccgttgctgctccgtcgttggtagcctctgctgctacgagggcgttgggatctggagatctggtagggaggattgcgggatggaggccagcgccgggctggtcgccggctcccacaaccggaacgagctcgtcgtcatccgccgcgacggggagcccgggccgaagccggtgaagcatacgaatgggcaggtgtgccagatttgcggcgacgacgtcggcctcacccccgacggcgagcccttcgtcgcctgcaacgagtgcgccttccccgtctgccgcgactgctacgagtacgagcgccgcgagggcacgcagaactgcccccagtgcaagacccgcttcaaacgcctcaagggttgcgcccgcgtccccggcgatgaggaggaggaggacgtcgacgacctggagaacgagttcaactggagggacaagaccgactcgcagtatgtcgccgagtccatgctccacggccacatgagctatggccgcggcggtgacctcgacggcgtgccgcagcatttccagccaatccccaatgttcccctcctcaccaacggggagatggctgatgacatcccgccggagcagcacgcccttgtgccgtctttcatgggcggcggaggaaagaggatccaccctcttccttatgcggatccaaaccttcctgtgcaaccaagatccatggacccgtccaaggatctcgccgcgtatgggtatgggagtgtcgcgtggaaagaaagaatggaaagctggaagcagaagcaggagaggttacaccagatgaggaatgatggcggtggtaaagattgggacggcgatggcgatgatgcagatctaccactaatggatgaagctagacagccattgtccagaaagattccgatttcttcaagcctggtcaatccttataggatgattatcataattcggctggtggttctgggcttcttcttccactatcgagtgatgcatccagtgcctgatgcatttgcattatggctcatatccgtcatctgtgaaatctggttcgccatgtcttggattcttgatcagttcccaaagtggtttcctattgagagggaaacttaccttgaccggttgacattgaggtttgacaaggaaggccagcaatctcaactcgccccagttgatttttttgtcagtacggttgatcccatgaaggagcctcccttggtcacagcaaatactgttctgtctatccttgcggtagattatccggtcgacaaggtctcttgctatgtttctgatgatggggctgccatgctgacatttgaagcactgtctgaaacatctgaatttgcaaagaagtgggttcctttctgcaaaaggtacagtctcgagcctcgtgccccagaatggtacttccaacagaagatagactacctgaaagataaggtggcaccaaactttgtcagggagaggagagcaatgaagagggaatatgaggaattcaaggtcagaatcaatgcattggttgctaaagcccagaaagttcctgaggaaggatggacaatgcaggatggaactccctggcctggaaacaacgttcgtgatcatcctggaatgattcaggtcttccttggccaaagtggtggccatgatgtggaaggaaatgaactgcctcgattggtttatgtttcaagagaaaaacggccaggctataaccatcataagaaggctggtgctatgaacgcattggtccgagtctccgctgtactaactaatgctccatatatgttgaacttggattgtgatcactacatcaacaacagcaaggctataaaggaagcaatgtgttttatgatggatcccttggtaggaaagaaagtttgttatgtgcagttcccacaaagattcgatggcattgaccgtcatgatcgatatgctaataggaatgtcgtctttttcgatatcaacatgaaaggtttggatggtattcaaggccccatctatgtcggtactggatgtgtctttagaagacaggcgctgtatggttatgatgcccccaaatcaaagaaaccaccatcaaggacttgcaactgctggccaaagtggtgcatttgctgttgctgctttggtaacaggacaaacaagaagaagactgctaaacctaaaacagagaagaaaaagaggttgtttttcaagagagcagagaatcagtcgcctgcatatgctcttggtgagattgacgaaggtgctccaggagctgaaaatgaaaaggctggtattgtaaatcaacagaagttagaaaagaaatttggtcaatcttccgtttttgttgcgtccacacttcttgagaatggtggaaccctgaagagtgcaagcccagcatcactcttaaaggaagctatacatgtcatcagttgtggttacgaggacaagacagactggggaaaagagattggctggatctacggatccgttacagaggatattcttactgggtttaagatgcactgccatggttggcggtcgatttactgcatacctaagcgggctgcattcaaaggttctgcacctctcaatctttctgaccgtcttcaccaggttcttcggtgggcgcttggatctattgaaattttcttcagcaaccattgccctctttggtatggctatggaggtggattgaaatgtttggaaagattttcctacattaattccatcgtgtatccttggacatccattccactattggcttactgtacattgcctgccatctgtttgctgacaggaaaatttatcactccagagcttactagtatcgccagcctttggttcatgtcactatttatctgcatttttgctacgggcattctggaaatgagatggagtggtgtaggcatcgatgattggtggaggaacgagcagttttgggtcattggaggtgtctcttcacatctctttgctgtgttccaaggacttctcaaggtcatagctggtatcgatacaagcttcactgtgacatcaaagggtggagatgatgaagagttctcagagctgtataccttcaaatggacaaccttgttaataccccctaccactttgctcctattgaacttcatcggggtagtggctggcgtttccaacgcaatcaataacggatatgaatcatgggggccgctctttgggaagctgttctttgcattttgggtgattgtccatctgtatccgttcttgaagggtttggttggaaggcaaaacaggacaccaacaattgtcattgtctggtccattctgctggcttcaatcttctcgctcctctgggtccggattgatcctttcctggcaaagaatgacggccctcttctggaggagtgtggtttggattgcaactagaaggtcagcatgtgaacttccccaatcaagtgtgtgcttgaagaagtatttttgcaggtgtttgtgcccatatttttttttcattttttcctctgtagatagaaacacgaaaaaaaaacttgcatttcttttgttccatggtggtagctcagcctcatatctgcaatattgagcaaacgggaggctgcgacaaccttgtgcagttcggccacgaaaaatacagtgaatgccagtgtttgattgttcagcattctttattagtttggtggaaatttgatcgggtgagccgaacagaaagttgcttgattctgcattgctctccaccatctacaaaaactcggtacttgtttctcaataaggcaggaatggatctgccgtctggaatagaggaagatgcacattatttatgtagcgagttaaaatatgcctgaagggcttgttcattccttgttcctctttctatttcattttttgtccttgttagaacaaatagatctctagttttagtgatttagcccatccggtgttgtaatttgtaaaggtgcccctttgttcaatacttcaattgcgtaatgtcccc

SEQ ID NO: 25436 - DNA, 3241 bp, Oryza sativa
  ref <308>: DATABASE ACCESSION NUMBER: AK100878
  ref <309>: DATABASE ENTRY DATE: 2002-08-28
ggtcttccgccccgccccgcccctcccctccacccacgcggagaaggagaggaggagaggagaggagagagggaggcagcagctcgcccgccgccgcccctccctccgtgcccgcgccgcccaccccgccgccgggcaccggccaccatcgtcttcatcatcttcccaataaaccccccatggcgtcctccctctccctcgacgacatcaacgacgactccgtcgacctgtcgaaggcgccggtggcggaggtgttccagaagctgaaatgcgaccggaaggggctcaccggagcggagggagagagccggctgcggctgtaagggccgaacaagctggaggagaagaaggagagcaagcttctcaagttcttgggcttcatgtggaacccgctgtcgtgggtcatggagatcgccgccatcatggccatcgtcctcgccaacggcggcggccgcccgcccgactggcaggacttcgtcgggatcgtctccctgctcatcatcaactccaccatctcctacatcgaggaggccaacgccggcgacgccgccgccgcgctcatggccggcctggctcccaagaccaagctgctcagggatggcaggtgggaggagcaggaggcggcgatcttggtccccggcgacatcatcagcatcaagctcggcgacatcatccccgccgacgcgaggctgctcgagggcgacccgctcaagatcgaccagtcggcgctcaccggcgagtcgttgccggtgaacaagcacccggggcaggaggtgttctcgggctccacggtgaagcagggcgagatcgaggccgtcgtcatcgccaccggcgtgcgcaccttcttcggcaaggcggcgcacctcgtcgacagcaccaacaacgtcggccacttccagcaggtgctcaccgccatcggcaacttctgcatcatctccatcggcgccggcatggcggtcgaggtgctcgtcatgtacccgatccagcaccgcgcctaccgcgacggcatcgacaacctcctcgtcctcctcatcggcggcatccccatcgccatgcccaccgtgctctccgtcaccatggccatcggctcccaccggctgtcgcagcagggcgccatcaccaagcgcatgacggccatcgaggagatggccggcatggacgtgctctgcagcgacaagaccggcacgctcacgctcaacaagctcaccgtcgacaagaccctcatcgaggtgtgctccaagggcgtcgacaaggacatggtcctcctctacgccgccagggcgtcgcgcgtcgagaaccaggacgccattgacacctgcatcgtgaacatgctcgacgaccccaaggaggcacgcgcggggatccaggaggtgcacttcctccccttcaaccccgtcgacaagcgcaccgccatcacctacatcgacggcaatggcgactggcacagggtgagcaagggcgcgccggagcagatcatcgagctctgcaacatggccgccgacgccgagaagaaggtccacgccctgatcgacagctacgccgaccgggggctccggtcgctcggcgtgtcgtaccagcaggtgccggagaagagcaaggacagcggcggcgacccgtggcagttcatcgggctgctgccgctgttcgacccgccgaggcacgacagcgcggagaccatccgccgcgcgctccacctcggcgtcaacgtcaagatgatcaccggcgaccagctcgccatcgccaaggagacggggcggcggctcgggatgggcaccaacatgtacccgtcgaccaccctcctcggcgacaagaacagccaggtgaacggcctccccatcgacgagctgatcgagcgcgccgacgggttcgccggcgtgttcccggagcacaagtacgagatcgtgaagcggctgcaggagatgagccacatctgcggcatgaccggcgacggcgtgaacgacgcgccggcgctgaagaaggcggacatcgggatcgccgtggacgacgccacggacgccgcccggagcgcgtcggacatcgtgctgacggagcccgggctgagcgtgatcgtcagcgcggtgctcacctcccgcgccatcttccagcggatgaagaactacaccatctacgcggtgtccatcaccatccgcatcgtcctcggcttcctcctcatcgccatcatctggaagttcgacttcgccccgttcatggtgctcatcatcgccatcctcaacgacggcaccatcatgaccatctccaagggtcgcgtcaagccgtcgccgacgcccgattgttggaagctcaacgagatcttcctcacgggggtggtgctcggcacctacatggcattggtcaccgtgctcttcttctacctcgcgcacgacacgaacttcttcacggatgtgttcggggtgacgtcgatcagggagagcgagagggagctcatggcggcgctgtacctgcaggtgagcatcatcagccaggcgctcatcttcgtgacgaggtcgaggagctggtcgttcgtcgagaggcccgggttcttgctgctcttcgccttcttcgctgcgcagatggtggcgacggcgatcgccgtgtacgcgcgctgggatttctgccggatccagggcatcgggtggcggtggggcggcgccgtgtggcagttcagcgtcgtcacctacctcccgctcgacgtcctcaagttcatcatccgctacgccctcaccggcggcaaggccggggacagcgcccagaaaaagtgagggaatcctgggtgtttgtctcgcgcacacggcgttcacgacacaaggaggaggagctcacccagccccgccgccgcaaccgccgccgccgccgccgtctccgacctcctcgccgccggtaaggaggagctctccgagcaggccgccaagcgcgccgaggtcgcaagatcgactcggtggtgaagctgaacgccggtggccggagagcttgttcatgttgccgtaagcgtacgtctcgtgtttgcgtggttttgagcgggaatgagcttgtgagaaaaacaaaaaaaacaaaaaaaattcagtccatctgctggtatatacatatttcatctgttcagtttttcagtacatatatcttgtcaactgtgtatatttgtgcatgtctatatataccctatatacaagtgttcagttgaaatttgcaaattgtgtagatatactccctctgttttttaatagatgacgccgttgactttttctcg

SEQ ID NO: 25437 - DNA, 3897 bp, Oryza sativa
  ref <308>: DATABASE ACCESSION NUMBER: AK100879
  ref <309>: DATABASE ENTRY DATE: 2002-08-28
gggtcttcttcttcgtgctctcaccgggggcgtgtggtcgcgttttgcttcttcccgtttccgatctcctctctcgattcgactcgagttgtgttttttatttttccattttttttctgaatcgtcgggttgatttggatcgtcctcgttgttgtttccgccttctgttcccgcagatcaccgccggtgagatgagatgagatgagccccgtctacgctcgattccgggagcccctcctgttcggttcgctttgcgacgtgtttgattttttttctctctctatggtgatttgattccgattagatccgatcttgttctggttttgaattctgtgttctaccttttccccgtgtttcctcctctaggcgtgttcggttgcaggagcgggtttgatccaggattggaggttcctgtggcgtcgtgtggttgaagaggtgaacgtttcttgtctacggtccgtttgatttagtcacttggtttcggtgatttcagatttggcaatttgagtggatatgctaacgttacttcaatctatggatggatgatcatcggttcttatcattcctcacgcgaggtgattcgagaccctgggttgattgttgttatttgtgaccgctgatctggcttgttgtcggtatgtgtttgtgctcctctagatgatgcaggagggaggatgactgttgagatgaaccggattggtggaggtttgattgttattgtccaggttcatggttgttttggattcatgatgaattatggttcttggttgttttgattagtgcacggttgttctgaaattatcctgacatggaagttctgaaactatcctggctggatttcctttggtcagatccgcaagatgggcagatttctaagtggtttggagatagattatacgggagattgttagatggggatttcatcatttcaatgtttttttgggtcctgatcccccttgattttatttagttgtcagcataatttgatttatgtctggaaggtctgatttgggaagttggttgttcttcaggaattggatatatgcagctcacagcgagtcctatttgccgcatcagttggaattatacaggctgctagcagtcccttttttgtgatcgacaacctttacctgcttaatctttgataaccaagttgatttcttttacatgttcttcgtcagtaattaatagttcttgcagatactcctatgccaaagatggaatttgcaatatctgcctcggtctatactaatatctgcaaactccagactttatgccactcagtctttaagtgattttgtttatgcttagactgctttcctccaaaataaagtctcctggtcattgcaaggctccacataatttttatggcctatctgagtgaagccttaaatcaccaccctttcccttcttaatcattagtagatgttcaatgcttacaaagttgaatttcttcccaaataaatggtctctttgcttactgcaggtctagttcataattttacaaggccattctgatgctgagtgaaatctttaaatcaccttctcttcaattcatcacttagaaattaaatatttacaaagttgaatttcttcccgaataaatggtctcttgctcactgcaggtcaagttcataaatttgcaaggccaacctgattctgagttttaaatcactacccttaaattctcacaaaggtagaatttaaatactcggatttacctgcagagatggaattgcataggagttatggagcttcaagatagatgggactacaggagaatcctacaaccagaacatacttttgctagtctgcctaaaacttttcccttctcgttcaatttctgtttcggtcatcagaattgctctctacgacatatagctatgattttggtgtgcctttgcttttctttgtttgtcacagattctttaattttctccaaggttattgattggaggctgttgacttgttcggtttgtgttctatcactgtacctcaatcattaagtataagttcaatgcctgagctgtttgttcgcatgatagtcatagggtcggtctgggaattggagctctgtatgtcaacgaaggggcatacaaggttttggttgattttttgagattatgttatctggatttagcgatttcagaatacggatcgtttggcttggccttcttatgtggtcttccctgatgggtagttgttggattatcccctagtttgagtggattcaagacaacctgagttggttctttttgtggtatgagttctgttcttgtttagatgatgcagaaggatttttgattctatggtgatattacgaagtttgtgctgcaatagctatgacaaccctgattggatttgttgctgctcagatatgtgcaagttaaaggttgaagcttgactggagcaacgatcacataactggaaaaaagaccatgaagccgcaatatactcatcaactcatttgctttcagttcttgcagtccagtttaagcgatgcttacatggatattcgctttttttgtccagcaattggaagtactggcttgttggagttgcagatacgacattcagagttgcagtgcaaaatcaatacggatttggatgttctttgacctctctaaagccaggcttatccctcacccaccatgacataatttttctgatgtttaagcagcttccacctaaataaagattcagagaagatagtattttgctcgtttcaggtccattttcggtcattttggaagggcaatccaactccgattgaaattttctgaaccactagcattttcccttcaactccttgttgaaaattcaatgcccacaaagacgggagggttcgagggtgtgttttggagcttcaagccaatacaactatatactatttagtgctctcttgccttgcatctcttgttcttgtgtctgtatttcattttgtgttgcttatgccttactctgcttgcagattctatcttttgtccatggtgacgtggatattttcttaagaagttgacttgtctggtttgtgatataccactttctgggtttggtcaattatctctagattcagtgtcttgttgttcttgttggcatgtgattgcagggtgggtctagaaaaatgagcatgtgacaaagcttaatctggaaattgagcaagggcatccagtagggtcatcatgcaaggtctggtcgtttcatagattatcttgatttggattgtctctatgttatctttaggttttggcattttgaggagtctcacctaattggccagctatcagacccattagtctttacataagtgggagttccgtaccttcggtttatatttttttgaaaaacttatcttgtttggtatatgtgtttctatgctcctttagatgatgccaaagggtggatgtggagttgaattgaagggtagatgtttgtttgtggttcatggccccatgatgttacaacggtattgtgaagtctgtattattatcaatagtggtggatttgttgtttaatatctacaagttaaggtttggagttgcattgaagctcggctggaccaaagatcatgcattggaaaaaaaaattttgttaggatttcttcatgtgaacacttaaatttaatctgtccaacaatacttatccacttgttctccagcaattagaagtatatggcttgtcgagtagttattttggaaccacgctggatgttcccttgtgatttaaccaacttccctgatttctcttgataatctatgttagtcaaaactgttcagactaatcatgtccctagttgattcaatgcagacatggcatttgaagatacaaagtgtaatcaatatttgttaggatgtgtgctcagttgctgattcttcaatccaatcttattcctatctc

SEQ ID NO: 25438 - DNA, 2517 bp, Oryza sativa
  ref <308>: DATABASE ACCESSION NUMBER: AK100880
  ref <309>: DATABASE ENTRY DATE: 2002-08-28
tttggggattttttttttaggttagtgaagaagttgggtgaagaaggacccgggcaagacttacatgctagctgcctctccatggtatgatctctctcttccccacctctctgtctctttcttccctcctgcacgcatggagaagggtccttgtggatttgatttgtgaagagaagcattttacttttcacctggacagccgcaaagggctttttgctggaatatgatttttttccctctaaatatagaactacggagcttttttggtttcaggcggagaacttggagcttctaactggtagctcggatttgatttctagtgtagctagtgactaagacatactccatccgtttcacgataagattggagccatgttccaagaagtcattccaaaattgcaatgtctgttccagtactgaaccaatccagctcggctccatttcaagccatcataggcatcacctcaaagacattctactcactgcaaagccagggagccatttctttctctcaagttggcatgcgttcctttttcttagttaaatcataaattaacaggcccaacttaattatcatggaataagccacagcaattttacccacctaaggtcactctgtgcattcatttcaggacaatgacaagcattgggatagacaaggcagtagattctcaatcaattggtgctgtctagtaggtgaagagtgacaccgaagcaggtactacaagcaaagttcccttgtctactatgatgtctgaatattgaatttactattgtatattctctcaattgattcttctcataccattggatttctgattacatgatttacaattttggtgctagcaaattgatgagtatgtttatacaaatcccattaaaatgttgatagtaagataaaattttgatagatgagcaagaattgtttgagttaggatcataatcatttttatcctaaattacattatataccaggaatcatgaagttctataagagaagtttgatttcaattttacattttcccctattttgaacatgtgcaatcatttatttggatttcagtgcaatacatgagcacttggctagtataaaaaaagaacttaaatgagcacttgaccagtcacttgggtgtagggatggatgccgagccagctcggctcggctcggctcgacttgctctagctcgtttagataacgagctggctcggctcggctcattatctaaacgagcagaaaacgcagctcggctcggctcggtcagtagctcgagctagctcgtttcggctcgcgagctggagagggcaagatatcagacatcaagattagaagagctaggacaacggaacgtgagccgacgagcggcctgcagcggcgaggacgagcacgacggtcgacggcaaggcagacaggcagaccgcagcggcgagttcgagtgcgatgaccgacgacacaaaaatctgcggtgccaaggtgacagcacgcgacggccaagctggggcaacgccgcgacgaccgacggtgctgcagccctcagcgcagattggcagatggtcgcgacagggaggtggcgatggcgcaagcactagagaccgggaaggaaggggcagcgcggcgtggctgcgaggtgcatgctgggcgatgagcggcagactggcggcggataggcagagtgaaaaggagagatcgagactctcgagaggcaggtagggtttgtggtatagtattagtactttacatgctctgatgggcctcgtggtcttgtgtgggctttgtggcctcgtggccttgtgggcttgtggactgggattgctgttgcctgctgggttgtcaaatctcgttacggctcgcgagccagctcgagctggctcgttatctctaacgagctaaaaggctagctcggctcgttaggaaaatgaaacgagtcgagccgagcttgtagccaagtcgagcgagctaacgagctacgaattttcgtccacccctacttggggtgcatagcgcttcttggcatgtgccatcaataaatgtttccaatattaattactgttgttatacctgaattttgtaacaaacctagacaattcttgaagaaagcatgaataagttcaggtagtttttttttcttattggcatagatcatttaaataaacttgttgctaatgctatttcatataaatgtgctatcactgttttagatacatgtacataaaatgttgttttgaaataaagctcgcctacgtaattaatcttacctcttttgtgcaatctcaggatttgcaagtcaactggctcatcttcatattatttgaggtgttgtcggactgcctgcaatgccattcgtcaactcttttctcgtttccctacctccttggttatctaaccttaagaagtaatattcaaatttcatctcagttgtagatgtctatgagattggcattgctattgtaattcacattagattgttgtcaaatcgattaattgaacgtggatgtcaatgcattggaatccattcttcc

SEQ ID NO: 25439 - DNA, 1533 bp, Oryza sativa
  ref <308>: DATABASE ACCESSION NUMBER: AK100881
  ref <309>: DATABASE ENTRY DATE: 2002-08-28
gactactaccactgatcacacttgctactactaccacacatggcgaggagagcgcgggaagaggaagcggatcaggtggagaggaagctggtgctggggcggtacgagctcgggaggctgctggggcagggcacgttcgccaaggtgtactacggccgtgacctccggtccggtgagagcgtggcgatcaaggtgatcgacaaggcgcggctccgtcgcacggaagggatggtggagcagctgcggcgtgagatctccatcatgcggatggtgcgccaccccaacgtggtggggatccgcgaggtgctcgccagccgcgcccgcgtgttcgtcgtcatggagtacgcccgcggcggggagctgttcgccaaggtggcgcgcgggcggctcaccgaggagcacgcgaggaggtacttccagcagctcgtcgccgccgtcgggttctgccacggccgcggcgtcgcgcaccgggacctcaagcccgagaacctgctgctcgacgaggaggggcggctcaaggtcaccgacttcggcctcgccgcgctgcccgagcagctgcgacaggacggcctcctccacacgcagtgcggcaccccggcgtacgtcgcgcccgaggtgctccggaagcgcggctatgacggcgcccgcgccgacctctggtcctgcggcgtcgtgctctacgtgctcctctgcggcttcctcccgttccagcacgagaactacgccaagatgtaccagaagatcttcaaggcggagtaccaggtgccgccgtgggtgtccggcgacgcgcgccgcctcatcgtccgcctgctcgtcgtcgacccggccaagcgcatctccatcccggagatcatgcgcacgccatggttcaagaagggcttcgtgccgcccgtccccacctcccctgtctcccccaagaaatgggaagaagacgatgtcctcctcgacggcggcgactccggcgccatgtcgccccggacgtgcaacgcgttccagctcatatcctccatgtcctccgggttcgacctgtcggggatgttcgagagcgagcagaaggccgccacggtgttcacgtcgcgcgcgccggcggccaccgtcatccagaagctggaggccgtggggcgatcgctgggttacagcgccacgagagggaaagggtggaagctgaggttggaggcgacggcggacggagcaaacgggcggctcgcggtcaccgtcgaggcgctcgaggtggccgccgacgtcgcggtggtcgagttcgcgcacgacgccggcgacgagctcgagttcaacaagttctgcgccgtcgacgtgcggccggggctcgccgacattgtctgggcgtggcagggcgaccggccggcggcgcccgacgttgccgccgccaccgtcgagtgctcgccggcgtgatcagagccgtccgttcagcgcgacgtgaaatctgtaggatgtattagctttagcttctttgctcgcggttatgtacaggccaaatcgagagatgtgtaaatacaaaagttttgttacttgatc

SEQ ID NO: 25440 - DNA, 4775 bp, Oryza sativa
  ref <308>: DATABASE ACCESSION NUMBER: AK100882
  ref <309>: DATABASE ENTRY DATE: 2002-08-28
gattttggtgagctgttgtgagggggagggacctggccgtctaggtgagagggggaaacccccggcggtggatggatgccgtcgagctgcctcttccggccaaggtggatttcgggaagattttgactcccgctgcggtggaggggctcgagggagggggaggaggaggaggcggcggcggcgggggtggggatgttttgaggcgctgcgcagatgcggatcgacggcacggtgatgtgaagcagcacaatcagaatgtagatagcatttcatcctacagaattaaagggacttcttcagaagtccctatgcagaaatctcttgcccttggcatcaagtctgaaaacaatggtaagcgggattatattggaactgaaactggtcaagccttgcataagcaagatagcaaagtactgacgaaaaagaccataaagttggatgctccaccatgttcgaaaaggccaaagctagagccagtacaaatcactagagagactgaatcaaagagccatgatttcttgttgcagaaaaatgtgcctgaattgatgcaatgcacaccatccggtaagttatcatgttccattgaaattctctgtcaatagtttggagtggtattcccttctccttcacccaggcaattcaagtagcttcttaagttcatcttagtggggttggtcttcttaggagacattgagttatattctgactagcagatttgcaacaatgcttacaaatctctagcactgtcctatccaaatagcatattcatggggctcttatccattttcatcctttatagttcctttctaaatgttcatcatcctggccaatgtttccgttcccatattctaatgcgatagacaacttaccatgctctgaataaaccaaatcttatttatgttaatgcacgcactactgatctaaatccagtttagtatatgcatctggctagatctagtctactactaatattcttgttgctatagtattcaagtgattaaaatgtcctagaaaccatgttttgttatatgaccgacccttattggttctggtcaagtgcaaagcttttgatatattaattgtatgtacgcaccatgagggggattcgtgaatgttatgttatatatagctccatttgatggcccattttggatcacaacattctttttaccattttcctgacttggctttcataatccatgtttgatgtaattctacttttgtctgtgtggtcatttgtttagttactatagttccagtgcttctgttaacttctttgatattctgacaacaaatgcttttgctcttatcctaattgtacagaaaaatctcgtctgctgaagcagaagcgcatttatgatccaaagagaattgataagaagaattttaggtctggtgccaggtctaaatatgattgtttcacatcaagggccagtttaggaaattttgatccttgcttgggaaacaacacgcttggtatgtggtaactggttgtagctacactgtaattttgtttatttattcattctacctgttattattcctttattgtctatatttgctatgctgcactctctcacggcaaccagagtctattgattcattagagctcttatcaattaaaacctgtcaaacatcaattagttaaatatagaatcagatattcctgatctgagacagttattcttctaatatgtttacacacatatgaaatttcaaaaaatgattcgaagaaacatcaggacttcaacttgaatatttgcttatggtcttctcaggtgaaatggagttcattttcccttgaagcaattccccccttttttttgtttcatctacccttgaactttttctaaaaaacggtgcatattttccttcctgctgtgcttccttttatctgaagtcattgtttgtgctgtcaaacttctgacactcaatctttcacagaccattgtttctaattttgttctcgagtaaattgcacgcactacgcaagttcgtacaccggaacagacgttttacatgttcatatactagattacacccacctctcaagtttgtgtaccaccgaattctctttgttctctctctctccttactcttgatttccatttttattacgtatcaacttaccatgttgtcaactttgttttcttctatgtctgatattcattttggtgatctacgccccctttgtatttcttttgcatctctttagctgcacatactaatataataatacaccgcttccatatttaacaattttgtttaaagttgtagattgatggcctggctgtgacttttgcattataggacatctctcagtttcatctgattaagtaaccttaagaatgattgataatgtattttacaatgttaattccgcacgtatttttattttagtgtgcaatatttcacatcatcacatcacatggcatgtcagtgccatttgcgttgtaacaccacaacagtatctcttccaatttcgtctcaaatgaacaaccttcagagggagaaatatcataatgtaatggagaaaactgttcctcttagtacttttctgggtcatcaacaatatgaaatccatgtctgtttttgttgatccattttcttgcctggcacataacggtgtctgacctcttatttcagggactcatggtcttagatccgatatccgtgacatcacaaatcacattgagaacctctcattgagtgaacttctcaatggaacttacaaatattccagcttaggaagagaaaaaggaaagaaagttttgcgcacaaaagatgaacttctagtctctgtcagaaaagctttttccatgctatctggcagggacagttatagtaaggatcctaacttcctcctgagccctaaacttcctacagcaagcacgtccagctgtgatggcaaagaccaatgtactgacaaaccaatgaagggcccttcacaaatggaggtctgtgattccacaattcattgtccaaaagatatcctaaaccgtttaacacttccccaaggacaggatctagactctcttttatcacctggatgtgagagttctgctgcagttaagccttctttaccttccgtgacaactcatggagctagtttgccaccatttccttggtcgcactcacaagcgggagggtatcgaccaggtgctgactgtggtaaacatgggtcgagtaggagtaacacccaatggcagtgggtgagagttggaagcaatctcactgctctagatagtgaagatccgtctgtgcataaaattgatgatcttcttcaagaaatggatacggcaaaaacatctataatggattcgtatggcaaacaatctagtttatgctgcacggaatcaacttctggttcccttggacaaattattcaatcaagaaaaaagttgaatgggcataatccacagcaactattctccatggacaatgtagattcgtcagatagcttccagaagaatgataacgaatcttttcttctaagaacacctcaaggtatgcagttcatgaaggaaaaaagcttttaaccataccaatttccttttgataaactcaagcccttctgatcaatttcaattgtattaatctccatgagttcttgctatgagcttgtcaattgtattaagttcttgctatgagcttgctgttgacatgttatattggagaagcataaaagctttactggagtggtgcttctctgtcatacatcactctagcaaaacctaagaatgtgggatttttttattccttttttttttctttttgacactggagctagttgcatgtaggttttactatcaaccttaattactagtaattgcatgcttgatatacttagtttaattgttacaatttgatgataaattgctgatgtggagctttttatgagcagcatcaccaaaggtattgcaggctgctgagatcctatgtgacatgagaagcagcatggatgtttggagtccgcaggtattcagcaatgggacaatcaagtggccaaagtcaccttctgagaaggttatgaaggcccgcaagccttcatccccatttggtacagccgagagctcatctggatctcggaatagtgatgcagctcgtgccggaaataatcactccaccaagaaaatagttgataggaagaatgattctgtacgcatgaataaccctgggaaaggatctattaggtggcctgttcctattgaagatggcgcatctcctgtcaagtctgagagagggcttgtgcttgatatgaggcaaaaccatgtcaatgctgcaaggcatccgaatcaggtgtcatcgcaggcaaaggagtatgagaaccagcagaagctgaggaaagcaacattgacctcatctctaggatctgcaggagattggaatagggacaggaacaagagaatgtgaattgtacattattcccgttggaaaccatagtctgcgatatatattgtctgggggcagcctagccagacaactgttacataagaggtaacagaacattgggagatgcgataatttaggtggcgcatgatgtatttatcggggcatttgttggtacaattgttgtaacaattgtagttctttttatttgccatcttaccggaggtctctccctgtctcaccatcttcattgtgtattagtatgtctcgatctactttcagccaaagtaataatagcacgggtggttaattccattgagggaaatattcatgcaatatattgtctaattcaagtttatatgtttcatatgcattggctttcatgg

SEQ ID NO: 25441 - DNA, 4644 bp, Oryza sativa
  misc_feature (3899)..(3899): "n"=any one base of a, t, c, or g
  ref <308>: DATABASE ACCESSION NUMBER: AK100883
  ref <309>: DATABASE ENTRY DATE: 2002-08-28
gagtgagtggttggtgtttccttctctccccttctcctcttccccccccctctctctcttctctcttttttttatataatcaactaatttcttgctaatttttttcctttgctcctatctctcttatggctgtgtgggagtaggagagagaaagctgggatggatagatagagaggaagagagggaagccaacaaaatcggcagtagcctctcccccattttttttctcccctctctctctattcttcttctttctcctctccagcaaccgctctcctcagtcctctcctccccaccaaatcaagctgctcttcgccgcggaggtcgtcggattccgggccctctcaccgcgtggatctgccggcggggagggagatgggggctcttgcgccgcggcggcgcgggtcggggatcgaaaggtggtggatgagctgctgagctaggaagcaaaagctttcttgctttcacgaggcgtactcaaccatcttgttatgctggagggcaaggataagagcaggcccaattgcttcagagctcttgggttcttggtgcggactgtagcagcagcagaagcagtagatctggaggggtcagcgaaggcgttcatcagatgttatccagtgaggagccttcaggcccctcttgctcttctatccagggtgtgagcgctgttccggcgacgtcccccggcgagtcgccggcgagccaggatcccacagatctggtgcaaccgtgcgccaaattctctataagagattatgtttttgcttcaaggagcaaaggcatcaagagaagctggcctttccatccacggtcgctgcagctttgcctgaagcgtggtgtgaaggatctgctacctccatttgaaccacctgatttgattcgatcccggtctttgagtactaccataaacgttgagcaatctgctgcaagttcagaagccaatgctccggttggtctggtgaagactagagatgatggttcgtctattgtgaatgcaagcaatatcaacttccagtcatgccaaccagtagctgagtcacttggtccttcacagtacacctcaccagaggatgggaaatctgctgttgaccaaggggagaatacaaatggattggaccatactgatgaggttatgccagtagatctgcaagtcaatagttgcaccaaagcaattcggcaaactgaggttgctgtaccctcttggcgatcgaaaaatcttgactcatcacgagagccatcagaaaagaagtgtaaattggtagtcaaagtaggatccttgacgcggacagaagaggtggcatctaattctagcacggtttcagacccgatggcctcaaaaacctgtcctgtttgcaaagtgtttgcttctacttcaaacacaaccttgaatgcccatatggaccagtgcctttctgttgaatctaatactgagccagtggaaaaagttatcttgaaaccgaaagttaagccaaggaagaagcgactgatggtggacatttacaagactgcccgtctgttcactcttgaggatcttgatcagaggaatggcactaactgggctatcgaattggctacacccaccacgaacaaggaggtttgcactgagaaccgtagcccagaagtggtgccgtttgacccaagagacgacgaaagagaaggcgatgtctatgttgattctaatgggataaaaattcggattttgtccaagtctagtgatgcgtctttggtgttgagggatgaacataattcaaggaaagttgccaagaacgagactggaaaaagtatgttgatgagcaagacgtgcttgaaatccaaaatatgcaagaataagaggctcaagtttccagggaagaagcacagcaaaactaaccgattgaatacccaggttcgaacacatacagatggagatatgcatgagcacacctctgaggacgaagaggagtccactatgcatgtgcagaaacctactgaaagcacaagttatggtggctccgaaactataaggcaatgggtgggctccaaacgctcaggtctctctaagaattgtgcccgagaggttactgataaagcatccaagagtataacgcctggaaccaagaagttggctaggagcagcattcgtggttttgatgattctcaaatatcagatagtcctcctgaggcattttcttcgcaaccgccggaagagatgacgatcacttcagaagctaatgatgatgacgagaggaatggtacttcgagattgctcagatcgattcctagatggtctttaaaaactactccatccagcaatgtcataccaaaagtacctaggtctgctgctgctctagccaaaaggaaaataaaggagatcggaaggagagagtcctataggtctgataactatgatacagtgaggaattccacctcgatcagaaactctgtacgtcggggtccttcctcctctgttgctgggctgagtgatggctcaaatagggttgcatctaccaagaagttccggaagaaccgatctctgttgaggactggtaggcgtgaattctcaccttctaacagtgggctagttcatggttttggtcaagaccatggatctaatcccaatcatacaaacaagaggttcagggttagtaacaaggaaacctccaagaagcttaagcacactcaagaagatactgcagataatgacttctcttatgaaagtgatgtaccagcattaggacaaggggatgatccatacgatgcggctcaaacaagcaggaatttcacagatgtattatgaaggtgaagagcctgaaactgaaatgcaatgtgcatcaccctccagaagtgatcctgtagactgcagcaatgatatgagcagcgattctttgagtccggaaaataatgagacggcagatgatgttttggtggaaggctatagtgtagcaattgtggatccatgctctaatggagaaatctgcatatcatgctcatataccccacgaccttgcccataatgaggtggaagaattgccaattggtccgtcttcaactaaggaatctagtgcctgcttgaccaataatagggacatgggtcttggagctcctcaggataactcatcgattacatcaaacagagaagattctaaccttgatcacggtttggttttggatcgtgggctcatcccgctctcctgtttcaactgcctccacactttctccttcaaacttctttgagggactttagagctaacaggtcttagccaggtccatccactggttaatcttccaactgtttaggaaccggtttttggggcctcgaaatcaaagaaaccaagtcgacacctcttgccagagaaggttgacaagttgcctagaaagtcctgttgttgcaattgtcgggagagcatttccagggattctcaggtgcacgatcaaagtggcgatgggtagaccagtgccagcttttactgggaaggccggttccacagttgaacataggtttgcgtgcgtcttcatcgttcgccacatatccaaggaacaccacaaagccaaacccttcttagaattaccatatccgaccataagctggttaaggttttccagcttaagcctaacccattaaccccaccccattcttaataccgaccaagtttttattaagccccatccaaatccaaaccccgcttccctccccctccaaacccttttttagggttattggccaggaacttgttgttattgaccattaagggggttgaccatcccccagccacccgttccgaatacatcattagaggggaatacctggcccctggttgttttaatcctccaaaatacccacatattggtgatcctgcatttatgaacacaaaacggtcaacagccaatcatcaaattcctctgtcaagtgtacaagntggcaactttcttggtcctacgttggatactggttccatggtggaatctgattattattctccacaaaagccatacaggaacctccttccagtcatgcatcatccatcctacatgatgaaagaagtaatcatgatggatgactctcctgagcacagaagcgatccacaaatcagtatgcttcttccttctgcaccttctccagctacaatctcggtcccgaacactgtggcatcaagggcattttactgccttccatcccaaaaccagcttttaccaagggagagtgctgttggacccctgcctgtattcacaaacattaacccaattgttggtgttagctcatcaagtcaaggaaacaacgcagaagtagcacatccttacatgtcaaatccattctatgtgcaatctccggctggttacataaacccatcggtctactattcgcagaatttacggtgatgattcctcagtaactcaaatgaagaagagaactgcaattggtcatcaatgccaacgtgggaataatgagagctttgtgatgagtctaaaattctgagagtagtgaaccttcataagatgcctgactttttcatgaggttttttcacataggttgcctctttagtttttcgtttcaggtaaacttgtttgccttcaaagtacttcaattacatcctgcaaagttccagtaagttatagtatggcattgtccaatagtgctcaaggatatacctcactatttatcg

SEQ ID NO: 25442 - DNA, 2052 bp, Oryza sativa
  ref <308>: DATABASE ACCESSION NUMBER: AK100884
  ref <309>: DATABASE ENTRY DATE: 2002-08-28
gacccgtagtaggggccgtggccggatcgcaatgtcggcgtcggggggattgagcttggtgcgccgcgccgtcgaggccgcgcgccgcacgccgcggtggcagaagaggctcctcgtcctcaccgccggtgttggttctttgacttatgcttgccaggataatcaagtacttcaaataaatgatggaactggcaagaagagggtggttatcgttggaactggttgggcaggcgcaagtttcttgagaaatattgacacttccttgtacgatgttcatgtcgtatcacctcgcaactattttaccttcacacctttgttgcctagtgtgacatgtggcacagttgaagcacgtagtattgtagagcctatccgtaatattgtgagaaagagaggcggcgcatttagattttgggaagcagagtgctacaagattgatccaactaacaaaaagatccactgcagatcagactcagatggaaatagtgaatttgttgtagattatgattacctggtcgtcagtgttggagctagacctaatacattcaatacccctggtgttgttgaaaactgccattttctaaaggaagtagaagatgctcaaaaaattaggaagagtgtcctgaaatgtttcgaaagagcgtcccttccaaacctaactgaggaagagaggaagaagaatcttcattttgttgttattggtggtggcccaacaggtgtagaatttgctgcagagcttcatgactttgtcaatgaggacttggcaaagttgtatcctgatgtgaagaagtatgcgaatatttcagtaattgaagctggagatcatatccttacaatgtttgacaagagaattacccaatttgctgaagataaattcaagaggacaggcatagatttgaagacgaattttaaggttgtgaaggtgtctgataaggctatcactatgactaattctgcaactggagagattgctgtgccttatggcatggctgtttggtccactggtattggaacccgtcccctcataatggatttcatgaagcaagttggtcaggcaaaccgacgagtgctagctactgatgaatggctcagggttcatggatgtgatgatgtatatgctctcggtgattgcgcgacaataactcaaagaaaagttatggaagatattgcttcaattttccgggtagcagacaaggacaattctggctctttgactgtcaagaaaattaaaaatgttcttggcgacatctatgaaaggtacccacaggttgagttgtaccttaaaactaaccaaatgaaggacttccatgacctactcaaagattcagacgggaatgctattaaggagtcaaaagagctgaacatagaggaattcaagaaagcccttgctcgagtggactcgcaagttaagatgctcccagcaacagctcaggttgcttcacaagagggagcctatctggcaaactgcttcaacaagatgaaatactgtgaagagaaccctgaaggtccgttgaggatcagaggcacagggcgtcatcggttcaaacctttcaggtacaggcaccttggccagtttgctccactgggtggagagcaaacagccgctcaattgccgggtgattggatacatgttggtcacagcacccaatggctatggtattctgtctatgccagtaagcaattcagctggcgcaccaggatgctggtagtatctgattggggcaggcggttcatctatggaagggactcaagcagcctataaattgaactaggatggtgttgttcaccgccctgcattttgccaactgaagctctattagacttggataatacaatttttgcataccttcggaaacaactatttttgcatacagcatcattttttttagagagagagagcatcgttatatttgttcggctattttcacaagctcaggtttctgtagcgtagcaaggttttgtcaccaatttttgatcttgccgatatttctatgacacaatggaggttaaatgatttatacatcagtactttataatacagttcagtatcctagc

SEQ ID NO: 25443 - DNA, 2478 bp, Oryza sativa
  ref <308>: DATABASE ACCESSION NUMBER: AK100885
  ref <309>: DATABASE ENTRY DATE: 2002-08-28
gacagaaaacagcgaatcacgcgacgcgaaaggacggagagagaggactgagggagagctggagagcgagagattccggcgtctccgcctcgccgtcccccgtctccccgccgccgccgccgccgcagtagcagccgaggccggtcatgctagccgacctcaacgtcgacccgccggagagcgacggcgaggaccaaccaccaactcccaaccccaacgtaaaccccgccaccgccgccgtcaccgcggcgacggtggtcgccatcgattcctccactaggagtagcaatgatgagggtagtttggcaaaaagcgtgatcacaacgaaggaacctgatactgttgaatgcgaagatgctgatcaacattgtcaaggggcttctgttgcacgcgaagagaaagttagcaacctgaaagctgctttggtacatgtggcacggaagatgcctaaaaatgcccatgcacattttatgttgggtttgatgtaccaaaggcttggtcagccacagaaggcaatagcggcatatgagaagtcatctgagatattgttacaagatgaagaagaagttcgaaggcctgatttgctctcatcagtgaggatacaccatgctcagtgcattttgcaaacaagtatgggtgacacttttgatgaagagcttgaatctggtgaactagatgaaatccttgttaaaatgaagagttcagttgaatctgaccccagacaggcagctgtttggaatatccttggtttggttcttcttcgtagtggtcagcttcagagtgctatctcagttttatcttctctgacggttgttgctccagattacttggactctcttgcgaatcttggtgttgcctacattcaaagtgggaatctagaactggccacaaaatgctttcaagaacttgttataaaagatcaaaaccacccagctgctctggtgaactatgcagctctccttctctgtaaatatggatcttttgctgcagggtcaggtggtaatgttagtgcaggctcttgtctgcatcagaaagaaggcttagctgttgcaaaagagtgcttacttgcagcagtgaaggctgatcctaaagctgcatcagtatgggttaatcttgcaaatgcatattacatggctggtgaacacagaaattcaaagagatgcttggaacaggcagcaaagcatgaacccagtcatatgcccgctcggtatgctattgcagttcaccgaatcagagatgctgtcagatcacagtgttctgatgatcaacttctttgggcttcaaatgaaatggcaacagttctaaaagaaggagacccttcagcagttgatgccccaattgcatgggcagggttggcaatggctcatagggcacagcatgaaatcgctgctgcttatgatactgaacaaattaatctgagtgatgtagaagagcgagctctttatacactaaaacaggctatccaagaggacccagatgatgctgttcaatggcatcaacttggtttgtacaatatttgcaccactcagtttagccgatcggtaaatttccttaaagctgctgtagctcgttcgccagattgcagctatgtgtggtcaaatcttggtattgcattgcaactatcagacgattcatcctgtgagactgtatataaacgagcactcatcctgtcttcaagccagcagtcgtatgcaatcctctccaatcttggaattctttaccgacagcatgggaggtatgaacttgcaagaaggatgctactgcggtcgttggaactatgtcctggacatgccccagccaacaacaacctggggcttgtatctattgcagagggccgttatgaggaagctattagctgttttgagaagtctctgcaatctgatccgctgcttgatgctgccaaatcaaacttggcaaaagttctcgcattgtccaagaaacagtagatgaacaaaagacaaaagatgccctttgactagagctttaaacatgaacagcattcataatgtagaacgtcgcaatggagctaactcagaagctgatagtacttggtggctatggacttctcacaggttcacaggtcacagcataaggaactgcagcttcatatggttcccttggaatttgactaaattattgccctttgtgcagaggaccataaggccctggagttggtccgccagttgtacaagctatgagctatccatagtgccccttcactctagtgaaggctcacgttttgaagtataaaatttcattgtaacaagcatgtactaggatttcctactactgcagtacataacacctcagaagttttaggcttttagctgtaatagctgtaccagtccaagctttagctgtaaacaattacaacattagtcttgtggcaaacgatgctagatgctggctttgccattgaattcgaatccatgtaacctctgttggtttgatccgaaaacattcattaattaatgttgc

SEQ ID NO: 25444 - DNA, 1958 bp, Oryza sativa
  ref <308>: DATABASE ACCESSION NUMBER: AK100886
  ref <309>: DATABASE ENTRY DATE: 2002-08-28
ggtcgaacacatcctaatcacccattccgcaccaccgtcactgtcatcccatcctccttcctctcctcaccttcctattatcctttccggatcgagctttgccttccttctcctacgcgcctcgccatcgccgcacggcgcaaaaaggcaagcaaaggcgaacgcgccgcccgtgcgcctcccctcccatccacacgtttcgctctcctcctcttccgatccgtagcggcggcagcggcagcggcagcagcagcagccgccgacacgcggggggcggagcagagctcgcggaaccctacctcttgaggcttcttatctgcttcagccgagagggggggcgaggcggcgatggcggcggccgtgcgggacggagcggcggtggcggggtacatggcggaggatgaccctgacggggcggcttcggaagacggcgatatggacgtggaggtgggcggcgaggagtcgcaggcgcgcgacggcgacaggagggacggcggcgacggcgacgacgagtacgcgctgctcactaggataactgatacatcagcagctgaagcaagagcaggaaaggatatacaaggtataccatgggagaggttacaaataaccaggagcgattacagaaaagctaggttggtacagtacaaaaactacgaaaacttccctcaatcaggagagctcatggataagatatgcaagcaagtggataagatcagcaagtattatgaatttcactacaacactagattagtgaagccatcaatcctccactttcagcttaggaatttgttatgggcaacgtcgaagcatgatgtctacttcatgtcaaattccacagtaggccactggtcatcattgtctcacaatctatcagaggttcttgatttctccgggcatgttgctcctgcgcagaaacaccctggcagtttactggaagggtttagcggggttcaagttagcacactttcagtgaatgagggtttattggttgctggtggttttcagggagaactaatttgcaaggttgtgggagaccgtgatgttaagttctgcacaaggacaactttaagcgacaatgctatcacaaatgcgatagatatacacagatctgcaagtggaagcttgcgtgttaccgtgtccaacaatgattgtggtgttcgtgaatttgacatggaaacatttcagctcttgaaccacttcagttataactggccagtaaatcacacatctgtgagccctgataggaaacttctggcagtagttggagatgatcgggatgctcttcttgttgattcaagaaatggaaaggtaacctctaccctagttggccatctggactattcgtttgcttcggcatggcaccctgatggccgcaccttcgcaaccggtaaccaagacaagacctgccgcgtctgggacgtacgaaacctgtcaacctccctctcagtacttaggggcaacattggcgctatccgttgcatccgctactcctcggatggccagttcatgctcttctcggagcccgctgacttcgtgcacgtctacagcgccgctgcggactacaagaagaggcaggagatagatttcttcggcgagatctccggcatctcgcttagcccagacgacgagtcactgttcgtcggagtgtgcgaccgtgtgtacgccagcttgctgcactacagaatggtccactcctttggatacctcgactcgttcatgtagagagggaataaaagtggtgtttctgtatgtgataggccacccatctcggtggcgattctgatgtgcgtgttcagggaatgtatctgcctgttcaagtgcatgtttagtcaaaggctcaagcgtgcagcgtgatccttgccttgtgaatagttagctagtaaatcatagactgtatggaccaatactctctctgggcaataatgcagaagtaatctatatcttcggttgttggttct

SEQ ID NO: 25445 - DNA, 2838 bp, Oryza sativa
  ref <308>: DATABASE ACCESSION NUMBER: AK100887
  ref <309>: DATABASE ENTRY DATE: 2002-08-28
gcccggaggggagagaaaatccatggaatccgcctatttaaccatgagaagggagaagcgaagataggagagagaagaacaccaccaccaatccaccatcacgaggaggaggagaagagaagacgcgcaagcgaaatccaggggaggagggcgagcgagagagagagagattctcgcggcaggaaatggcccattccgcttgctgctggactctgatctgatctattggaatggttcatcccaggttccttgttgcttgttcaggctccaaattgtgcttcatctccaattgttgcagtaactattggaacatgattggtggtgggatggtgaaatcattagtgctgatggggttcgattcagaagccacattgtagttttagccttcttgtgtcatcatagtttagctgattattactggaacaattgctagagactttgttgctgaaaataagaggctgaaatggatcatggtaaaatctgaataggaacaaagtgtgggcaagaggaaaattggtttccttttgctggagtaactctagtgagatgggtttgcctcaggttcctgcaatcaaggaggaagtgcttcctacaatgagtgcatctcttattgttcgtcctcattttgcggggaatagcacctgtcatttgggtaagcttcctgcagaaagctcaagtaacagggcatctccatgctcatacatcagtgatttcaagagaaatgatgttttagattctttggatggatttgatggcaattttagagccagccatgctgcttatgggcctgcaggcttccaaggtctaaaacctgatacaggggatgtaggttccagatcaggccctaaattgggatcaaatgttcagatgcctgcaatgaggattgttggctttgaatcaggttttgctaattccactggaggtcctgatacgatggtagctgacaatacggattcacctttagttattgataattgccattcattgattgaacagcatgggcctcatgcgaggaaaagggtgttgtcgcctttgaacaatgcgctccctggacatttccgaggtgatgccctgaatattggttctggtgatgccaaaattcagcattctgattgtgctaggagactttatacttctggctttcaagatcgtaaaaaggcaaatactgcaattcttgattcttttgaggcacctacatggccagcttcgagatactccaactggagtacagagcagggtgtcgataaatttagtggtagtacattcactgatggtcctttgcttgagagcagggagtcatttccttgttcagatcacctggaagctcttgaaagtgttgctgttccacttgcaaaattggcacatcctcctctgcttaatctgtctcctcttggcccaacatggatgcatggaacaaatactgtaggatctcatggagaatcattgagagaaactgaaggttcaacctgtgaagggtattcagaaggtcatggtaggtcaaggataagagatgcgtttgaaaaaactaatatcttacatgatgactttgatatgaggatccctaagaagagttcagatagaaaatctcaaaactggggcccggaatctgcctctgtatccccacgcattggatgtattcggagtattggtctccttcctgtacgaaggtcgttaattggctcttttgaggaatctcttttatctggtcgctattcctgtggaaaagacaatcagaatattgacggtttccttgctgtcctgaatgtgactggtggtaacttctctcccccaactcagaagcttccattttcagctaccagcattgatgagaacagctccttactctactattcatcgatcgatcttgtggggaggctgcctatgagcagtagcaaaagcccaaagctcaaaagaagcctgagtaatcatgattcacgatcagcgaagagtcggttacgtatcccagttaaagggcgtgtgcagctggttgtcagtaacccagagaagacaccgctacataccttcttctgcaactatgatttgagtgacatgcctgctggaaccaagactttcatgcggcaaaaggtcactctgttccctgtttctccctctaatcaaaagaaagaaggaagcaaggccaatgaaacgaaggtcgagtcagtccagtttgggagtgaacttagagaatgcggcactctattttctgaatgctgtagactagggcagaactgcaacttgatcgatgactcggaaaagggcggccgcaagaacatgacatgttgctctatggagtgtgacattagagaatcaaatgactctagctctctagaaacttcagaaaatggcagtagtaccaatgtttgctgttgtcaatcagacacatttcccttaggtgaaaagaaatactgctgtagatcgtccaagatcaatgatccagctggaggtgctcttcgttatgctttgcacctacgatttctgagcccatttgccaagaaaccgtcaagatctatgcagcgtagcaaatctggtgtatcatcagaaccatacaaccatagttcagggcctgaggaacacagacgattctatctctacaatgatgttagagttgtctttcctcaaagacactcagatgcggatgaaggcgagctgcgggtcgagcacgacttccctgctgatcccaagtacttcgacataagcaactgatatttactcgcgcacttcacatgaaatctgtatatatcataccctcattaacccgtccatcaatcccttgtgttcataaacattcacccatttgtataggactaaaatcttccaatgaaatacctcatttcgttc

SEQ ID NO: 25446 - DNA, 2465 bp, Oryza sativa
  ref <308>: DATABASE ACCESSION NUMBER: AK100888
  ref <309>: DATABASE ENTRY DATE: 2002-08-28
ttggggttaatcgtgtggattgaattctccgaacgtaactctcgcatgcgctacaaatcctccgcgattaatcgcattaactcgggttaatcgtgcggattgaattctccgaaagtaactctcgcatgctctacaaatcctccgctaacggggttaattgcgcggattgaattctccaaacgtaactctcgcatgcgctacaaatcctccgcgattaatcgcattaactcgggttaatcgtgcggattgaattctccgaatttaactctcgcatgcgctacaaatcctttgctaacgggatgaacagacacaacgctcgcacttatgttcttcctctctcgcactttctttccggctgttctcctatttcggaactccgtctgcttacgtacttgcacgggtaggcaggcaatcaagtctttggggagcgtctcggtgcaactgctcatgttctgcttcgacttcttcctctacatcgcgatggcttccactggaaatggcgcaccaggagctggagggaacggcgatgctccaggagacaacactaacggaggcaatacaaatgactcaacctccttgcaccgttttctggcctgagggatcgacatctcagcgagcgagattggtgaattgaaaagtggggacgaagctgatcatggacgtcggcggcaggtagaggcgccgctgctggagaagaagggcagcaccggcatcggcgatgggtactgcactgagaggtggcccgggtgcggcgtcgatcggcgtaaggccgcgaggctccggcatcccctacaggagcttcctctttgtctggatcatcacgctctgcacagctttaccaatatcatcattgttccccttcttgtacttcatgataagagacttgcatgttgcaaaaaggacagaagatattgggttctatgccggctttgtgggtgcttcgtttatgttcggtcgatgtttgacttcaactgtttggggaatagcagcagatcgtattgggaggaaaccagttgttgtgtttggcatttttgcggtggtcatatttaatacgctatttgggcttagtttcacctattggatggcaatagctacaagattccttcttggtgctttaaatggtttacttgggccaataaaggcctatgcaattgaagtttgccgacctgaacatgaagctcttgcattgtcacttgttagcacagcatggggaataggtcttatcattggtccagctattggaggctacctttcacagcctgcagagaaatttcccaatgtcttttcccctgactcactgtttgcaaggttcccatatttcttaccctgcttgtgcatatcagtctttgctgctgttgttctcataggctgcatatggatgccagagacattacacaagcataaagctgatgcaagtagatcccaaactgttgaagctttggagagccatttgattgatccaaaagaaaaggctgaccaaaatggtagtttggactgcaagaagagcttattgagaaattggcccttgatgtcctccataattctctattgtgtcttctcctttcatgatatggcttatacagagatattctctctatgggcagaaagtgacaggaagtacggtgggctgagtttgtcatctgaagatgtgggtcaagtgcttgcaatcacaggtgtcagtcttcttgtgtatcaactcttcatttatcctcgtatcaataaggttatagggcatattaaggcttctcgaattgcagctattctgtgcatacctattctctttgcatatccttatatgacatacctatcgggacctggattaacgatcatactgaacattgcgtcagttataaaaaataatcttggtgttaccatcattacaggctgtttcatcctacaaaataatgctgtgcctcaagaccaacgaggggctgctaatggcttggcaatgacaggaatgtccttttttaaggcagtggctccagcaggggcgggcattgtgttctcgtgggcacaaaaacgccagcatgcttccttccttccaggtgatcagatggtgttctttcttttgaatctcttcgagttgcttggacttatcctcactttcaaaccctttctggccgtaccagagcagcacgatacaaattagactgttcaggagcaatagataggagcgagagtactactctgtcccaaagaatcaaagctagggtttgattatttttgggacggaggggtaggtgccagatatgcaattgcagcatttcagcgaaaggaatatatatagttggggtaaatggtggccactgatggctaggtttttcatggccagccagcatgtataccgagtagcattctaccagtataatgaatatagtactatgtacattgtaactagtaaaactctgtaagtgacatcagcttgagaatgaaattattgctggaatcgagatcagtacattgct

SEQ ID NO: 25447 - DNA, 3455 bp, Oryza sativa
  ref <308>: DATABASE ACCESSION NUMBER: AK100889
  ref <309>: DATABASE ENTRY DATE: 2002-08-28
ggagagagagagagcacccatccatctccccggaggcgaaaccctaacccacccaacccatcgccgccggcgaaaaccctaatccatccgccgccgaaccgaaatggggagacctcgaggccgcggcggaggaggaggaggagggagggggaggttcggcggcggcggggggtcccgcttctccgccgcccgcgatgacccgccgccgcggcgctcctcctccgggtggggggtggcaccgccgtcgcggcacctgtgggtgggcagcctctccccgggcgtcgccgcggccgacctctcggagctcttcctccggtgcggcgacgtcgagggcatctcccgtgaccccggccggagcttcgcgttcgtgacgttcgcgcgggaggaggacgccgtggcggcggtgcgggagctgcaggggatccacctccgcggggcgcccattaggatcgagttttccaagggggataaagattcaagtagctctatggatgacagatactcacaacatgctgatcaaagacgttttactgaacgaggaaggaatcagcaatcaagtcctgaaaaatcaactgataaatccaaaagaagcaggccagcagaacctagtgaagtattatggataggttttcctgttggtctgaaggtagatgaggcaactctctgggaagccttttcaccttttggtgaggttgtcaagataactacattcccagggcgtacttatgcatttgtccagtacactactattgcagcggcatgcagggcgaaggaaacactgcagggaaatattttcaataaccctcgagttagcatttgcttttctcggagtgacagtgtttcagcagaatttggaaaaggttccttagatgccccatattccccccatttaaactctagtgttagacctatattcagggagcaagattttgaagattttcctagggctaggccttttgatagtcctccaagagatatgtacatgccatctccacattatggccctaagagactttctagagatcatgatgatgtgggtttcagcagggataattatttgcgatatggacctggagtagagcctgatcctagatctaattttgaaccttttaggatacaagggctcggtccagaaagaaggatgtctgaggacccatatgaacagcataggcgtagccctgctggtgatgcaccatggcacaacattccattcgagcgatctcagggagccttaccattagaggattctcggtatgctagggaagatccatacccattttcaaagaagttgaggactggtgaagcacatgactctgaacttcctgaataccctttctctgaatttgatcgagggaaggttggctctgcctacccaaggaggcccttctatggtgtgccagatgatgacatacaccccagaggctatcaacttgctcctatgcatggtagaaatcatgttgatcctttaaggaatccaactccacttgtagataggcatataccagggcatgcacaggacagcttttctaggcatgtagaagtggaaagatcaactcctgaataccatgaaccccttctcaaggaagaatggaaatgggatggtacaatagcaaagggaggcacaccaatttgccgagcgcgatgcttccctgttgggaaggttcttaacttcatgctgcccgaatttttggattgcactgctaggacaagcctggagatgctctctaagcactattaccaagctgccagcagctgggtggtgttttttgttccagaaaatgatgctgacatggcagcctataatgaattcatgaattaccttggtgataagcagcgtgcagcagtttgtaaacttggagaaaggagcagcttatttcttgttccaccctcagacttctctgaacaagtactgagggttccaggtaaagtcagcatatctggagtcattctgaagtttgagcagtcagatccagaagtttcctcgccaactcgcaaaccagaaacatttgtgagtcatttgaaccatgatgttcgtgctcatgaggatctagatgcattgagaagaatcaacccaccagatatcaggccacttcctcagggttcagattatctcgggttgtcgcctggaagctataatccagcaagtgcacatttggttccgccttacaagtttggaaatgctccttcatatctagaatctgaattagctcatcaaaagcatccacctgactcccacagggagatagcacatgacaagcagcagcaacacccagatgtattgccctcaagatggtcagataacatttacaatccaagtccaggttctggaaatttgaattatttggctgagagtgcgatcccacatacatcaactgataggacaccagaggcatactcatttgctcctcaaggagtaccaaaagtgagtacatcagggtatgcaccagttgcagatgaggcatcaaacatgtcctaccctcccatgcaacctgcatcacagcaggtagttagacctcaacaacctccatctctcccattatcgcttccaccagagcaacttgcacaattggccactcttcttgcacaacaaaaccaaccaggaaaagagcctgtggacagcttaaacaaagaatcaggattcatacggaatccacatggacattcttcaatgatgccacacagctcaggttctatccctgtccaaaactcattgccacctgctccgccatctgcatcacagttacaggttcatgcgccaccagttcaaggttcagtgccaccaaatccatccattatgcatacaccgaatgctcctatgccttctcacaacactttgcctttaccccctatgcatccttcgggaaatccagctcattcttccatgcctttgagatcgttcgtccctcctcttcctgaaggccctccaccccttaggcagcacacatcaagtgctctacaagcgcaacctgcacttccctctggaccacagactagccagcaaccgtctgctcaggaagaccatcacggagaccctcaaaagcgccttcaagcaacattgcaattggcagcaaccctacttcagcagatacagcaacaatctaaacctggtggccagaagtagatgcgaggttaaggaaatttgcagcctgcaaggatcatatggtgatattttctccttattactgaagagcctgagagtctgaaactgctggtgggcacccatacctataccggatgttttgttaacataggttctgctatgaattagcattgcagtttaattttgaaagcttactcctaggtggcaaccacctccgttgtcttgtctgtataagattgcaccgttcatcttttctctctgtttttgtgttaatcaatgcatagacccatgaataccacttccctttttgcattcatacatcatgcattcgtctcatcgatgtgtcgtctctccg

SEQ ID NO: 25448 - DNA, 1469 bp, Oryza sativa
  ref <308>: DATABASE ACCESSION NUMBER: AK100890
  ref <309>: DATABASE ENTRY DATE: 2002-08-28
gattgcatccagaaatgaaagtaaaaaaaaatattaggaacagttaaaaatcaggcagccaaagaacacagtaacagcatatactatctgctccccaattgattgattgcacctagatccaatatcatccaaataaacaaaagagcacaaggtcaaatctttagccaccaagatcccatcagccacaaatcgatccatctccaagctcaaaatcccaattctttccaagaaagatttttctcggaggccatgtcgaccgccggcggcggcggcggcggccggcgggtcaccatcaggtccatctcctgcaggggcgtcaaggcgttcgtccccttccagaagccgccgctctacgccgccgtgtcgctcgccggccgccgggagaagacgagcggcgaccccgacggcggggagaacccggactgggacgccgccgtcttcgccttcgacctccccgccgccgcggatggtatgctgcagttcgaggtgaaggcgcaggtgccgctgctcgggagcaagctcgtcggcaaggtgtccgtgccgctggcagacctcgccgtcgccggcggcgacggcgcggcggcggcgccgaggcacgtgagctaccaggtgtgcgcccccgacggcaaggcgaacggcaagctcagcttcaccttcgccgtcaccggcggcggcgcgtaccagcagccgcaggtggatcatccaactccaatctcctcctcttgctgcgcgccaccgccgacgtcgacgacgacgacgacgtcgggtgcgccgtatccgcctccggcgatggcaagctacccgccgctgccatcgctgtccgcgacaccgtcagcttcactgtacccaccgccgccgccgagcagctaccctcctcctccaccgccgccgccgccgccgcctcacgtgacgcaaagcttcgcaccaaacagcagctaccggccgccgcctcctccgtcgcagtacatcgccggctacccgccgccaccaccgagcaacttctacccgccaccgccggcaggctacccggcgcccagtttcccctctccgacgagcacctacccgccaccgccgccgccggagtcagcctcatcgcagtatccaccaccactgccaagatcggcgccatgctgcgatcgctcggtggaccgtgcgctgccgtcgtacatgtcgccgcgtccgccgccgcccggcgcgccgtgctaccccccgccggcggcgtggttgccggatcaagaagcggcgggagcgccgtacagcttgtacccccaacccgggactcgctacttgtagatgatgaattctgctaaattgatttgagctttgcgtatatcacaaattcacaagttgaattgaattctgcttttcatcaaaagaaaaggaaagagttggattcgatctgtaaattaactgtgaatgctttaatcgccaggacgggaacaatgaattgatcttgtggatttgtgagc

SEQ ID NO: 25449 - DNA, 3792 bp, Oryza sativa
  ref <308>: DATABASE ACCESSION NUMBER: AK100891
  ref <309>: DATABASE ENTRY DATE: 2002-08-28
ggttcgtctccttggcatctgatcctattcccctctccgcgcacgtcgggtttcccccccgtggacaacgcaaccgaccgaccaagctgcggacagcgccgtctctgctgtctctctctgtatgcttcccttcctcctcaagctgggcctcggtggtcggtggttaggtgaaggtaaaccaccggctttctcacgcgcctttctttctgttcatttccttggggtttaattcttggttgccagcgagcccggtaggcagtagtccacccaccggcaggttcttgctcctcctcctcagccgctgccggatttgagatgagatgagatgaggaggcgctgggggtgcctctcctccctgtgccgccctcgccggggtggacgcgcggcggcggccccgctcccgcagccagatccaccgcgtctcgagtccaaggaagtagaggagcacggcgcttccgataaagttgtcatggagaacattctgtcaaacaatgatttttcggaaggtctacatttgtggcatcctaatggttgccatggatttgtggctgttgaaggatcaggttatcatcatggaataaggcctcactcagggtcaaattatgccgtacttactcgtcgcacacataattggcaagggcttgagcaggacataacagaaaaggtcactgttggtactgagtacattgttgctgcccatgtcagagtccatggtgaactcaatgagcctgttggaattcaggccactctaaaacttgagggcgatggttcttctacgaactatcaatcagttgcaaggatctcagcatcaaaagactgttgggagaagttggaaggttcatttgaactaaaaactctaccaagacgtttggtattctacattgaaggcccccctcctggtgtagacttgctcatagattcagtcaccatctcctacaagaaaacagagcgggctgcatccaaactggttagtggaacagaaaacatcatttcaaattatgatttttcggaaggccttcatttgtggaaccctatctgctgtcatgcatatgtggcatctcaatggtctggtttccttgatggtattagagggagctcaggagaaaattatgctgtagtttcgaagagaactgaaagctggcaaggtcttgaacaagatattacagataaagtatctgctggtactgcttatgcagtatcagcctatgttagagttgatgggaatatccatacgaaagttgaagttaaagcaaccttgaggttgcataacacagatgattcaacgcactacagtccagttggaagcctgttagcttcaaaagaaaagtgggagaagatggaaggatccttttgcttgacaaatatgccaaaacgtgtagtattctacctggaaggacctcctgctggcgtggaccttatcattgattccgtaaatgtaacttgctctggatatcagcagttaaaagaagtaaaagtaccaagtggagttgataccatcgttaagaatcctcactttgacgaagggttaaacaattggtctggaagaggatgcaatatctgtaggcatgagcttactgcttatggaaatgtcaagcctctaaatggcagctattttgcttcagccactggacgggtccacaattggaacggtatccagcaagatatcactggcagggtacagagaaaagttctttatgagataagttctgctgtccgcatatttgggagtgccaatgatacagaagtctgcgttactctgtgggtacaagaatatggccgtgagcgatatgtaagccttgcaaagaacccggcatctgataagcaatggacacatctaaaaggaaagttcctcctccatgccccgttttcaaaagctgttattttcgtagaggggccacctgcaggcattgatattcttgttgatggccttgtcctatctccagcaagaaaactccatgctgcaccccgcccaagaattgagaatgtttcatatggagctaatgtaatacataacagtgctttcagtcatgggctttctgggtggagtcccatggggtcatgtcgattgagtatccatactgaatcaccccatatgctttctgccatcttgaaggacccctcagctaagcaacatataagaggttcttatattcttgccacaaaccgcactgatgtgtggatgggcccttcccagttgataactgacaagcttaggctgcacaccacttacagagtttctgcttgggtacgtgctgggtctggaggacatggacgttaccatgtaaatgtttgtcttgctgtagatcatcagtgggttaatggtgggcaagtagaagctgatggcgatcaatggtatgaactcaaaggagcattcaagcttgaaaagaagccatccaaagttactgcatatgttcagggaccgcctccaggtgttgatctcagagttatggggttccaaatttatgctgttgatagaaaagcacgttttgaatatctgaaggagaaaactgacaaggtaaggaagcgtgatgtcatcctgaagttccagggatcagatgctgcaaacctttttggttcatctatcaagatacaacagaccgagaacagttttccatttggatcatgcatagggagaagtaacattgagaatgaggatcttgctgatttcttcatgaagaactttaattgggctgtatttgaaaatgaactgaagtggtactggacagaggctgaacaagggagactaaattataaagattctgatgagttgcttgaattttgccggaaacataacattcaagttcgtggtcactgcttattctgggaagtagaagattcagtccagccatggattcgatcattacatggtcaccacctgatggctgctatacagaatcgtttgcaaagtctgttgtcaaggtacaaaggtcagtttaaacatcatgatgtaaacaacgagatgcttcatgggtctttctaccaagatagactgggaaatgatattagagctcacatgtttagggaagcacataaacttgacccttcagcagtactctttgtgaacgactacaatgttgaagatcgatgcgactcaaaatctacaccagaaaaattaattgaacagattgttgatctccaagaaaggggtgctccagttggtgggattggcttgcaaggtcatatcacgcatccagtgggtgacatcatctgcgattccctggacaagctctccatactgggtctccctatctggatcaccgaattggatgtcacggctgagaatgaacacatccgagccgatgatctggaggtgtaccttcgcgaagcctttgcgcatccttccgtggaggggattatcctttggggattctgggagctgttcatgttccgagaacacgctcacctggttgatgttgatggaacgatcaatgaggctggcaaaaggtacattgcactgaagcaagagtggctaaccagcattactggcaacgtggatcaccatggagagttgaagttcagaggctaccatgggtcatacacggtagaagtagcaacgccttcaggaaaggtaaccagatcgtttgttgttgacaaggataacgctgttcaggtggttaccctgaacatttagcttgtgagatatgttcttatggagagtgaggtatatatatactgcgacatgtctttttggatgattagagtttactgttttctgtcaacaatttaccatgtatacgaactgctgaaattgctgtcatgccacttattaatgccatactcacatttaccttt

SEQ ID NO: 25450 - DNA, 1328 bp, Oryza sativa
  ref <308>: DATABASE ACCESSION NUMBER: AK100892
  ref <309>: DATABASE ENTRY DATE: 2002-08-28
ggctgagcgggtggagctagctcgatctcgccgcgcgcgctcagctcgtcgacaaggcagcgtgcacccaccaagatagcgggatgatccagtgagcgcgtggaggcggtgtttgattctagattgttctagaaccgaacgagcgagcttagctagctagctagctgctgctgcttcgatcgatcggtcgttgcctcatgcaggagttccagtccatcccggggcctcgccgggcggctgttcggcggcgcggcggcggctgacatccggcgcgcgcaggcgcagcagggcccggcgtcgcggtgcggcgggataccgtcgccggaggcggtgaagtgcccgcggtgcgagtcgaccaacaccaagttctgctactacaacaactacaacctctcgcagccgcgccacttctgcaagagctgccgccggtactggaccaagggcggcgtcctccgcaacgtccccgtcggcggcggctgccgcaagaccaagcgtagcggcagctcgtccgctgcgtcctcggccccgtcgacgccgacggcggcaactgacaacgccaagaaccagcggcgcgcctcggcgtcgtccccacgatccagtagcggcggtagcggcaacacgagccccacggccgccgcggcgacgaccccgacgacaccggccacgccgtcgtcgaacaccatcgccgtcataaaccacgcgacgacgacgacgacgacgacgaaccccttcccgacagacgtgccacctccggcgccgattttcgccgaccaagcggcagcgctcgcgtcactgttcgcccctcctccgccgccgcctctcccggtgttcagcttcgcagcgcaggcgaagaccgaggacgggattgcctccgttctactcgccggacagacgacggcgcccactgccgccaccgttgccgacatgacgccgttcacgtcgctggacgcggggatcttcgagctcggcgacgtgccgccggcggcgtactggaacgccgggagctgctggacggacgtcccggacccgaatgtctacctaccctagctcggtgtagttactcatcacgatcaccttgattaagtctttgattaagctgtggttaaaacgcttcttaaggacgaccactagctaccactagtatgtcttttactactacattcatctactctactgctctccctgtaagtttttttcttcttttccttgtcttctctagctgcacttctgctgctgcaaaggtacgtgtaactgtccaagaaagctaacatttgtgtatctactgcacgcgtaaaaaaaaaaatctgaattggatcgatcattgttgc

SEQ ID NO: 25451 - DNA, 863 bp, Oryza sativa
  ref <308>: DATABASE ACCESSION NUMBER: AK100893
  ref <309>: DATABASE ENTRY DATE: 2002-08-28
ttggagagagagagacagacagagtgcggcgccgaggaggagaggagcaataatccaattccaatccattcctccgcgacctcgtcgtccgatcatggccatggccgcctccaggttgctgtgggcttcccgcgccgcctcctacctcaagatctccactttccccagggccttctccaccgtgctgaaggatctgaagtatgctgacactcatgaatgggttaaggttgagggtgattcggcaaccgttggaattacagaccatgcccagcaccatttgggtgatgttgtgtatgtggagcttccagaagttggcagcagtgtatcccagggaaagaactttggtgctgttgaaagtgtgaaggcaaccagcgatatctactctccagtatctggagaggtggttgcagtgaacgatggactaggcgatgaacctggattggttaatacaagtccatacgagagtgggtggatcatcaaggtcaaggttagtgattcaggtgagctcaattcattgatggatgacgcgaaatactcgaaattctgcgaggaagaagatagcaagcattgaacaaataccagtgacttgtgatctgcaaagaatgcgccttgacccttttgtcaatgcttgtgatgtgctatcgagcacttatctttaccaccggctgctcctgaaatcagcaccgatcaacacatgaataaattagtgttggcattgcctcttccacaaagagttgcaaacttcgaacctgtaaatgacatgagtttcgttatttctttgtagtatcgcgtgatttcatcttcaattgtagctctgccgcctctgctccgtttatttctgaaacgtgtgcttcgtttacttc

SEQ ID NO: 25452 - DNA, 2106 bp, Oryza sativa
  ref <308>: DATABASE ACCESSION NUMBER: AK100894
  ref <309>: DATABASE ENTRY DATE: 2002-08-28
gggcgagcattctgcagcattgatttgatctctgtacccttccatatatctccaccctttttaaatgaagcgagctcgatagtggaatggtggtgagtaggaggacgagatcgcgaagaagctgctgcagtgacggcagctgctactactcgtcgtctcgtcgccgtcgtcgccgtgcgtgcgtgcgtgcgcgcgcgcggtctttctttctccatctctcgctagcttttctttgtccatccatctatctttttctccatctttctctgtccgtccattcacccatccatgtccatccatctatccgtccgtccgtccatccatgtgccaaatttgcttcctcctccctttcaacatggttcgtgctacgatgcgatctcatcatcatcatccattcattcattcattcacatctccatcgctagtagcagctagggttcgttccttccttacaaggagatttaattaatttctctttcttttctttcttcttctcctttttgtcactgttcgtgcacactggccgtcttcttcttcctccagcttgtacaaaggaagcagcagcagaagaagaagcagctgcagcttagttgaccagtagttgtaatatcgccgctcgctactgtggcagcacagcgctcagctagctagctttccgcgcggcaatgcaagtgcaggtgcaattagggattccaggatgatgaaagacgcctttttttggcggtaatttgcgatttcgggctagggtttctttccaactttttttttgttgttgttgctctccctttaatccttagccccaatcagcgccatactgttgtactctctgttcccctccttatattttatgcacagggccaatccactacggcatcggcatgcacaatcttttcttcttcctttctttctcctcttcctttatattcccccacctccatgctcgcgagctttagtgagcacagtgaattaaagcgaagcgatgtgaaaatataattgtgtacatgtgtgttgatggatgtgtgcagaagcagctggcaggcatggtggagaaggcgtcgatcgaggacgtgatgaaggtgcttatggcgtcgaggaagcaggacctgcaccagctgtggacaacgtgctcccacctcgtcgccaagtcggggctcccgccggaggtgctcgccaagcacctccccatcgacgtcgtcgccaagatcgacgagctccgcctcaagtccatgtcgcgccgctcgccgttcctctcgcaccaccaccaccacccgcacgcggccgccgccggcatcgaggcgtcgtcggcggccgagctcgacgaccaccacaagatccgccgcatgcgccgcgcgctcgactcctccgacgtcgagctcgtcaagctcatggtgatgggggaggggctcaacctcgacgacgccctcgcgctgcactacgccgtcgagaactgcagccgggaggtggtcaaggcgctgctggagctcggcgccgccgacgtcaaccacccggcgggccccgccgggaagacgccgctgcacgtcgcggcggagatggtgtgcccggacatggtggccgtgctgctcgaccaccacgccgaccccaacgtccgcaccgtcgacggcgtcacgccgctcgacatcctccgcacgctcacctccgacttcctcttcaagggcgccgtgcccggcctggcgcacatcgagcccaacaagctccgcctctgcctggagctcgtgcagtcggcggccatggtgatgtcccgggaggacgcccagaccgccgcggtcaatgcggcgcccatctacggcgagtcccccggcggcggcggcggcggtggcgtgtacaatgccagtggcaccagctcgagcatggtgaacctgagcttggacaacaggatggtgtacctgaacctggggatggacgcgcagttcgggaagatgaacgacggtggcgacggcgacgacggcgggagcagagggccatcgtcgttgttctccccacatggcttcccctgacgacgaaagggggtgtggccgcttctgctctactatctccttgtaagcttagaactaattaattacatgttatttatatccacattacagg

SEQ ID NO: 25453 - DNA, 1386 bp, Oryza sativa
  ref <308>: DATABASE ACCESSION NUMBER: AK100895
  ref <309>: DATABASE ENTRY DATE: 2002-08-28
ggtccctctgtccgtacccaccaactgcgtcatctctctctcaggccgtcgcgtcgccgccgccgccgccgccgcagccgcagccgcccgccgatcagacgcggtctcgcggtcgcgccgagccgctgtccgccaactcgccaacccccgcccgccttcgcgccttgctcccgcctcgtgcaatcgcgtcgccttgagaagccgagaggcgagagccgcagtcgccgccgcgcccgacgccaaatagccaagcccggccagcttcgcgccgtcgcgcggtgccgccgccgccgccgccgacgccctctgcgctgccccgagaggccgagaagcccaagaaggcagacattccaccactccaaccagtaaagtgagaaacacaatacaaggcaatttttggacaatgaaaaggttcagacgactgaatcaagattttccaggtaaagtacaggacatggaaggttcctggacagctttcaaaaaacatgtggtgggaacctaacaagttcagattttggggatgggggttgcttacccaacatatagcatgccaacaatggccaatacaataacaagaaggataagagctgccagctgagtgccgatgccaacaactgcagaaagaaaggccaaacttcgaggagggcgaaatacatcaccatgaacaagcttccatccagattcctcattaacatctctctcctaacaaaaggaatatcaagacttgaggtcccaatcgagtggcactaggtgaaaacaaatccaacttagatgctagagctaagaatacaattaaacaaaaggtagatataccagtgactccagatcatcatcttcacgagcatactttgcatagtcatttctcaatgtccgcatcaatatcattgaaaccaaaccagtgaggaaaataaccatcatgaaagaattgaaaatggagaaccaatgaatctgaacattagaaatttgcatagaagtcagaacctttgaacaactttcaaaaagaacaagacgattcagctccctgttgttacaattaacattttttctctttcacataagtaagcaagctgagagctgcatgttacgcatagtttttttttctttggagtgggaaaatattacctggtgctcaaagaaaggataatccaggtatacttcaaagcggcgtgcaaaggtcacatctgtttgtaaccacttcactgaatatgtcatgtccaatttcttaccagcttcaagaagcttaggagactcttgggtgagattaacatgaatgatctaaaataataaaatgagatcaaattatgttatcatgtcaaaagcaatgtggtaatgaaaagttttatcacttttatgcaaaactcgtaccctgttatcattgtatttgac

SEQ ID NO: 25454 - DNA, 2174 bp, Oryza sativa
  ref <308>: DATABASE ACCESSION NUMBER: AK100896
  ref <309>: DATABASE ENTRY DATE: 2002-08-28
gaatcatgtcatgcgagcagcagcagaagcagcatccaccatgggaagagagatgcgttggaggaggcgagaggaagaagaagaggtggccgtgtggctaaggcccaaacacaagggcccatgagcataaccagttccttccgttacattaaaccctagacgctcctcctctcctgcccgcgcgcagttctgctgcttgctgctccggcgctggccctctcttctcccttctccgaccttgcgcctccctcaggctgaagatcgattacatcgcaggacaggacgcgcaatcgactttgcaggtactcttccttccttcctcacaattgtctcctggatcttggtatgtactactgcttaaatcgcctctcgacaaacggatcccctcgtttccttctgctctgcaaataatccacccgctttttttttaattatttccctagctttgaagatattttaagtatgtctccgtcgacgattgatttctcgcggcggtttcttaatctgatcgtgggcaaccgcacccctggtgtcaaatcgctatggtgcttcgacctgatgcgccagcagctgttctatccggcaacacctccaccgccacacaaggttgaggaattctggcaaaagtttagaccgccgggcacaatgatggacagcatggggcttcccttctcctgcttcaccttccgagcttcagctctcaacgtcaacggccaatcgaggatggactgtttcccgcttgctggcggcgaggtgatttgcatggatcagtctggccgcgcgttcctcgtcgacgctgatgcgtgccaggtaggaaccatgcccagtcttcacaaccccaagtcgatgcccttggccgtcttcgtccccaatgccaaggctgacaatgactatgaccatgatggctatggcagcagcctctttgtcatggagaggattcccaaaccggagttgggcttcaacagcgatcagtttgaggccttcatataccgcaagcctacaatatccaactacacaaaggcctggcactgccatcaactcccacccccgccttttgtccgtgaacccaagcactggcacagctgcagcaacccagagatcagctcctacgctgtgcttggcggtggctcacacatttgcttatctgtcaatggcatcggcacctactgcctggagacagcaagccacacatggagccaagttggcaagtggacactgccgttccatggcaggattgattatgtgcctgagttcaacctctggtttggcctctctgctgaggcccgtcgcttggctgcggctgacctctctgccatggactcctagccacagctagtgggcccttggaaggaactcaacctgccagaggaatggagggaatgcaaggatcctcaacttgttaaccttggctcaggcaggttctgcatcgctaggttcttccgcagcaacagtgactttggggatgaacaaattaccgtgtttacaggtgtggaggtagtgccacacgtcggcgatgccaatggctatgcaaataagggcagcaatgggaaagtgcaactccaaatgatccctcactgatcaaaatgtcacatatctaatgctactaccatcgatgttgtgttctgactaatattagtgctggcatccttttttatttgtttatattttatctgaataagagatgacttagaatattgttgtaagagatggtctccctatgatctctatttactagtagtgcggtattgtatcctgcaatggtagattctaaaattaactgaatttagtcccctttcctaagctcaacgagtggccaggagggctgaggtagaagaacccgactgaaggggtatattggtcaacccaagtaaaaaaatggtggaaatccagtgaattggcaaatatggcaaagaaaaggtttggtatcgcctagggatggccttttaacgaatccaatccgtggaatggcatttgagcgaaaccctcttttggtagtggcagaatgtccaatttctcgtttcgttcaacacaattgtgtgttactgaaaacatgtgtgatgtttggaatttcagttcaaggtgttgataatcacctcctaccctgttgctattgtgacctgtctggctgacagataattaatctgtcatgccacaaattacatgatgttcctgcc

SEQ ID NO: 25455 - DNA, 1808 bp, Oryza sativa
  ref <308>: DATABASE ACCESSION NUMBER: AK100897
  ref <309>: DATABASE ENTRY DATE: 2002-08-28
ggggcaacgcccagaagcgtccgcctccccctccctccgagggcgagatcggaacaaggcccccacccaaccaccgccgccgccgccaccggcgatcgccggcgacccccgggccacgggaggcgccccgccctcctcgccattggagaggaccttctctcctgctcggattcgtttgctctggtggtggtggtggggctttgctggcgcgaggccgcgcctgccatgccggagaccgggccctacggccacaagaagaccgacggcatctgcgacggcgtgtgcggcgagcctgcgtcaaaggcagttctgaccatgtcgaggctgagatgtgcacttcggggatttgatttcagagcactattggccctattgataggagtgccaattctaattttaatgatatatgctcatggtcagaaggtcacatacttcctcaggccaatatgggagtctcctcccaagcccttcaaaactatccctcattactaccatgagaatgtcaccatggcgaaactctgcaagttgcatgggtggaaagtccgggagaccccacgacgtgtcttcgatgctgtactattcagcaatgagctcgatattcttgaaatacgttggaatgaactaagcccctatgtctcagagtttgtgctgcttgagtcgaactcaaccttcactggattgaaaaagcccctgcacttcaaggaaaatcgtcatcgatttggatttgctgaatcacggctgacatatggtatgattgggggaaggttcgtgaagggagaaaacccatttgttgaggagtcatatcagagggttgccctggaccagcttattaagattgcaaaaatagaagatgatgacctgttgatcatgtcagatgttgatgaaatcccaagtggccacacaattgatctcctgagatggtgcgacgacattcctgagatccttcatcttcagcttaggaattacctctactcatttgaatttttcctggatgacaaaagttggagggcatcgatacacaggtacaggtctgggaagacaagatatgcacacttccggcagacagatgagcttcttgctgattcagggtggcactgcagtttttgctttcgctacattagtgattttgccttcaaaatgcaagcttacagccatgtcgatcggattagatttaagtacttcctgaaccctgaaaggattcaagatgttatatgcagaggggcggatctttttgacatgcttcctgaagagtacacgttccaagagatcattgccaagttggggccgattccaagcacattttctgctgttcatcttcctagctatctgctacagaatgttgatcggtacagataccttctcccagggtactgcaggagagaaagtgggtagattttgatgatctacactcttcaatctgatgtgcaggcctgtcactgccatgttctccacctccgagattggctggccgtgacggttgcatctgatatgattggctaacttagctggatgattgcttgggatgagtggctatgggtgatttcatcatccttcactgtgcaatctaacaccggacgaccctacaggctacagcatagtgtatgctcggtcgtggcatggttaccttcccagaggagctcattaccctgtggtagccaccacaagttcacctgtcattcatattacttccctgattgatacataaactgagaactgctgtagattgcaaaatcaagtgagatttcagatttatatgctgtagaactagcattaccctgcagataatccacacatgcttttattctccc

SEQ ID NO: 25456 - DNA, 2322 bp, Oryza sativa
  ref <308>: DATABASE ACCESSION NUMBER: AK100898
  ref <309>: DATABASE ENTRY DATE: 2002-08-28
gtctcgtccaatccgaggaggccctcgggctcggcgcggcgaataatttaggaaattgattattaataaggcgagcggcgagcggcgatgtcgtcagccgccgtgatgccgacgccgagcatgaactcctcatccgccggcgcagcggccgcggcggcggcggcagagggaggtggcggcgaggacgagcggcgggcgcgggcgctgtcgtcgtcgtcgtcgtcgctgcggcagcgcgcgatgagcgcgtcgtcgaagctgctccggacgtcgctgagcaggagcagcaagggggcggcggcgcggcagcggagcagcaaggtgatgtcggtgtcgatcgaggacgtgcgcgacgcggaggagatgaagtcggtggacgcgttccggcagacgctggtgctggaggagctcctcccggcgcgccacgacgactaccacatgatgctccgcttcctccgcgcccgcaagttcgacatcgacaagagcaagcagatgtggagcgacatgctgcaatggcgcaaggagttcggatctgacaccatcctcgacgacttccagttcgaggagatggaccaggtgctcgagcactacccgcagggccaccatggcgtcgaccgcgacggccgccccgtctacatcgagaagctcggcgcgatcgacaccgccaagctcctccaggtcaccagcatggaccgctacgtcaagtaccatgtccgcgagttcgagcgcgccttcgccgtcaagttccccgcctgctccatcgccgccaagcgccatgtcgaccagagcaccaccatcctcgacgtctccggcgttgggtacaagaacttcaacaaggccgccagggatctcatcggccgcctccagaaggtcgatggtgacaactacccagagactctgtgccggatgttcatcatcaacgccggtcaaggattcaggcttctctggaacaccgtcaagtccttcctcgatcccaagaccacagccaagatccatgtcctaggcaacaagtaccagagcaagctgctggaagtgattgatcccagcgaattgcctgagttccttggtggcacttgcacctgcgaaggcggctgcatgcgctccgacaaagggccatggaaagatcctgaaatcataaagatggtccaatgtggcatgggaagatgtggatttaatagctcgggtcatactgaggctgatgagaagatgatcactgaggatgacatagtggcaattcccaagaagcaagaatcaattcgccgtgattccgttgattcacccaagatcccacgcgaaaagattgaacatccgcagatgtcaccactccatgagatgtcaacttcagaaagcaaggctcctcctggccaagagggaagctcttcccgatacgacgatctgttccccatgccggacaagaacatggacttcaactggaacggcgaagtcagcgccgagaagctcgcactcgcacgagacatgtacgcgtcgctgccggacgcgtacaagcacggcgacgccggggaccggcaggtggtgacggggttcatggcgttcgtgatgggggtggtggcgatgttccgggtggggaagatcgcgccgaagcgcgccatggacgcggcgatgggcatcgcgacgatggaggcgatggccaagaaccggaagctgatgcagcagcagcagcggcagctggagcagctccctggcccggacacggtgacggtgtcgacggcgcagtacgaagcgctgatcaagcggctcggcgacctcgaggagaaggtggcggcgctcacctcccgccctcccgagatgcccgccgacaaggaggacttgctcaaagccgccgtcacccgcgtcgaggccctcgagaccgagctcgaatccaccaagaagcttttggagacttcgtcggggcagcaggaggaggtgctggcctacatcgagaagaagaagaagaagagggggatgcagaatccattccgctggtgatggacgggtttaaagcaagaagcggtgatggagctcggtcgtgcgtctcgtgtgttgttttgtgtgcgtcgtcgtcgctgtatctgaccccgtttgaaatgcgaaaaaaattttgctatttctgcgggagttgagttgagttgtttcctccgggatttctgtgaaattcatgttacatacttcttgtgtttcaaaaggggccttatatgtgtatagcaaaaggaaaaaaaacaaactttttcttgcttactggactgaactgtgtaccccactgttgtgctgcacgtgctttatcaaacatattacatgtacaggctgtatatatctattttcttc

SEQ ID NO: 25457 - DNA, 2505 bp, Oryza sativa
  ref <308>: DATABASE ACCESSION NUMBER: AK100899
  ref <309>: DATABASE ENTRY DATE: 2002-08-28
agctcgccaaaaaaaaaaaaaagtcacccagaaccgccgctgcgcctcctcctccttccgccgccgctgagccgctcttgctcctctatcgctgcgccgctcctgctggcccgcatcaccgacgcgcccatccacacccacacctcgccagtgctgacacccctgcgacattgccgccgccccccgcgatttgccgttattcccctagatcgggtgttgccacatcgccgtccacgcctgcggttcctcccctctccccttccgtgatctccctctccacacccacggttcctccgctctccccttccgcaatctccctctccacgcccgcggttcttctgctctccccttcagacgccatagccgatctcctcacggccgttgccatcgcgaccaccatcgattcctgaccgccaattcggggtcacggtgaccgagcccccgccgatcgtcccatcacgccaccccttcgccactcactgccaggtcgtcatccatcgttcctcctctactcacgatccccaacatggtccatcagaatcgtttgtgctctccgctctctccaagaggacttggagctgctacattacgttgacagcgactatgctttcacctcccgccttcgtcacggctacttagcaggaaggtcttcccatggtgctcgatcacatcgccgcctccgcgcacttgctctttccccgacggtcgatgctggcaccgtgccgctccacctcaggcagagaagattagatcgcctccacggctccgccattccgaatccggccagttctgcaaatgaggctgctgacatcatcgatccgccatctcgcacagcttgatgggcatcatcgctcgcctttgcctcatgacctttccgttgccaactatcgaagctgcctaaatttactagcaggtcatcggttgaaaccatccatgtgctgaataggtctcaagataggagcaagttccgcaagacgtgcattggacacagccgtcgcatcgctcctctgcagcagatccacgcaccggccaccgccttcacaacatgatttggaggtggagaagcttggtgtgccctcgacgagttcttccacaaatttactaccctcgatgatggcccaggccgcggcggctttgtcggcttcttcgacaacactaatgtctaccttgccaacaatatgtgagttaatttcttcctctctgctttctgaaatacttttcaatgtgaacactagcaatgtgaatcatctgatattaagaaggtcattactttcagaaatacttctataaaagcttgtgtgcatggattgttctaaatgttttgttttgtagatatatacaattttcatcaatacaaattgttagttagctcatatgctccttgttgatgcaaattttgtcatgtaagtactgtattcatggttgttggatgtaggtatcaattaaaccatattctttattatcaacgtataaccaatttaagctcaattttatggtttgctgccgttggtatagaatatgcactgtttaattaaatatataagtcaaagctgttatctatcagtttgtatgtttctattaatgatattttgatgcaatggataggatggctgttacggaatgtagcgaattcttgatgaaatgtactttctaatattaattgatcaaatttgagtatggaggccctttgcttgtcgactaagtgacaacgtcatggctagggatgcactggtgtttttatatttggatctcaagccctcgtatctggttctccagctgaatgtgttgatgcgatgactgcagcttaccaatggatgactctgtcatcttttcgctggcttgaagaactctgcagagaagcagaggtaggatatgttgacatcaggtgcttaactgaaacccgaatagaatccatttattttgacttcaaactgatgttcagatctgacatttggtgcacaacatgcagttgggggttttgacgtttcttaagtttttttcattgaacttgatcagccaaataagctattttagacgtgattcatgacctgttagtctgaagcgaaagcagaatcagattcaagaaatgcagatgtagaactatccaatcatatcgatcgagcacaatcttgtcatgccattgccagacatccattcttgcacaaagcaaactccactcaagattgttagataatgcatgtacatcaaaataaagatatatgcttttctctgctgaactgcatattctggatcaatcatccatggtcatccatactcaaaaattttgttggtatatcagtcatggaaattacattttattttttcttccttttcacctaaactcacagtctgcatatattttatacggtcccttcttaatgtttggggcttagctattagtatttacaaattcatacatgtgagtgttacctcaatatgtattatctgatctatacaagttcatactgaactggtattatacaatgtacacaaactatttgatcc

SEQ ID NO: 25458 - DNA, 1828 bp, Oryza sativa
  ref <308>: DATABASE ACCESSION NUMBER: AK100900
  ref <309>: DATABASE ENTRY DATE: 2002-08-28
gacagcccaaaccctcttcccttccggcgtcggctcggtgggcggcggacatggacacgagggtgctacccatccccatggacgaggccaccatggccgagttccggcagcgcggccaggtccccgaggacgtcgagagctccatcggcaccgtcctctcctacatccactttgccatccccgacgcgccggtctcctcccacgcccgcctctccgcgctcccgcccgacgacgacgacgacggtgtcgaccgcctcagcctcctccccgacgcgctcctccgccggatcgtctcccgcctccccgtcaaggacgccgcgcgcaccgccgcgctctcctcccgctggcgcgacgcctggcgctccaccccgctcgtcctcgtcgacgccgacctcctccccgccggcgtgtccgacgccgacaccgacgccgcgcgcgaggaggcccgcgcagtcaccttcgccgtgtcccgcgtcatcgccgcgcaccccggcccgttccgccgcctccacctcacctccagcttcatggaccagtaccagggtctgctcgcgagctggctccaggtgctcgccgtcaagggtatccaggagctcatcctcgtcaaccgcccgttcccggccgacctcaccctccccgccaccttcttcggcatggccaccctcacccgcctctacctcggcctctggaagttccccgacacggccgcgctcccgcgcgccgcctgcttccccaacctccgcgacctcggcttctccctcatcggcatcaccaaccacgacatggacttcgtcctcgccaggagccccgttctggagacgctctgcctccaggccaacacgcttcagcgcgtccgcgtcgccagccgcagcctccggtgcctgatgatgatggggttcgaccaggatgtcaacgtggtcaacgcgccccgcctcgagcgcctcatcatgctctactcctgtggctcctccatgctggtaaagattggccgtgctccctcgctgcgtgcaattggataccttgatctggaaacccatgtgctggagatcggcgacactattatcaaggctggaacaagggctagtccaagcaccatggttccaagtgtgaagatccttggcataattgtgtgtttcggagtccgcaatgaagccaagatgctgcccagtttcctcagatgctttcctaatgttgagactctgcacgtcgaatcccggaaaactgatgagctcactggcaagctgaacctcaagttctggcaggatgcaggcgccatcgaatgcatccagtctcacattaccgtgatgatttttcgtcgtttccgagcaacgcggggtgagattaacttcctcaaatttgtccttgagagtgcgcggatgctgaagaagctgataattgtgtctcccaaaggaacatttgcatcgacagatgaggcaaatttcagactgaagcctctgttcgccacaaaatgggctagtaaatgttgttcactagtggtccttgagagtgatgctagtgcaggagaaagcaattggaactttgagagaggatgtgatttttcacttatggacccttttgcgatcatcatccgatcttctcggcttgacatctctggaagttgttagtgttctgtggcagtttctaaatgagagggattgttttgcttccttgacttctgctgttttttgttccaattttgagatttatcagtgctctcaatcctgtagcaactccaacagtattgtctttccagcagaagacaaatgttatctcagatgaatgttgtattgacctggcattgatcatgtgacatcacacagttctatct

SEQ ID NO: 25459 - DNA, 2230 bp, Oryza sativa
  ref <308>: DATABASE ACCESSION NUMBER: AK100901
  ref <309>: DATABASE ENTRY DATE: 2002-08-28
gggtctatccgcttgccggtggactggagtggagtggcggtggcggtggcgcacactcgcggcggctcgtgcgcccctccgcctatcgccgccggcggccggccacccaccctcgaacgccgcggtgacgccggtgagttctcgctgccctatcccctaaaccagattttccgagcggtgccatgagagtccgtcgagttcgcctgagccattcaactccgccgtgagggtgggggtctccgacgtgcccgtcggcgcgattccgggaagccgccgccgccgtcgtcctgccactggggctgcctcaatcaggtgctctgtttgcagcgccatccacgagacgggtttatcccattagcccactacctttccctacatttctctcttcttcgccgcagctcgatttgcacaagttcggtttcatgatttttctttcaacaccaaagcgaatagcattacatcagaatctgtgcatgttcatgcgcagtttcattctttggacgatgaatcaccgtacattgaaagtatatttaagtttataactgggaattgttgtttgaaactgaatagggatgttggcaggctgggaaacattggcttcctgtcctgcgagtgtcattcattcgttgatcaaagtgttattagtggttaccttcatgcagtggccagccactgctatcgttgttgttccgaattcaaactgttttaccttcgacaacaatagccgccttgtggactttgcagatctaatcgggaagaactttgaatataatgaaaagggctcagtaccttctgatttggttgtccagttctgcaaagatgtgcagagaagatctcaagcgggatatacggactttggacgttttatcagttctcgctcttttataactggttcacagcctattgactttattcagacattccaatatggagatctagtgcactgtgaaactacttttgagaagatgggccgcacatcacaggtttgtgtctaaattctgatcagcttctttcttattttcactacttttcggatttttgtggtcccaatttaggcttgtggatgcatttctgaacatatttcaggtaaacatcatatgcggtcaatgcccaaataaagaatgcaaaggcaaacaaggatgcatctgtagtatatcttatgatgaactgatgtgcagggtgactgttgaacttgctatcccatgtcctaaaagtggtccaagagtatttaagggtttcactgtcggattccatccccggtcatcagagttggtttataatggattgactcaactgggatttgagcaatctcatcatgagttcagctttcagggtgagcagagtcatgtatccctgtatcttagtgcagtgttttcactctcaggacttgttggaaaaccttccttgaaggttaatccagttaaagggcttgatgtgacactgacaggatcagggaccaacggtgctatgcctactaccctgtcccctacaattctgaatgtgatctggagatgtgaaatcgcgcggagcagtccttatgaggtcaacattttgattccagtagaaggctatgatccaattgaatttacgctcaccaaagaatgtgcttcattgtgttgtcaagtctactttgttgtggaggtttcatctacaaaacacgtgtccaacatcagtctggtttatatgcgctgcctgggatgaccatcttgtctgccttcctagatgcggttggtggaccaagctacatgagagcagatgatcatggcggaaaccatgcaagccaagcatcatgggaacgcatgcctggtacctcacaagcagcagagcatggcaccaaagataggagatacggatcactttgaactgaacgatgctttagtttttgagggttgcttttttgtaagtttgaagtattctgtaatcagacaaactctgcacttcatctgcagttgagcttccgaagcattgcttatcatcttttcagcttagatggtgttatgaattgtggtggtggatcattcagcatgccaccatcgtcatcgccatccgatcgacgtgcatgctcattagcagatactagacctctgttcttagatagtgctccctccagtttttaatgctcaacattattgactttggacatatgtttaatgatttatcttattaaaaaacttatgtaattataatttattttgttatttgttttattattaaagaaaagcatgacttt

SEQ ID NO: 25460 - DNA, 1361 bp, Oryza sativa
  ref <308>: DATABASE ACCESSION NUMBER: AK100902
  ref <309>: DATABASE ENTRY DATE: 2002-08-28
ccccccaaggcgccgcaacgttccccgacgccggccggccgcccacggccctcgcgcgcatgggcggcttcgctccccaccccgtcgtcgtccccaccgccgccatggacgggaccagcagcgttagcgcgcggacggcctcgtctctgtcgtcgtcgtcgtcgtcgctcgacgacggcggccgtggccggcctccgccggccgggtcgacgctggagctgccgtcgcggaagcactaccggtacccttcccggtcggcgaggctgttccagaagctgcgccgctcgctcccgctgctgacgctggcgccgcggtgcggccggatgcaggtcggctcggcgagcgaggtcgccgcggcggcggcgtccggcggaggaggaggaggagcagccgactcgcacctgatgtcgcacgtcgtgtcgtcgttctccggcgcggcgcggccgatgcggcgggtgacggggacgctgttcggccaccgcaagggccgcgtcgcgctggcgctgcaggagacgccgcgctgcctgcccaccctcgtcatcgagctcgcgatccagacgaacgcgctgctccgggagctcgccaaccccgccggcgcgcgcatcgtcctggagaccgagcgccgcgcgccatccacggacgccgccgccggcaagcaccggagggcgccgccgctgctggacgtggcggcgtggaccatgttctgcaacgggaggaagaccgggctcgcggtgcggcgggaggcgacggacgacgacctcgcggtgctggagacgctgcgccccgtctccatgggcgccggcgtgctccccgcctccaacaggtcgtcgtcgtcgtcgtctcagtcgccggagaagggggcggcggcggcggacgacgaggtggcctacatgcgcggctgcttcgaccacttcgtcggctcgcgcgactccgagtcgctctacatgatcgcgccccagggcggcggcaccggcccggagctcgccatcttcttcgtcaggctatgaccaccaccaccacctactcgccggctcgccggcgatgcaccgatcaatccatcgccaccgccatcgcgcgcgccatgcaaagcaagacgaagggcgcgtcgtgattcgtgcagccctcttgacggcctcgagattcgtgaggagcaggcgagccacctcgactccctacgtcagagatggcttagcttaaatttaatcatctgattaagcactaatcttgtgctcttagtgggtgattaggttgtgaggaggtcattgcataaatcgggtttaatggtggtgcccaacacctcattgcacacacaatctagtggagtacggagaaaattatattaattaattaagttgcttgcc

SEQ ID NO: 25461 - DNA, 3132 bp, Oryza sativa
  ref <308>: DATABASE ACCESSION NUMBER: AK100903
  ref <309>: DATABASE ENTRY DATE: 2002-08-28
gagaagagagagttcagatcaaacgccgaagcaattcttccgcaagatttcgagtgatcccatctcaatccaagctaaaccaagagattttgatttgttgctgtagattgattgtgtgaggagaggaggagcagccatgaatccggacaacttcacgcacaagaccaacgaggcgctcgtggcggcgcacgagatagcgtcggaggcggggcacgcgcagctgacgccgctgcacctggtggcggcgctggcggcggacaagggcgggatactccggcaggcgatctcgcaggcgtccggcgggggcgccggcgcgccggactcgttcgagcgcgtggtgagcggggcgctcaagaagctgccctcgcagtcgccgccgccggacagcgtgccggcgtccacggcgctgatcaaggtcatccgccgcgcgcagtccgcgcagaagaagcgcggggactcccacctcgccgtcgaccagctgctgctgggcctcctggaggactcgctaatctccgactgcctcgaggaggccggcgtgtccgcggcgcgggtgcgcgccgagctcgagaagctccgtggcggggagggccgcaaggtggagtccgcgtccggcgacaccaacttccaggcgctcaagacctacggccgcgacctcgtcgagcaggccggtaagctcgaccccgtcattggccgcgacgaggagatccgccgcgtcgtgcgcatcctgtcgcgccgcacgaagaacaaccccgtactcatcggcgagcccggcgtcggcaagacggccgtcgtggagggcctcgcgcagcgcatcgtgcgcggggacgtgcccagcaacctgctcgacgtccgcctcatcgcgctcgacatgggcgcgctcgtcgccggcgccaagtaccgcggcgagttcgaagaacggctcaaggccgtgctcaaggaggtggaggaggccgagggcaaggtgatcctcttcatcgacgagatacacctcgtcctcggcgccgggaggacggagggctccatggacgcggccaacctgttcaagccaatgctcgcgaggggccagctccggtgcatcggcgccacgacgctggaggagtaccgcaagtacgtcgagaaggacgccgcgttcgagaggcggttccagcaggtgttcgtcgcggagccgagcgtcccggacaccatcagcatcctgcgaggcctcaaggagaagtacgaggggcaccacggtgtgaggatccaggaccgcgcgctcgtcgtcgccgcgcagctctcggcgaggtacatcatgggacgccacctgcctgacaaagcgatcgacctcgtcgacgaggcctgcgcgaacgtgagggtgcagctggacagccagccagaggagatcgacaacctcgagaggaagaggattcagctggaggtggagcaccacgcgctggagaaggagaaggacaaggcaagcaaggcccggcttgtcgaggtcaagaaagagctggacgatctgagggacaagctgcagccattgacgatgaagtacaggaaggagaaggagaggatcgacgagatcaggaagctgaagcagcgccgcgaggagctccagttcacgctgcaggaggccgagcgccggatggacctcgcccgcgtcgccgacctcaagtacggcgcgctccaggagatcgacgtcgccatcgcgaagctcgagagcgagacgggggagaacctgatgctcaccgagaccgtcggccccgagcagatcgccgaggtggtgagccgctggaccggcatcccggtgacccggctcggccagaacgacaaggagaggctcgtcggcctcgccgacaggctgcaccagagggtggtcggccaggcggaggccgtgagcgccgtcgccgaggcggtgctgaggtcgcgcgccggacttggccggccgcagcagcccaccggctcgttcctcttcctcggtcccaccggcgtcggcaagaccgagctcgccaaggccctcgccgagcagctgttcgacgacgagaacctgctcgtccgcatcgacatgtccgagtacatggagcagcactccgtcgctcgcctcatcggagcaccacctggctacgtcggccatgaggaaggtgggcagctgacggagcaagtgcggcggcggccgtacagcgtgatcctgttcgacgaggtcgagaaggcgcacgtcgcggtgttcaacactctgctccaggttctcgacgacgggaggctcaccgacgggcaaggccgcacggtggacttcaggaacaccgtgatcatcatgacctccaacctcggcgccgagcacctcctcgccggcatggtcggcaagaactccatgaaggtcgcccgtgaccttgtcatgcaggaggtgaggaggcacttccgtcctgagctcctgaaccggctcgacgagattgtgatattcgatcccctgtcccacgagcaactcaggaaggtcgcccgtctccagatgaaggacgtcgctgtccggctcgccgagaggggtgtcgccctggccgtcaccgacgccgcgctggacgtcattctgtctctgtcctatgatccggtttatggcgcgaggccgatcaggaggtggatcgagaagagggtggtgacgcagctgtccaagatgctgatccaggaggagatcgacgagaactgcacggtgtacatcgacgcggcgccgcacaaggacgagctggcctacagggtggacaaccgcggggggttggtgaacgccgagacggggcagaagtcggacatcctcatccaggtgcccaacggcgccgccaccgggagcgacgccgcgcaggcggtgaagaagatgaggatcatggaggacgaggacggcatggacgaagagtagtaagtagtagagcgcgtatgtgcgtgttgcgcccccgggcagaggcagaggagggcgccgatcgagctgtgtgaatgaatgtggggtgtctccgttgaataagctgtgaaatatggtgtttttccgatgatgcctttttgtgaagttgttgttctgctaagacgactttcttttgtgaaatttctgatgaactgaagaagtgtaaaaacgtttacgttctggttgagttgagttgaaagttcatgtgtttacggatg

SEQ ID NO: 25462 - DNA, 1926 bp, Oryza sativa
  ref <308>: DATABASE ACCESSION NUMBER: AK100904
  ref <309>: DATABASE ENTRY DATE: 2002-08-28
gggtttacgcgttggactccccccctctcacctcgccgccgcctcctccatccatccaatctcccacccccctctaaacccgcacgcgaagcctagggtttcctccacctccaaacccccccaccaccctcccttcctccgatcgatccgcctccgaggggcatcggcgtcggcggcggcggcggcggaggcgagcttgctgttgttgttgtgtgggatggcggggtacccggaggagaaccagcacgggatgaacgggtacgaggaggaggaggaggtggaggaggtggaggggttcgacgaggagggtcgacccggtagacggggcggcggcggtcgggatgggggcgatggcggcgcgtatggcgacgccagcggggacgacgggagggcgcccggcggggactcgtcggggaagattttcgtcggaggcgttgcttgggagacaaccgaagaatcattctccaagcattttgagaagtatggggctataactgattctgtaattatgaaggacaagcatactaagatgcctcgtggatttggatttgttacattttccgatccatctgttatagacaaggttttggaggatgagcacgttatagatggaagaacggttgaagttaaaaggacagtcccaagggaagaaatgtcatcaaaagatggtccaaagacaaggaaaatctttgttggtggattaccttcatcactaactgaagatgagttgagggagcacttctccccatatggtaagattgttgaacatcaaataatgcttgatcatagcactgggcgttctagaggatttggttttgtcacttttgaaagtgaggattctgtggaaagggttatatcagagggaagaatgcgtgaccctggtggaaagcaggttgaaataaagaaggctgagccaaagaaacatggtggtgatcacagtagtaatgggagatctagtcatgggagcgggggtggttaccgcagttcataccgtagtggtggagctgctgcttctggtggtggaggcggaggtggtggtggcggcagtggcagcagtggtggctatgggtatggtgctggttaccgatcagctggaggaggttattatgatagtactgcatatggttatggcagaggagggtatggctatggaggtaatgctggatttggatcaggatatggtggtggttatggtggctccttgtatggaggtgcctatggtgcttatggggcatatggtggtggtgcctatggagggggtgcctatggcggaggtgcttatggtggtggtgcctatggtggcgctccgggtgcctatggtggtgctggaggatatggcagttatggtggagctggagcaggaggtgctggtgggcggggttccagcaggtaccatccatatgggaaatgagtgaactcatgagagttttttctaggatacaataagtgcacctcctggaaaatcagcgttttatcttgggttactcaatcagcggcaccagaacatttatttagtttcatcaaattatctcgtaactggaccaactgtgtaattttagtcgctgaacccatccgtagtctgctgtagaagctacacatgaaagctatgttgtattccgttagttctcatatgctgagagaattagaaccctcaaacaaagccttttgtgttaggaacagtattggtatgattgacctattatattttgtgcggtagtgacattgccttcgcaagcagctaactgttgccatctgcccttatatgtaagggaaccgttaacggatttgcttaaatcttctaatttgactgtttttattgaccttgctgctataatctctgtatatcattgtcctgcgctctgtatttcttacggcagtgaagaatgcatggtccactgcaatacatatgtccgtctgattatactc

SEQ ID NO: 25463 - DNA, 2545 bp, Oryza sativa
  ref <308>: DATABASE ACCESSION NUMBER: AK100905
  ref <309>: DATABASE ENTRY DATE: 2002-08-28
gagtttgtcctgggcttctttcggcccaatctctctcccgtcgagccggccgcctccgccgctggggcgttccacttcccgacgggcgcaggcggccggcgtcgactctctcctgtccaacaccatagttgtggcggccgatgctatcgttaaggatcgcggccgcctcgcgcctgcgagggctgctgggcggcggcgcagcgaccggggcgcgcacacgcgccttctcctatgggagggtggtggatgccgctgcccgggacggcgagctccgagttttcgtggtcgccggtgaggtctcaggcgactcgctcgcctcgcgcctcatggcgtctctcagggcgctctcaccggtccccgtccgttttgctggtgttggcggggaattaatgcgcaataaaggcttgcagtcactttttcccatggaggaaatttccataatgggattgtgggaactgctgccacacatatataatatcaagaggaagattgaggatactgcagatgctgctgtattgtttcagcctcatgctgtagttactgttgattcaaaggggttctcttttcgcctcctgaagcaattgaaatgtagatacaatcaagttgcccgtcctctacatgtccactatgttgcaccatcattctgggcctggaaagatggtgaaagaaggcttgcaaagttgcataattttgtggaccatttgttgtgtatccttccatttgaggaagaaatttgcagattaaatgggttgcctgctacatatgtgggccatccattattggatgatgctattggcttgaatatggagaaggaactatcttctgtcaattccatgcatcaacgaagtggtgaagattttcgacaggagcatgaaatttccccagattccacaatcataaccatactgcctggaagcaggatgcaggaggtagcccgtatgcttcccatcttcttgcaaactgtgcaacacctaagtcatacatttaatgaactgtcactggtcatcccagttgctcctcatcgggatgtgagggtatatgttgataatgttgttcgatcagggccatttccagtggtactgataactggggaaacactaaaagaaagatatgatgcattcaatgctagtagagcagcattatgcacttcaggaacagctgtcatggagctgatgttagcaaagctaccctgcgtggtagcttaccgggctcatttcatcacggaatgtttgattcatctgaggaaaaagatagactttatttctctacccaacattcttttaaactctccaattgtccctgagatcctttttggggcttgcacagcggaaaatctagctgcaaaactaagtgaggtcatttgtaatgatgaagcccgtcagctccaagttgaatcagctgaacagttactggagatgctttatgaacctatcaagcaacgaggtggcctatttcaagaggagctgcacaactcgagcctgccgtcaaatatctactccccaagcacgattgcagcattgacagtgctttatacagataaccatcaacaagcggtgcaccagaattgagtggatgtcctcagtagcagacaaatatttttatcagccgtgatggtcgctattgcgtgcaatctcatcttctccgtctgctgttcgtgatgaagagtgtactttctgcagatcctattggctgccctaggcccacaattggagaggcaaaacgagtttttaggtaaaaaaggcttttcagttcttggtttctgattctgaagtgccgcatgaagtcaggtcagcatcgtattatcattatggaggatgggaacgcatgtgttctggtgggtttagtgcgggtcctggtcatcattctgcgatgatgcgtttggcgcaagattcttccatggttagaatttcctggagtgaacagttggcagttgatatgtgagaacaattacaagagatttttcggatggttttgatactttcatggtcatcgaaattacgagatgaagtatgaacggatgcacagtaacgtcatcaggtctgggcttgcttgatggctgctctagccatagaggatcctcggtcagtgagaaagcatagattcccacgtagccggcgatcacgtcacggctgagctcatctaggtggtggcccatgcacgagacggcgaatcttccatggaaaatatttcgaaaattgttgcttcggttttaattacaagttgccggcattgccagtgttccacttgggaatatctaacgcttttcttataacgattttacctgccaactgcagcatggcatggggaaaagtcttgagccatcgtgtacttaaattgtgtaatcatctggtgccactagctatccgtgaacttcaggagtaagttgatctagaatggtgactggtcaatggaggccttgtaattgtaatttgtaaaacaatctaatgatgtaacatctcaaggcattgccagtgtggtcgcggtgcatggattcgtttccctggcatctcggtaagaaacagtaatatttcagtatttcacagtg

SEQ ID NO: 25464 - DNA, 1965 bp, Oryza sativa
  ref <308>: DATABASE ACCESSION NUMBER: AK100906
  ref <309>: DATABASE ENTRY DATE: 2002-08-28
gatctgtcatcatggcctcatgggtgccaatggatgatgcagatctgggacagatgagacgacaattgggcaataatgcccaactccaactccatgtagagaaggaaatttcgaacggaggtcgctttctatatttctcttgtcctcttcttctccccttcgtcctcgctaccatcgccctattaatattcctcaaaatccaaatttgagacaacccgaattcagtcctcagcgagtcggaaacgcgccgaaagacgaactggaggcgcccccccaaatcttgagatcgcaggatggatggacatacaaatggcactaatggttcctgctctaagccatgcgagccattaacagactactgcatccctgattacattctgaatcctgactctgaacaagtcctcgttgatcaggcaccatgttgccctgtagtagtattcatcaactctagaagtggcggccaactcggaagcagtttgatcaaaacgtatcgtgagcttctcaataaagcgcaggtttttgatttatcagaagaggctcctgaaaaggtgcttcacagattgtattgcaactttgagaagctcaagtctaatggcgaccctattgcttttcaaattcagagcaacctaagactaattgttgctggtggtgatggcacagcaagttggctgcttggtgtagttagtgaccttaagctctctcacccacctcctattgcaactgtgcctctgggaactggaaacaaccttccattctcatttggatgggggaagaagaacccaaccactgaccaagaggcggtgaaatcatttcttggacaagttaaaaaagcaagagaaatgaatattgatagttggcatatcatcatgaggatgcgagctccacaggaaggtccatgtgaacctattgctccgttagagctgcctcactcattgcatgcattccaccgtgtatcaggaagcgattcacttaatatggagggctaccacacataccgtggaggattttggaattactttagtatggggatggatgcacaagtgtcttacgaatttcactctgagaggaagagaaatcccgagaagttcaagaaccagctaacaaatcagagtacatatgctaagcttggacttaaacaaggatggtttgctgcttcactaactcacccatcctcgaggaacattgctcaacttgcaaaggtgcggatcatgaaaagacctggtggccaatgggaagagcttaagattcctcgcagcattcgatcaatcgtctgtctgaatctgccaagtttttctggaggactgaatccttggggaacacctggcaccaggaaagtacaagatagagacctgactgcaccatttgtcgacgacggccttatcgaggttgtcggctttcgcgatgcctggcacggtcttgtcttgcttgcccctaatggccatggaactcgtctagcacaggcccatagaatccggttcgagttccacaaaggagcagccgagcacacgttcatgaggatcgatggggagccatggaagcagcctcttcccaaggacgatgacaccgtggtcgtcgagatctctcacctccgtcaggtcaccatgctcgccagcgacccgtgcaagtcgaagagcgtcaacgacccctcgtcgccgatgtgctgtagcaaccacgacgacgacgagcgcaacagcttggaggacgaagatgagtgggaggaggggaggaagaagtttggtgcagctgatacgttcaagttccctgatgaggttgatgttgctcaccttagctgagctataagtgattcagagttcagatttcagaatgttcgctactactgttagcgatactgcctttttgggggtttatatatactactagtttattagttatcagccctgtgtagattcgaccggctgtattcgagaactgcaaaattttccgagtaatgtcatattttcatgc

SEQ ID NO: 25465 - DNA, 2189 bp, Oryza sativa
  ref <308>: DATABASE ACCESSION NUMBER: AK100907
  ref <309>: DATABASE ENTRY DATE: 2002-08-28
gtctgtgttttcttcttcctccctactactcggtttctgtcagatctccggcgagcatcgaggaggtagaggccgcccccgacaccaacggcggcggcgaggaagccaatcggccccgcgtggaaggtgacggcgaaggtgtcgtgcagagcaacgagtcctccgcaaaggtcgatgagccgctgctcctgctgaggcatctgtagatgctgtgaacggcaagattcctcctaccaagatctccggtgagcatcgaggaggtagaggccgcccccgacgccaacggcggcggcgaggaagccaatcggccccgcgtggaaggcgacggcgaaggtgtcttgcagagcaacgagtcctccgcgaaggtcgatgagccggtagctacagagaacagtgacgctgctcctgctgaggcatctgtagatgctgtgaacggcaagattcctcctaccaagttgattccccaacatcctctggaaggtgttacattgacagaaagaactgtacgtattactgggaataagaagcagatagaagcggcaaaagatattattaagcaagctatgagtcaggttttggtagaagcaaatggtgtaacaaggacattggttttgaataggccaaagcagttgaatgccctctcctctgcaatgataacgtgttttttgaggtgcttcactgcttatgaggaagatgatggagttaaactattgattgtgaagggaaaaggaagagcattttgtgcaggtggagatgttgctgcagttgtccggtctataaataatgatagctggaaatatggtgctcattttttccgaaatgaatttctgttaaactatatcattgcaacatatagcaaacctcaggtttcgcttctaactggaattgtcatgggtggaggtgctggtgtttctatacatggaaggttccgagttgtcacagatagcacggtttttgctatgccagaaacagcgttgggtctctttccagatattggggcttcatattttctatctcgacttcttgggttctatggagagtatgttggtcttactggtgtaaggttggatgctgctgaaatgcttgcttgtggcctagcaactcattttgtaccttcagataggctgtctttgctagaagaatcacttaaaaaggttgatacatctgatccatttgctatatgtggaattatcgatcaatattcgcaacaaccatctctgaaagaaaaaagcgctctgaataggctagaaatcatcaacaaatgcttttccaaaaaaacagtagaagaaatcatagcctctcttgaacaagaggctccaaatgttgctgatgaatggattgcttctgcaatccagtccatgaggaaggcttctcctactagtatgaaaatatccttgagatcgataagagaagggcgaacacaaactgttggtgaatgcttacgtcgagaatatagaatggtttgccatgtgatgcgtggtgacttcagtagagacttctttgagggatgcagggctatattgttggatagagatcgaaacccaaagtggatgcctccaaggttggaagaggtgcacgacgaggtggtcgaaaaatatttttccaaagtcgatgatccagagtgggaagatttggacctacctcctagacgttcccatggaaggaggcttgttcccaagctttgactgaatgaagcctctggtgaaaaactgaagcctttgttggtgcttcttaataacaaacagatcgtccccaatttgagggatatgtggagacaagcgatgaagtttataataaagctgaaacatataatactataggttaacaattttattagtagcaatttagagaagtccatctcatagtctcatgcgatgcttatattggtatcgctattgtgctttttcaaggtgtgaaggtacgcttcaagccaaagcccaactgcataacggcggcccatatgataccggtatcaggctatcctattaggctttgaagctatcttctgcttgtagattctaggtaatcttttatatatattgtataaaagaaattcataagtttgcactgtgttgttttttaagtaaggcctcgaaaaggtagatccctaatatcgagtgtgtcttgtaatgcacttgaactgattgcatttcgttgatgaaatgggaaaggtccactctctttgtcct

SEQ ID NO: 25466 - DNA, 1811 bp, Oryza sativa
  ref <308>: DATABASE ACCESSION NUMBER: AK100908
  ref <309>: DATABASE ENTRY DATE: 2002-08-28
ggggcgtccagatctcgggctcgctgagctgtcgccatcgacccggagtccctcccgcaccagctaacctttgcttccgttggaagcgccagccagcgctcgccgttgtcacctgtcacactgcgttgcacggattatcgtttttaattaatcgtcaccagattgttttttttctttctttttgcaaatctcgcttcgcttttggagtgggaggaattaattgtggagttgggtagatcgatcaggggcagcgcgagcgaggcccggttggtagcagtcggtgcgtgtttgtgcgtgtgcgcgctgcttctgcttgcatcgtggtgcgaggaggggagaggaggggtgctgctataaatacggctcagatctgggaggctttcttcctcgtccgcctccggtctaatccgattcaaacccgccgtttccaagcttgctctcctctcccccccaatccttccctcccgagtggcagggtgctcgacgggatggcgcagaaggaggccaatggcagcagcaacggggagcacaccacccgcccgccgccgacgccctcgccgctccggttctccaagttcttccaggcgaacctgaggatcctcgtcaccggcggagctggcttcatcggctcgcacctcgtcgacaagctcatggagaacgagaagcacgaggtcattgtcgcagacaactttttcactggttcaaaagacaacctgaagaagtggatcggacacccaagatttgagctaatccgtcatgatgtcacccagcccctgcttgtggaggttgaccaaatctatcaccttgcttgccctgcttcaccaatcttctacaagcacaaccctgtcaagaccatcaagacaaacgttatcggaaccctgaacatgcttggacttgccaagagagttggagctaggattttgttgacttcgacctctgaagtttacggtgatccgcttgagcaccctcaaacagaggcctactggggaaatgttaacccaattggagtcaggagttgctatgacgagggtaagcgtgtcgcagaaacactgatgtttgactatcacaggcagcatggcattgagatccgaattgccaggattttcaacacctatggacctaggatgaacattgatgatgggcgtgttgttagtaacttcattgctcaggccgtacgtggcgagcccctgactgttcagaagccaggaacacaaactaggagcttctgctatgttgctgacatggttaatggtcttattaagctgatgaacggggacaacactggaccaattaatttgggaaacccaggtgaattcaccatgctggaacttgctgagaatgtgaaggagttgatcaacccagaggttaccgtcacaatgactgagaacactcctgatgatcctcgtcagaggaagccagacattacaaaggcaaaggaagttttggggtgggagcccaagatcgttctgcgtgatggcttggtgctcatggaagatgatttccgggagcgcctccaagtgcccaagaagaaccaggcctaagctgctgcatcgcatttggcgaaagatgtcactggagcatacttaatagttgggtttcaccattatttgtgtcgcagttcattgtggaatttgggttccaataaattctgatacacctttgttgttcacctgaaatattgtgttactagaatcgtcatacggggctgggctatttgtatcattaccgcttttggagaactctttatacttttgtttgtagcctgtgtactcgcctaaatcaattatagcaatgttgatgaatttttagct

SEQ ID NO: 25467 - DNA, 2870 bp, Oryza sativa
  ref <308>: DATABASE ACCESSION NUMBER: AK100909
  ref <309>: DATABASE ENTRY DATE: 2002-08-28
gactcctcttcctcctcctcctcctcctcctgcgatcccggcgcagcatcgatcgccattgccactcgagctccgagctcctcggaaaagcagtgaacccaccactaagctcgcgacatctcgcaacacagcttgcttgctgcgtcgcggtatatagagcagtagctagcttagcttgtcgatctccaatggcgctccaggcatcgtcgtcgccgtccatgttccgcgcgatcccgacgaacaccaacgcttcttgccggcgaaagttgcaggtcagggcgagcgcggcggcggcggcggcgaacggcggcggggatgggaaggtgatgatgaggaaggaggcggcgtcgggcgcgtggaagatcgactactccggcgagaagccggcgacgcctctgcttgacacggtgaactacccggtccacatgaagaacctctcgacgccggagctggagcagctggcggcggagctccgggcggagatcgtgcacacggtgtccaagaccgggggccacctgagctccagcctgggcgtcgtcgagctcgccgtggcgctgcaccacgtgttcgacacgccggaggacaagatcatctgggacgtcgggcaccaggcgtacccgcacaagatcctgacggggcggcgttcgcggatgcacaccatccggcagacctccgggctcgccgggttcccgaagcgcgacgagagcgcgcacgacgcgttcggcgcgggccacagctcgacgagcatctcggcggcgctcgggatggcggtggcgagggacctcctcgggaagaagaaccacgtcatctcggtgatcggcgacggcgccatgaccgccggccaggcgtacgaggcgatgaacaactcgggctacctcgactccaacatgatcgtggtgctcaacgacaacaagcaggtgtccctcccgacggcgacgctcgacggccccgccacgcccgtcggcgcgctgagcaaggcgctgacgaagctccagtcgagcaccaagctccgccgcctccgcgaggcggcgaagacggtgacgaagcagatcggcgggcaggcgcacgaggtggcggcgaaggtggacgagtacgcgcgcggcatggtgagcgcgtcgggctcgacgctgttcgaggagctcgggctctactacatcggccccgtcgacggccacagcgtcgacgacctcgtcgccatcttcaacaaggtgaagtcgatgccggcgccggggccggtgctcgtccacatcgtgacggagaaggggaagggctacccgccggcggaggccgccgccgaccggatgcacggcgtggtcaagttcgacccgacgacggggaggcagttcaagtccaagtgttcgacgttgtcctacacccagtacttcgccgaggcgctgatccgggaggccgaggccgacgacaaggtggtcggcatccacgccgccatgggcggcggcacggggctcaactacttccacaagaggttcccggagcggtgcttcgacgtggggatcgcggagcagcacgccgtgacgttcgccgcggggctcgccgccgaggggctcaagccgttctgcgccatctactcgtcgttcctgcagcgagggtacgaccaggtggtgcacgacgtcgacctgcagcggctgccggtgaggttcgccatggacagggcggggctcgtcggcgccgacgggcccacgcactgcggcgcgttcgacgtcgcctacatggcgtgcctgccgaacatggtcgtcatggcgcccgccgacgaggccgagctcatgcacatggtcgccaccgccgcagccatcgacgaccgccctagctgcttccgcttcccccgcggcaatggcattggcgccgtcctcccccccaaccacaagggcacacctctcgaggtcgggaaggggagggtgctcgtaggagggaacagggtggcgctactagggtacggcacgatggtgcaggcatgcatgaaggcggcagaggcgctgaaggagcacggcatctacgtcaccgtcgccgacgcgcgtttctgcaagccgctcgacacagggcttatccgggagctcgctgccgagcacgaggtcctcgtcactgtggaggagggctccatcggagggttcggttctcacgtcgcccactacctcagcctcagcggcctcctcgatggccccctcaagttgaggtccatgttcttgccagacaggtacatagaccatggtgcaccagtagaccagcttgaggaggcaggattgacaccaaggcacattgctgccactgtgctgtccttgcttgggaggccattggaggcacttcagctcagctgaataattcagcatgactgtatgcatatacacatcagccgacaaataaacaggaaactgatgatagctaatttatgagagatatggagatcttctccttctccattatccttggcctaattaaccatggccacatggatatggagggggggaggttccagtaagaagtagggttactaggaagaagatgaaggagaaggcaacaaaaagcccatgtgtatgtgtttcttggcctgttgcaaaacatgcttccaaatgcaaaatgataatggaggtgtttgtgtacaagaggatggagacatgaagatggggcatgcatgtccttgcatgatagtattgacatgagaaggagaaggatatgcctctcatctggcattgtcaggagtgacatatatgaatgcatggctccttatgttcttttgttactttgtatagataacaagtataagaaagaatcatgtattctagtagtactacatacatacaaactcagttccctatgcagaaggaaaatggagaataagatggaaagtttttcttgtt

SEQ ID NO: 25468 - DNA, 2313 bp, Oryza sativa
  ref <308>: DATABASE ACCESSION NUMBER: AK100910
  ref <309>: DATABASE ENTRY DATE: 2002-08-28
cccccccacatggggcgggcgaaacgccaaacgaaacgaggcgctgccctgccaccttcgcctcacgaacgccagcctcgctgtttcccctccctctcgcaccgctcgttcccgtttgccttctttctctcctcccccccgttcagcttcccgttcaggttcaggcaatcacgcctcctctcctctcctctcctctccttcttcactccactccaacgccccacgccctcccccgctttataagggggagctccacatcaccacccttcccacaccatcgcggcagccaccgcatctttcctcctctttccctggagccatttcctcccctaaagggcctttccttttcttgatctctcttctatcttcgatccatccatccatccggccatccttcctaggtgaatttcaacgatgcagttcagcagtgtgtttcccttagagggtaaagcatgcgtgagcccaataaggagaggtggtgagggctcagctagtgatagattgaagatcggggacagtagcagcatcaagcatgatagagcagtgaggaggatgtgtcttggttataggggcaccaaaaacggtgcacaatgtgtgctcacctcagatgctggcccagacactcttcatgtccgaacatcattccggaggaactttgcggatccaaatgaggttgctgctgttatattgggtggtggcaccgggactcaactttttcctctcacaagcacaagggccacgcctgctgttcctattggaggatgctataggcttatcgatatccccatgagcaactgtttcaacagtggcataaacaagatattcataatgactcaattcaactcagcatctcttaatcgtcacattcatcgtacgtaccttggtggtggaatcaactttactgatggatctgttgaggtattagccgctacacaaatgcctggggaggctgctggttggttccagggtacagcagatgcagttagaaaatttatctgggttcttgaggactattacaagcataaagctatagaacacattttaatcttgtcaggagatcagctttatcgtatggactacatggagcttgtgcagaaacatgttgatgacaatgctgacattactttatcatgtgctcctgttggagagagtcgagcatctgactatggactagtgaagttcgacagttcaggccgtgtaattcaattttctgaaaaacccaagggcactgacttggaagcaatgaaagtggataccagctttctcaattttgccatagacgacccgactaaatttccctacattgcttcgatgggagtttatgtcttcaaaagagatgttcttttaaaccttctaaagtcaagatatgcagaactacatgactttgggtctgaaatcctcccaagagctttacatgagcacaatgtacaggcatatgtcttcgctgactactgggaagacattggaacgatcagatcgttctttgatgcaaacatggccctttgcgagcagcctcccaagtttgagttttatgatccaaaaactcccttcttcacttcacctcgatatttgccgccaacaaagtcagataaatgcaggattaaagatgcgataatttcccatggctgtttcttgcgtgaatgtaccatcgagcattcgatagttggagtccgctcacgccttaactctgcatgtgagctcaagaataccatgatgatgggtgcggatttgtacgaaactgaagatgaaatttcaagactactgtcagaaggcaaggtccccattggtgtaggggaaaacacaaagataaacaactgcatcatcgacatgaacgcgagggttggaaggaacgtggtcatcacaaacagcgagggtgtccaagaaagtgatcggcctgaggaagggtactacataaggtcgggaatcgtggtgatcctgaagaacgcgaccatcaaggacgggaaggtcatataggagagctcgctgatgccacagatctctgaaccctgaacctgcaaatgcagtgcagtgcgtcttttcttgaggggttaggacatgcaagctcgttgattccacatggcagagaactcgagggaagatcccaggaagacggatgatcgagaaagattgtgtagtactagcagttcttcgctcgttaaaatgtgtgtactaaataactaataagctgccccgagtgaagtagcagcagcaactttttggagggtcgttggtgcatctcatgtgtaaataaactcaaaactggtaaaaaaatgtatccatcatgccattatctccattttctgtttcgctgct

SEQ ID NO: 25469 - DNA, 3881 bp, Oryza sativa
  ref <308>: DATABASE ACCESSION NUMBER: AK100911
  ref <309>: DATABASE ENTRY DATE: 2002-08-28
ttggccaaaaaaagattccgcgtagcggcgagaggggagggggcgcgcgtgcccagatctgcggggtctcgccggcggagatggcgtgcatcaagagcgcgcagagggcggcgctgacggcgctggcgccggaggcgccctacctcgccgccggcaccatgagcggcgccgtcgacatgctcttctccgcgtcggccaacatcgagatcttccgcctcgacttccagtccgactcgcccgacctccccctcctcgcctccgccccttcccccgaccgcttcaaccgcctctcctggtcccgccccggcgccgctgacggcgactccttctccctcggcctcctcgccggtggcctcagcgacggctccgtcgccgtgtggaatccgctgagcatgatcaactccgaggggaaagcggaggatgccttggttgcgaggctcgagaagcacaccgggccggtttgcggactggagtttagcgagctcacaccgaatcggctcgcctcaggggctgaacagggggagctttgcatctgggatctcaagaacccctccgagccagtcgtgtttccgccactcaagagtgttggctccagtgctcaagctgaaatatcttatttaacctggaacccgaagtttcagcatattctagcaaccgcttccagtaatgggatgacagttgtttgggatttaagaaaccaaaaaccgttgactagcttttcagattcaaacaggacgaaatgctctgttcttcaatggaaccctgacatgtccacccagctaattgttgcatcagatgatgataactctccatctttgagagtttgggatgtgaggaaaaccatttcaccagtaagagaatttgtgggacactcaaaaggtgtaattgctatgtcgtggtgcccctatgatagttcatacttgcttacctgttctaaagataatagaacaatatgctgggatactgttagtggagagattatgagtgagctaccagcaagctcaaacggtaacttcgacattcactggtatcgaaaaataccaggtgttgttgcagcatcctcatttgatgtgaaaatcggcatatacaacttagagttctctggcctttatgcagctggtgatagtgctattggtgccccagcacgcccaagagctccagctccaaaatggttgaaatgccccactggcgcatctttcggctttgggggcaaacttgtttctttccaccaagcagcgcccacccaaggtgcacaagtgactacttcagaggtgcatgtacataatttggtgattgagcaaagtctggtaagccggtcgactgaatttgaagctgctatacagaatggggacaaaagttcactgcgtgctctgtgcgataaaaaagcacaagaatctctatctgatgaggagagagaaacatggggcttcctaagggtaatgtttgaggatggggatgctgccaggacaaagctgcttgctcatcttggctttaaccctcctcaagaacagacttctagttcaacagatgaactgaacagaacattggcagatactcttaaccttgatcatggcgcgccaactgatacatcagattctcaatttatggttgataatggggaagattttttcaacaatcctcaaccttcggaggctagtttggcagaagaatcaatttctacaaatggtcaacagatcgagcaggaaatgcctgtaaatgttgaaccatcagatctatcagttgacaaaagtattcaacatgcactggtagttggtgtttataaaggagcagtcaatctgtgccttgctgccaatcgaatggctgatgctctggttattgcccatgctggtggttctgctctatgggaaagcacaagaaaccagtatcttaagaatactgtatcaccctatctaaaggttgtttctgctatggttggcaatgatttgatgagttttgtgagtacatggccattgaatgcttggaaggaaacacttgcgctactgtgcacatttgccaggaaagaggaatggaatgttctatgcgatacccttgcatctagactgttgggagttggagatacactagctgcgactctctgttatatttgtgctggaaatatcgacaaagctgtggaaatatggtctcgcgacttgaagtctgaagatggtgggaagacttatgttgatcttctccaggatttgatggagaagaccattactcttgcccttgctacagggcataagagctttagcgcgtcactgtctaagcttgtggaaaactatgcagaacttttggccagtcaaggccttcttaaaactgcaatggaatacttaaaattgttgggatcagatgaacattcacacgagctggcaatattgagagaccggattgcattttctacagaagagaatcatgctgccagtacttcagttcatgcgggcagtattaacagttccgcgtaccctacaattcaaccgagctatagcaccccagacccttctcagaacctttaccaggggacttcacaatatgctgtgccaagtaaccagtatcaagattaccagcaacaatctaatacagcatatggaacatacaacagtacatattctcaacaaccaacccagatgtttgttccatcaaacaccactccagtgatctcccagccaaatgcaactccagcaccagttccacaacaaccagtgaaggcatttactcctaccaacttgccaggtctaaaaaatcctgagcaataccagcaaccaactttgggctcccagctttatgcgggtgctaatccaccatatacttctggacaatcgactccatatcaaggtgtacctcccaccacataccatcagcctagaccacctacacaattccaaacagttcccacagcacctccagctgtttctagtgccactgtaccaggaacgaccccaagtcagatgttccctggtccagttgctaataacccgacttccaggtttatgccatcaaacaatccaggttttgttcaaaggccaggtttgagtcctgtacagccctcaagtccaacacaggcacaaggacaaccgcagcctgttgttgcacctcctgcacctcccgcaactgtgcagacagctgacacatcgaaggtgtctgctgagctgaaaccagttattgctacattgactagactatttgatgaaacatctaaagctatgggtggatcacaagttaaaaaacgtgaaatcgaagacaactcaagaaagatcggaacactatttgcaaaactcaattctggggatatatctccaaacgtttcatcaaaactcattcagctttgcagtgcacttgatagcggtgattttgccactgcgatgcaccttcaggtacttctgacaacgagcgactgggacgagtgcaacttctggcttgccgcattgaagcgtatgatcaagacgaggcagaatttcagaatgtaaacgagtgccgcgttttgcagctagttctgtatacacacaccttttcgacttcttacaaaagttgttagtgttagcaacttatgagggtttgtctgcacagtagtgctatcttgcttcttgtgttccctcctgccaattatactgaagcttgtcgcttaaaagtggtctgttgtctgggcgattactttttgatagttcttcgacattcctttgtgaggatcagttcttgggtgatggtggttggatttcacgaggattacttgtaagtgggcatctagttgttatagctggcccattttgttttaccttataagttagattttacctgtttggacattggaagtactctcgataattaatacaaggatattggcttgtttattgcattggcatgaatagaaataaatcatctccacc

SEQ ID NO: 25470 - DNA, 2250 bp, Oryza sativa
  ref <308>: DATABASE ACCESSION NUMBER: AK100912
  ref <309>: DATABASE ENTRY DATE: 2002-08-28
ggtccgtacccaaaattgccaaaatcaccctccaattcctttcccctcctccctcccctctgccgccatggccgcctcctcctcctcctccccccttgacccacaccaccaatcgccccaaatccatgagactccccgcgccacaatccagccctgccgcacgaggatgtcccagtccgacgttgtctacagctgcggatcttgtggataccctctgaacctttcatcttctaaccgaagcacatctgacgtaggatcctcataccaaaagtctgtgaagaaaggtctgatttcattcattactgttgatctgagccgatttactcaggtagacgagatatcttgctttcccctcacctggcgtagctatcggccaaaaactaagcttctctgccgaaagtgtggggcatctattggctatgggtatggtgaaccagctgttctgtgcagctttgatccagccagttcatcatctagtacatcccaaaagtatttaataaaaatccaggctctccagccttcggatagtactcagtagtctgtcaacttcagccaaaatttggaaagagaggaaatggatgacaacgtggaaaactatatcaatttcctatcagatgattgcttgatttgtatatttaacaagcttgaaagtgaatcggacaggaatgcttttggcttaacttgtaagaattggtttaaggttcgaaacattgcccggaaatcaataattttccattgttcttttaaccctaaagtatataaggagcacgccaattgcctttcaaagttattggcccgctcaccttatcttaacttggtctccctcgctgggcttacagaactacctgacacggctttaaatcagctgagaatttctggagcatcattgcagtccctttctttctactgctgctctggtattacggatgatggtttagaggtggtctcaatcggatgccctaatttggtgagtcttgaactctaccgctgctttaatattacagatcatggtttggaaaatctttgcaagggctgccatgctttgaagagtcttaacctgggttactgtgtagccatttcagatcaagggattgctgcaatctttaggaattgcccgaatatttccacaattatcatagcatattgcagaggtttatccggtgttggattcagaggttgtccaggtacactttctcatctagaagctgagtcgtgcatgctttctccagatggtttgttggatgtagtgagtggtggtggactggagtatctaaatttgtacaatttgaaaagcccaactggacttgatggcctggacagagttggttatgcgagaagtcttcggtttttaaacctcaggatgtgccgttaccttaccgatgattctgtgacggcaatagctagcgggtgtccattgattgaggaatggagcctcgctgtctgccatggagttcgcttgcctggatggtctgcgattggattgctctgcaacaagctgagaatcttgcatgttaaccgttgccgaaacatttgtgaccaaggtttgcaggctctaggggatggctgtgtatgccttcaagttctgcatatccatggatgtggcaagatcactaataatggtctggcatcatttagcattgctaggccccaatgtgaaacaaagggctgatgaagtcatgtgcattggcccctccattgaggatttattccgattgcaatgatcagaaactcagaaagtttcagctaaagtttggggttgacaagattcaagccattgccaccagcattgtcattacaagtcacaagatatttggttctgtaaccattatgcccttctaatttgctcaaaagtgcatacttatttattataaacaggaccacaaatatacaaatggattgcgaggagtcaagtccatttgttcctgtggttatttgcaagttctgagtttattgggtgatacagaaaatggttgtagaaggttgtttttcgtacaatttgatagctagtttaaacttgtaaattgacatgttttaaaaccatcgaaaattgaattggatgggttggttgtactacagcggttgaaccggtgtttaaactttccgatggattgtattaggttaactcgagaagttcaactatcagaatgccaccatagctgaaaacaatttttaagttttgatgaaatgtaaacaaagaaaatcctgaacttgttgaccaatcgaagttgttgacgaatgatttagcaaacg

SEQ ID NO: 25471 - DNA, 3088 bp, Oryza sativa
  ref <308>: DATABASE ACCESSION NUMBER: AK100913
  ref <309>: DATABASE ENTRY DATE: 2002-08-28
tactatctacgccaccacgctttccccgcgcgatgactccgccgccgcgcctcctcgctccaggccgtcatcgtcatcgtgcggtcccgaccccttccgcatccccccatcctgcctcctccaccgcgtcgtcgtcgcgtggtcccggccggctgtccaccccgccgtcccagaggcgacatcaaggaagaagatggcaaccctccctccgccacgctagctctccaatcccccttctcagtcgagccccgcatcgtcaccttcccccgccgatgccaccacatcgaggcacctcgcgcatggagctcggtcacatcgtcacctccgccacatcaccatcgcagcgttcactctttccccgaagccggacgcaatggccggtccctcgctaaggcacccagcagatccggtaagaggatctggactcttctgccaacgaggccactgtctgaaccaccatcgtagggtattttttccgttgcctgacaccttgcttttgcttactaattggatctgaatgcaccacatatcttcccctccagaaattattttttccggatgaaattgatagaataccaatggctattgcaacaagcatgtagtcatgggggatgatctagacgtgaggactggcaagccatctcttgatatatttcttgctgagatgaggaggttcgaggtattgccatgtaagtgctcttgcctataatgttctttagactataaacacaatattatattttacctgacacaagtgcattgcatgttgttcgggtcaatttggaaccagtaattgatttgtatttcaagctccgtctgctgtagcagcagttaaaaaatgctggaacgtgactttgctcctcctcctcgctcctgtgtactgccgccgcgctgctgcatcctagttctctgtccgccgcggagtcgaggtcccctttcgccgccatcgccgctgccgctgcccacaccgacctcttctcctgccgccgccggccccatccgccgcggtcggcaccgagggcggccccttccaccgctgccgccaccaccatcaccgcggtgcactccaccgctggcgagccgatgtcctccccattcgccgccgacgaagccgaggtcgtccctagccgccgccactgccgccgccgaactccaccgctgccacaggttactgccatactatactgaaaaactgaaaaagcatcacaaattttctccagtggttgaattatctccaggcaatgtagttgaatgtctctggttaacctaactgtcacaggttacatttttacattttgtgacttcctgaaaatgtctgccaaacaaccgcatgttacattttgtgaatttttcgatgacttcgaatgtatttcaatagttataaaaatttttaatcgaggatatatatataaaagaatgaatgttcatcgaattagagttgatgacttgacaaggttgacttaagtttaacacatccatgtatagatcattctgcttgccactttggattgatgtcgtctgcactttatacgacctttggaacgatagtatgcttgggagaccagggaatggtactcatctctgtactgaaacaatttctgtgactggttttcattctgtttggaccatacacaaccttttcagtttaagtggaaagtaaatcaattattgtgtcaatcttctggtcacctgtgtatatcttgaggtttatacatattataaggtcacatgtttatgtcttgagatttatatatatttaggccaatgtgtacatcttcagatttggagtgaataaaactttgcaatatccatgtatatgcctctcatcaaataaagctatttgttttgtaagttactgaatactgatggcacaattttaatttttacttggcaggagctctgcaaagcatttccatttctcagtgtttcttgtttaccactttgccactatataattttcaagtttcagaagcttcttgagatattattgtgaggtaataatatgttgctcatgctagcagctgagaactctgccatctgaattaaaatttggtacatctccatctaatcccatgataaatagtgataacctatttctgaaatatttagatcccacgcttttttaatctcaaattatgaaaccctgtatatatacattcaagacaatttcctgtccaagactatgctgctacatgatgaaagaagaaaggttgataggtctatgtctagcttcttttggttattcaactaagatattaggcaatagtcttatcttatttttgatacaacaataagtgacttcatgttcacatttttttacactgaaattgattgtgcaacctagatttctttgcagttttaccggcttgttcatacgatggagaggatagtgtaagttcagacccaccaaatgcgtcttttcctacctccacccccaagacaagttttgtattatctcttcgagcctttctgttgtagcaagctgattctgattctcggtgagttcatagatatcgaggcattcattgagtatgtttccttttgcttccgttttggttcaatcaattcatacaattggtgcttcggtatactgctactcatttggcacccttgtggacataaatttgcttcctggttccacattcttcacaaacatatgcacacaagttgtttgtacaatgcttggcaagatgaatctttgtgattatagtgtatttgctatttgtgttatcaactaactgttggcagaatcgctggtaactgtattgccatggccctgctcaccagtaactgtattgccattcaggttttagcccttggcatcttccaagccattttgctttcacatattcagaattgactgaaattcatttatcgttacaactaatgtcggtgatcagttttcctggaaaatatttgttgaaaatatatgtaacagcacccaaatgtattagggtgtggaaaatgcttcaaactaaggctattcagacccatattcacctatttacagtgagcattagggtcattttatagaaaacgttgtcgaggagatctagaagttattataagttaggtctgctgcttcatt

SEQ ID NO: 25472 - DNA, 3746 bp, Oryza sativa
  ref <308>: DATABASE ACCESSION NUMBER: AK100914
  ref <309>: DATABASE ENTRY DATE: 2002-08-28
gatttcctcctcctcccccacgcggcgcaccagctatcgccgccgccgccgacgaggagggtgcgatggaggcgagcgcggggctggtggcggggtcgcacaaccggaacgagctggtggtgatccggagggatggaggaggagggggaggggttggggggaggagggcggcggaggcgaaggcggcgtgccagatatgcggcgacgacgtcggggaagggcccgacggggagccgttcgtggcgtgcaacgagtgcgccttccccgtctgccgcaactgctacgactacgagcgccgcgagggctcgcaggcttgcccccagtgcaagacccgcttcaagcgcctcaaggggtgcccgcgggtggccggagacgaggaggaggacggcgtggacgacctggagggggagttcggcctcgacggccgggaggacgacccgcagtacatcgccgagtcgatgctgcgcgcgaacatgagctacggccgcggcggcgacctgcagccgttccagcccatccccaatgtgccgctcctcaccaatggccagatggttgacgacatcccgccggagcagcacgcgctggtgccatcctacatggggggcggcggcggcggcgggaagaggatccacccgctccccttcgcagatccgagcgttcctgtgcaaccgagatccatggacccgtccaaggatctcgccgcctacgggtacgggagtgtggcatggaaggagaggatggagggctggaagcagaagcaggagcggatgcagcagctcaggagtgagggcggcggcgactgggatggcgacggcgatgcagatctgccactaatggatgaagctcgacaaccactatctcgcaaagttccaatttcttcaagccgaattaatccctataggatgattataattatccggttggtggttttggggttcttcttccactaccgagtgatgcatcctgtgaatgatgcatttgctttgtggctcatctctgtaatatgtgaaatctggtttgctatgtcttggattcttgatcaatttccaaagtggcttcccatagagagggagacgtacctggaccgcttgtcactgaggtttgacaaggaaggtcagccatctcaacttgctccagtcgacttctttgtcagtacagttgatccatcgaaggaacctcccttagtcacagcaaacaccgtcctttccatcctttctgtggattacccagttgaaaaggtttcctgctatgtttctgatgatggtgctgcaatgctcacatttgaagcactgtcagaagcatctgaatttgcaaagaaatgggtccctttctgcaaaaagttcaatatcgagcctcgtgctccagagtggtacttccagcagaagatagactacctgaaagataaggtagcagcgtcctttgttagggagaggagagcaatgaagagagattatgaggaattcaaggtgaggatcaacgccttggttgccaaagcccaaaaggttccagaggaaggatggacaatgcaggacggaagcccttggccaggcaacaatgtgcgcgatcatcctggaatgattcaggtcttccttggccaaagtggtggccgtgatgtggaaggaaatgagcttcctcgcttggtttatgtctcaagagaaaagaggccaggctataatcatcataagaaggctggtgctatgaatgcattggtccgcgtctctgctgttctttcgaatgctccatacctattgaacttggattgtgatcactacatcaacaatagcaaggccataagggaagcgatgtgtttcatgatggatcctttggtggggaagaaagtgtgctatgtgcagttccctcagaggtttgatggtattgaccgacatgatcgatatgctaaccggaacgttgtctttttcgatatcaacatgaaaggtctggatggaattcaaggccccatctatgttggtactggatgtgtcttcagacggcaagctctctatggttatgatgcgccaaaaacaaagaagcccccatccagaacttgcaattgctggcctaaatggtgctgctgctgctgttgtggtaacaggcatactaagaagaagacaacaaaacctaagccggagaaaaagaaaagactgtttttcaagaaagcagaaaatcagtctcctgcatatgctcttggtgaaattgaggaaggtgctccaggagctgagacagacaaagctggaattgtgaatcaacagaagctagaaaagaaatttgggcagtcttctgtttttgttgcatcaactttgcttgaaaatggtggaaccctgaagagtgcaagtccagcttctctactgaaggaagctatacatgttattagctgtggttacgaagacaagacagactgggggaaggagattggctggatctatggttcaattacagaagatatcttgactgggtttaagatgcactgccatggttggcggtctatttactgcattccaaagcggccagcattcaaaggttctgcacctcttaatctttcggatcgtcttcaccaggtccttcgttgggctcttggatctgttgaaattttcttcagcaaacattgcccactttggtatgggtatggtggtggcctgaaatttttggaaagattttcttatattaactctatcgtatatccctggacatccattccacttctggcttactgtaccttgcctgccatatgcttgctcactgggaagtttatcactccagagctcaccaatgttgctagtctatggttcatgtcgcttttcatctgtatttttgtcactggcatccttgaaatgagatggagtggtgtggccatcgatgactggtggaggaatgagcagttttgggtcattggaggtgtttcttcacatctcttcgctgtattccaaggacttctgaaagtccttgctggtgttgataccagcttcactgtgacatcaaaggccggagatgatgaagagttctcagagctatacacgttcaaatggaccaccttgttgatacctccaactacactgctgctgttgaacttcattggggttgtagctggagtttctaatgctatcaacaatggatatgaatcatggggacctctgttcgggaagctcttctttgcattctgggtgattgtccatctatatccgttcctcaagggtttggttggaaggcaaaacaggacaccaacgattgttatcgtctggtccattctactggcttcaatcttctcacttctatgggtccggatcgatcctttccttgcgaagaataatggccctcttctggaggaatgtggtctggattgtaactaagcagcctacactccatatatgcggcgatacgagcttgaagaaattattttgcaggcggcgaatcaagcccaagtttttaaattctttcctgtagatagaaatacagatctccggcatttcttttgttccacagtggtagggcagcttcatctgtgtgtattagggcaaaccagaagctatgtcaattcttgtgcagtgctaccagagaagtcaaatctactcctgtggttgatccaagattatttatttatttggaggggatttccatcatcgctgagcttacttggtggaagctgcagcatgtgtaagctaggttacaaaggcgttgccttgccatttggacagaaggaaggaagatgccaattgtttattttagtaaattaaaattgaattgaattatgc

SEQ ID NO: 25473 - DNA, 773 bp, Oryza sativa
  ref <308>: DATABASE ACCESSION NUMBER: AK100915
  ref <309>: DATABASE ENTRY DATE: 2002-08-28
gatcaaacacaaatagggttagcgagaatcggcggcggcggcggcggcggcgagagcggagagagacaggagggggcaaccgcggcggcggcggcgggggggcgcggagatgacggggaaggcgaagccgaagaagcacacggcgaaggagatcgcggcgaagatcgacgcggcgacgacgaacaggggcggcgggaaggccgggcagaaggaccggctggggcaggacaagggcggccacgccaagctcgagtgccctctctgcaagaccaccgcccccgacatcaagtccatgcagatccaccacgaggcgcgccaccccaagctccccttcgagcccgacaagctcaacaacctccacggcggcggcgccggcgccgccgccgccgccggtgaggccgccgcctcctcctccaagcccaagcccggcgtccgcggcagcctcaagaagtaaccgcaatcgaatccatcatcacccgaatctgctactactaccgcccgccgccgctcgctccggtgtgcttacttgctgctgcttgctgttttgaattattactactgtgtcatgatgtgccgtgtgatagatgcgttgattcgcgcacatatacatatgtgaccgtgttccgtcgcgtcttcgtcggcatgttttagctatgatgtttagtttatgtgtcactactctatgatgctgtcaatggtgtcagtggatgataatgtttatgtctgtcactgctcaaacaattgctaaatctgagtaaagaaaaaggtgatgg

SEQ ID NO: 25474 - DNA, 2376 bp, Oryza sativa
  ref <308>: DATABASE ACCESSION NUMBER: AK100916
  ref <309>: DATABASE ENTRY DATE: 2002-08-28
gacccatctgctgcagctgcgcacctttaatttgcagaaagaaagaaagaaagaaagaaaggaaagcaaggcccccccgagcgcaacagctagcccaacacacctcctccatcaccaccgagaaggcaacgcatatcaaaagcgcgggcgcaaagcaaagataacatcagatcaggtcggcgccccccgctcccggctgccgcaaagcccacccgatcgatcgatcgacgcctcgttctcctcctcctccgaggctactctctgcagggcgctcgcttacgtctgcctctgcgtacgtgcaccgcccagcgcgggcgccatgtcgtccgccgcggggggaggaggagggtacgggggcggaggcggcgagcatcagcatcagcagcagcagcaccacctgctgcttgggcaggcggcggggcagctgtaccacgtgccgcagcacagccggcgggagaagctgcggttcccgcccgaccacccggcggagtcgccgccgccgccgccgcccgggtcgtggccgctgcccccggcgttctactcctacgcgtcgtcctcgtcatcgtactcgccgcacagcccgacgctggcgcacgcgcagttggtggcgcatgggatgccgccgggggccgcgacgagcggaggggcccagatcccgagccagaacttcgcgctgtcgctgtcgtcggcgtcctcgaaccctccgcccacgccgaggaggcagtttggcggcggcggcggcggcggcggggccgccgggccgtacgggcccttcacgggctacgccgccgtgctcgggcggtccaggttcttgggccccgcgcagaagctgctcgaggagatctgcgacgtcggcggccgccccgcgcagcttgacaggggctccgacgagggtttgctcgacgtagacgccatggacgccgcgggaagcgtcgaccacgagatggacggcagcgatcgcgccgtcgcggacgcggtcacggtctccggcgccgagcagcagtggaggaagactaggctcatctcgcttatggaagacgtttgcaagcgatacaggcaatactaccagcaactccaagctgtagtatcgtcctttgagactgttgcgggtctgagcaatgctgctccttttgcttccatggctcttaggacaatgtcgaagcatttcaagtatttgaagggcattatactgaaccagctgcgcaatacgggcaagggtgctacaaaagatggtctcggcaaggaagacacaacaaactttgggcttatgggcggcggcgctggcctactaaggggaaacaatgtgaattcgtttagccaacctcacaacatatggcgcccgcaaagagggctaccagagcgtgctgtttcggttcttcgtgcatggctattcgaacacttcctgcacccgtatccaactgacagcgataagcagatgcttgctaaacagacaggattaactaggaaccaggtatcgaactggtttatcaatgcaagggttaggctctggaagccaatggttgaagaaattcacaacctcgagatgaggcagctgcagaagaatccgtctcttgacaagaatcagctctccatgcagcacacccaacattcgtcggacagcagcgggaagccctgtgatccatcaaactcgctgcaagggcaaagtagcagcatgaccaggaatcacagcatctccgcctcccggcacatcgaggacggcctctcccagatgccccatgacatctccggtcaggtgagcttcgcatacaacgggctcgccgcgcatcacagcatcgcgatggcgcaccaccaccaacctgacctcattggcaccggtggtgccgcgaatgctggcggtgtctcactcacccttggccttcaccagaacaataaccgagcttacattgctgagccccttccggccgcgcttccgctcaatcttgcccatcgtttcggactggaggacgttagtgatgcctacgtgatgagctcatttggtggtcaggaccggcatttcaccaaggagatcggtggccatttgctccatgactttgttggttgaagagcagatatgattgtttcaccaaggagatcggtggtgattattgtaggatgcagatgtatgatctacctatattgtagttggaagtaggaggtgaagaaaagaggggcattggcacgcctgtcgtagatccacgaatgcttgtcgatatttgacattgtggggctatagagagcatatgactatacctttgaagacctgtttgtagtgttgttccctatttgttctgatccgcggttaagccgtgttaaccctgtactattcatctgacttgcaaatgtggttgctcccactctggcaaataaagggtgccc

SEQ ID NO: 25475 - DNA, 5035 bp, Oryza sativa
  ref <308>: DATABASE ACCESSION NUMBER: AK100917
  ref <309>: DATABASE ENTRY DATE: 2002-08-28
ggcgcatttcgccgaacaccgtggctaccgccggcgccggcgccgcatccgacgaccccccaagttgggattcttcctccaaatggctccagtgcaacggctactacgcaccgacctccgcgcgcgtctgccgccgcgactgcttcggctttttgttcctcactaccgccgccgccgagaggaagtcactacaacaatgttcgatcgtgaggagaaatgtctggtttaggatctcttgactatcatcgaatcaggaaggtttgtactgatttcgcatcatgtacttctttcttcaccaagcacgtatccatcgttcatatgtagtgaatgcctctctagtctctactgactgtttgtggtacatgggctatcgggcttacacttcaaactagtataatttacacaccagattttcatataaagatctgacgtgccaaagtggacaacacatggtccttcttgttatactatgtgttaaatttcatcattgttggcatctggaataatacttttttttagataagggtaatttttacccggcctctatatccaaccaaatatatgcatcatttttaaattgagaacttagctctcaaataacccaattcggcaataatactggagacggatccttacaattcagcaactgtctacggttaggctgactgaatcctgccatgtactgtgtgttacagtgatgcatattctatctgctgttttccacaccttcttttccagtgagtgttcagggatcaattcctggacatggtacaccgtacagtagcagggtataagccagagccccaggaactgaaagtgcgcagagcatgattctcgcagaaaagaaacaaccatatcttgttgatttgtagcagattgagttctgcagaaagcgcaaggcttcttgcttggaagcacggcaaaggttcttcctttgacagtggtaacaatgcccaaacataaggtgacaaaatcattcagtgagcagagggctacagcagtacaggtcagcctttccagtgctgtgtagtgttacatattctctgttctgtcatcatcaagtattgctcagtgctcactactcactactaggctatatttttgctcctatttcttgatcaggatggagtgatcgttttgtttctagaatcatcggaaccaagtgattagtcaaaaaattgttcccggatatagtatgcttgaactgaggggctgttcagattgatgccatttcaaaccatacaatttttggtaaagttgtcaaagatatgcatacatttagtttttttaatcaaactatggtaaatacataagaaatcctgccaaaattttggtaatattgccagcattttattttggctacaatctgaacatccccttaatattgcctcttcccattcagttcctgtcggtaataacaaatctgcacattgataaacagttctccagtaaggaaggctggaagaaaataggaatgaacatggtatgatttccattattacttgaatcagccaaacagcacatgccattgtacagtaaatatctgataaatagttagctcacacaatgccctcgctcactcaaaccatatacatcaagataaatagaaactcgagcctcagtgatacagaatcatgaactgtagcaaagctatatacactctcagaaccagaacagcacacttgcaaacaaagccatgaaattcgctcccctacgtaagttttggtgacccttccaattttggtggggtcatgaggctttttgtcagccatatcgccgtctctctggacgacacagcaccttccccaaacggtctgagaacgccagcaagctcctcaagcctctcctgcttcagcagcttggcgcaaagctcgagtagcgactccagtgcgtcagctctctgctgcactatgttcagatggtcccactcggcaggagtgctatctgaatgtgccaatttcaccgcgctcttcggtgatgattcttctgtaacgatgggaacgtctcctgtgcctggttttgatccttggtgagtgtgtgctttcacttcctttctctgctcttgcactactccaatggtcagttcctcctttggtattggtgcctcattaggcttctgaattgcaccagagactggcacgacatctactgtgctgctggttcttacagctttaagaaagatggcctcatcaatctgtcgatcggttattgtcatcaaattttcctctatctgttgaaaaagcgtcaaatcatcgatgttttgatatgctttgtttctagcttgaggatccacagatacttgtgaaatgcaggcgtcctgggtaccaactgttgaaacatctgaaatatatgtggagttgtctcttgtatccacagcttgctctgcagcggtttctaatgcttcactggatccattggttttgatgattcgctttctgccactgcctggttttcttgactgctgcttgtctcccaggttacttttggtgggcttcactggaaggtagattggggagcagctgcatgattcagctagataaggctgcaaatatgggtgcctcaatagttctccagcctgtaaatttttcagtttaactttgaatgtgaagtgttctgtcggtgcctttgattgaaacagtgaaactgagtttgtggtacttacagtgggtctatgttctgggtttttccttagcatgctcttcactatctgcttcctgcccaaacaaagcatcatgtttagcataaattctgatatatattatgggaaaatcattaaaaagttaataatattggcactcacagtgatgatgaatatatcggtggcattggagatattgaagatctgtttattttgttaattaatgatgccatgtccttaaaaaacaagaggggatatttcatgaaccatgttatacgtaaacagtaatttatcgtttgaattgtgtagtaggacttactgcagctttgaatgcagggcggtgtgctaagatctcaaacatacagcatcctgatggtaaaagatgggaaaggattagcatcataacagaaaccgtgaaaattactccaaaagctgttgtactgggaactcaccaagtgaccatatatcagatttgtaaccataagggacaatgttcatttaccttgaggtcacggtggagcacacggttgcagtgcagatagtcaagggccaagagcaattgtgtgaaccatcggcacaccctctttgatcatacaagtaccaaatcagcgagaaaaggacaccccttgccttcttgatcctctctgccctgtgattccgatgtcagtgactttggaggttggagcaccaatggaaggtaaaaattttaggaggcagtgaagagtgaaaaatgtgagaggttcttacatgtcacctccttcacagtaacttgtcacaatgcatgccgaggtcccctgcaaccatcatcgaagaagagaaaaaaggacaaaactttagaacccttgattcgaaggaatgcaaattactcccagaactgaattaatgcgtggaatttgtacttcatcaacccaaccgtccttgtactcgacgatgtacgggttgctgaggctcgccatcagggacatctgtgcagcaaacagcaagcaaagcatcaaaatcaaatcatcaaaccaaaccatctgtcccgtcgtcccaaacattcaatcagacgcaacagcaaacaactcatgggtgcaacatgtttgctcaagtgtggggaatgaacaagaactaacgagggtttcgatctggtttacctcctggtacgccgtgcgctggaacttgtcgttctgcttggacagccggatcttcttcatcacgtacctgcaccatcatcgagccaagaaagaacagaagcatcagggaagcctgaagaagacgaaggaagaagaggaaaggggagcagaggaaggaggagaacctcttgcgctcgcccttgtggacgacgaggtatgcggagccgtaggcgccccggccgatctgctccaccacctcgtactgctccatggctctggctctggctctggctctgctcccaggcctggaggactcaactgtccatgccgctacctctacctagaaacaaacagggtttgatttctcgtctggtagctggtggccatggctcgaggttatccaccgatgattatgcatgccctactcccactggtacgtgtttgttggtgagccaatcaaatcactcatgactaatcaaacaattcgacaaaccaccttgttgttatgcccttaattatccttccttcctcgttacaccaccacatctgcccaaataattctgccaaacagtactactagctagctaggtatggcttttgataggatttgggttaaaaagaatatcaaggaaatatttttttcctggaaaatttgattggagaagtacactacaagagtgagtgccgatatgatgccggatgtgacgctctatctttgcgttaaatctgttgccctatcgagcagggaattgggcgtacgtatgcttaattcgcttaattgtggctgtagtacgtggtgggaggtcagtgcttgggcgatggcaacgtgcttgacattttggcatttcggagagtaccatcacacgtatagttcttgccttctacgcttgcaagaaaagttgcagtattaggagtagtactgaactgtactgtggtacagtcactacgtttcagacttggaagtttctgttggtgtcgctgtcaaaaccgactgcgattttggcttctcgtcgcgtcgaggtcgtcagctacgagtcttgagtttcacatggagatcagatcagatcaacgacgactgaaattttccgtgtttctgtgaaccataaataattgagatttgatgctctagtacacatctgggctttatgctcagttacagtgcttattactgtaacacaatgtagtgctccgtaatgggtgctgatgacagtgataattaaaaaactagtcgtacggcatcatacatatagacatatagtactatagaagtactaatatttgc

SEQ ID NO: 25476 - DNA, 2959 bp, Oryza sativa
  ref <308>: DATABASE ACCESSION NUMBER: AK100918
  ref <309>: DATABASE ENTRY DATE: 2002-08-28
gaggggaaattcacctgccccattgtgaatagtcccgtcgtccccttcctcctcttcctcctccctctctcctttttcttcttcttcttctttcgaggagaggaaggaggcggccgcgcgcgcgcggaggcgggcaacctctcctcgactcctctcccccaccgtttcgtcgtccccgcgtgggaggaaggggaggaggcggagatggcgggggaggagcggccggagcggatcgtggtgtcggtgcggctgcggccggtgaacgcgcgcgaggcggagcgcggcgacggctccgactgggagtgcgccggcccgaccacgctcacgttccgcggcgccgtccccgagcgcgccatgttccccgcctcctacagctacgacagggtgttcagccatgagtgcggcacgaggcaggtgtacgacgaaggcgccaggcaggtcgccatgtcagtgctcagtggaatcaacgcgagcatattcgcgtacgggcagacgagcagcggcaagacctacaccatggttggcatcacggagtacagcatgtcggacatctacgactacatcgagaagcatcctgagagagagttcatcctgaagttctcggcaatggagatatacaacgaggctgtcagggacctcctgagctctgacgcaacgcctctcaggcttcttgatgatccagagaaaggaacagttgtagaaaaactcaccgaggagactctgcgagacaaaggccatcttctggagctccttgctgtgtgtgaagctcaaagacagattggggaaactgctatgaatgaagcaagctccagatctcatcaaatactcaggatgacggttgagagttcagctaagcagttcttggggaaaggaaactcgagcactcttattgcttgtgtgaattttgttgatttagcaggaagtgagcgtgcatctcagacggcatcggctggtatgaggctaaaggagggcagccatattaacagaagcctgcttactctaggaaaggtcattcgccaactcagcaaggggagaaatggccatatcccatacagagattcaaagctcacccggatactgcagtcatcactgggaggcaatgcaagaacagcaatcatctgcacgatgagcccggcacactgccacatcgagcagtcgaggaacactcttctgtttgctaactgcgcgaaagatgtcgtcaccaatgcacaggtcaacgtggttatgtcagacaaggcactggtgaagcatcttcagagagagatcgctaggttggagaacgagctgaagtttcctgcatcagcctcttgcacttctcatgcagagattctcagagaaaaggatgaactaattaagaatctggaagaacagttgaaggaactgatggagcaaaaggacaccgttcaatctcagcttgataatttccgcaaagttgcgagcgacggggatatcaacaatcacttagcaaggcgatggagtcggtcttcagactcgattccgcgcattgtgtcagaaggtgcattttcatcttcagatactcaagacattgactatcaagatcaaacaatggatgaactgtcagtacctcactcgtttccaccaagcagccaaatttctgacatcacagaggaacacgaagcacagagagtagctcatcgagctgaatctgagccccctgaggagcactgcaaggaagtgcagtgcatcgagacaaacaagctcaggagcaggagaagccaagaattcttccaaacacctgaaaagaagacacacactgatggtcaaaagcatagcgaaagcatgtcaaattcagcagaaaatgccatcaagctatatgcgtgtgattttgagccgtcatttgatctcgagaagcctgaaactgaagaatctcttgccctgaagaggtgtgtggttagctccagggacagtgcgcttactaggagtagaagctgcagagctagcttcatggtcattccgaacagctggttcgatgactcggcgagcacgacgccgtcgtccgaaaccttcagatattctaccagaaggccagagaaggtgaggaaaagcctgagtcctgatgagatcgcagacaagagcacgggcaacgctgaagaagacaagagcacctgcaatgctgaagaagagactgctgtgaatgacatcggctgcgtcacagaagtgaagcagaagacagaaatgaaccatgcaccccaatcttcagagcaacaccagccgaaaattgctaaagaagttgccacggtctccctttcgaaatggcacatcgatttcgagagaaagcagcaggagatcatcgagctgtggcatgactgcaacgtctcgatcgtacaccggacctacttcttcctcctcttcaagggcgatcagacggacagcatctacatggaggtagagcacaggcgactctccttcatcaagaactccctcatcgcagacggcgagctccacgctaccaccgcatcaagcttgaggaatcttcggcatgagagggacatgctgtacaggcagatggtgaggaagctgcacctggccgagaaggagaggctgtacggcaagtgggggatcgacatgagcaccaagcagaggaggctgcagctgtcgcggcggatctggacgcagaccgggatggatcacgtcagggagagcgccgccctcgtcgcgaagctggtcgagcacctggagaaggggcaggccatcagggagatgttcgggctgagcttcagtttcaagccacgcagatctttcagctgggtcggcgtctactcccgagactgaattcttgcccggccatggcgatgaactgatgatgatgtctcagtggtagatggatgcgtagtggaggagacgatgctgcatgtcaggaaggagaggagagagattttgccgccggaattgaactgatggattgccccgttctatctatgcatgtgaattgtgattc

SEQ ID NO: 25477 - DNA, 790 bp, Oryza sativa
  ref <308>: DATABASE ACCESSION NUMBER: AK100919
  ref <309>: DATABASE ENTRY DATE: 2002-08-28
ttgcagtgggcaccgaactcctggtttttggcaaggagattctttcccacattgttctgagttacagtattctgacaaactcgtggtcgcctggtgttgatatgaatgcccctagatgcttgtttggatcagctagctttggagagaaagcaattgtagctggtggcatggatgctcaaggtcgggtgctacgctctgctgagctgtacaactctgaaactaagagatggataacactcccatgcatgaacaaggctaggcgaatgtgttctggagtctttatgaacggcaaattttacgtaattgggggaatggccagtaacacggaggtgctgacctgcggagaagagtatgatttggagaaaggtacctggagggtgatagagaacatgtctgaggggctcaacggtgcaagtggtgcacctccccttgttgctgttgttgaaaatgagttatatgctgcacaatatgcaggaaagctagtaaggaaatataacataaaggataacacatggacaacactgggagagttaccagagcggccagaagctgtgaatggctggggtattgcattccgaggatgtggagagcggctcttggtgattggtggaccaagagtgatgggaggggggatgattgagctccattcatggatcccgagggaggggccgttgcggtggaacatgatcgggagcaagccttctggtaactttgtttataactgtgctgtcatggggtgctgatttgtgccaccctcttgccgaacatactgtgaacatgaaagattgtg

SEQ ID NO: 25478 - DNA, 2060 bp, Oryza sativa
  ref <308>: DATABASE ACCESSION NUMBER: AK100920
  ref <309>: DATABASE ENTRY DATE: 2002-08-28
gacagtccaccacccgtgaagctctggagtcgagcgtgaacttggtccactacgccatggcggccgcaccacagcaatccgtgcacccaagcttgccctcctcaacctcaaccctccgcctcctcatctcctcctccccacgacggcctcctccgccgccgccaagagcccgccggtataacaggctcgcggcgtcggcttcggcggcgcgggagatgccgtggccgcacgtgctgacggtggccggctccgactccggcggcggcgccggcatccaggccgacatcaaggcctgcgccgcgctgggagcctactgctcctccgtcgtcaccgccgtcactgcccagaacaccgccggcgtccaggggattcatgtggtgccagaggagttcatccgggagcagctcaactcggttctttcggacatgtcggtggatgtggtcaagacaggaatgctcccttcaatcggagtagtcagagttttatgtgaaagtctaaagaagtttccagtcaaaggcagctttagtggtggatccagttatggtgtccacaagtggagatactctttcagaatcatctactctctctgtatatagggatgaattatttgctatggctgatatagtcaccccaaatgtgaaagaagcgtcgagattacttgggggtgtatctttgcgcactgtttctgacatgcgcaatgcagcggagtccatttacaaatttggtccaaaacatgtacttgtgaaaggtggggatatgctagaatcctcagatgcaactgatgtattttttgatggtaaggagttcattgagctccatgcgcatcgcataaagacccataacacacatggaactggttgcactttagcttcatgtatagcttccgaattagcgaaaggtgcaacgatgctgcatgctgttcaggtggctaagaattttgtagaatctgctcttcatcacagtaaagatcttgtcgttggaaatggacctcaaggcccttttgatcaccttttcaagctcaagtgtccgccatacaatgttggctcacagccaagctttaagccagaccaactcttcctgtatgcagtgacagactctgggatgaacaaaaagtggggtcgttcaatcaaagaagctgtgcaagctgccattgaaggtggcgctaccattgtacaactgagagaaaaagattccgaaacaagagagtttttggaagcagccaaagcatgcatggagatttgcaagtccagtggagtaccactgctgatcaacgaccgggtagacattgccctggcatgcaatgcagatggtgtccatgttggtcaattggacatgtcggcacacgaagtgcgggagctcctagggccgggtaaaatcatcggcgtctcgtgcaagacccctgctcaagcccagcaggcctggaatgatggagcagactacattggctgtggcggtgttttccctacctccacgaaggcgaacaatcctacattggggtttgatggcttgaagacagtttgcctggcatctaagctgcctgtggtcgctattggcggcatcaacgcttcaaatgcaggttcagtgatggagcttggtctcccaaacctcaaaggcgtcgcagtagtctccgctctgtttgaccgtccgagtgtcgtagccgaaacaagaaacatgaaatccatcttgaccaacacctctagaacctagagctactacaatattctttgttcgaaggggatatgtttatcaaaatgaagagatgtttccaactttaataatcagaaggcatttcttgtaataatgcttgatcaaaagcatctgtgatgcaggggaatgaggaatcacaatcttgcatcattgggatgtaaggtacaatgttcagatttcttttacatcttttgagcaaattatccaacaaattttgttgaaagttggtagtacaaaatgaaagggtgaaaggctgtaactttcaacttctttaagctttcaaaatgaatgttgatgctatcatttagctattcgctagttgttttttttttgtcaatcagtgaacattttac

SEQ ID NO: 25479 - DNA, 3158 bp, Oryza sativa
  ref <308>: DATABASE ACCESSION NUMBER: AK100921
  ref <309>: DATABASE ENTRY DATE: 2002-08-28
ctgaggtagaagaagaataaggtaggacacacacacaactccactagatttaatgacccccccttaaaattaggagaaaattaggcgaaaaacaaatccaaaagcgaagacccaagaggaagaaggttaatcaaaccaagacaagagagagagagagagaaagcaagcacagatagagagagaaacaagagagagaagaagaagaagaagaagaagggtagaagaggacgccgagagcggcagaggggtgaggccatgtgtacgccatgggcgtgcgctgcgtggacgtcgtgacacctgccgccgcccgcgcaccgccatcgccatgcccatgccgccgcaatgcgcctcctcaaaacccccttctcctcctcctcctcctcatccccacgagcacgaggtttgccaccgccgctgccgcttcttgccttgctttgatccgccgccgcgggaggcctcttcttgattcttgattttgcaggtaggggacgacatggcggaggaggcgccgccgccgccgccgccgcccaagctcctctacattgccgtctccgacgccgccgctcgccgcgccttccgctacacgcgccccgtgcttcagggcaccgtccaactcatgggatgcaaggctcgccatgccttcaagattagcaagagggtgttcaatgtgatgaggagtgaattcttggatgcatccaaatcagatactgcagataatgaagaaaatgccccttcccttgtaaaagatgttgagatgctgaagcccaaaattttggaagcaactcttagtagcatacccttcgagttatacaagacccaaacaaccatcgttgtttctagggagaagttcctaagtgttgtatgtgatgccctctcttcatacaagtatgtggggccaaaccagaaggctgactttcttcttgcttgcaggtaacatgtttttccttgtttctgcatttataaattcagaagttacaatgagttaccaatcatcagttcattacagccaatggaaagctacctgaatgcattgaaataacaatggttttgtgcaactgtgcattttccaattgttctgttcagaattaaggagagaaaggaatcagtgacagtactcttatgtgggactagcggatgcggcaaatctacgctatcatctttgttggtatgtttatcacttacgcgaaccatacaattccggatgagtgaatgctctactgtaccagcaacatagtagtagtttgttacatgttaaagtataatgcaaaacgtctgtagaacaaaatccacttgaaaaaaaaaatcctttctagacctatcaattacctcattgctttcagaagattgtatcgcttaccgaacaatgaatgattctgggtcttgattaatacttgatatggtctgtctgtttttctcagggtagtagattgggtatcacgacagtagtttctactgattccatacgccatatgatgagaggctttacggatgagaagcaaaatcctcttctctatgcatcaacctatcatgcaggcgaatgcttagaccctgttgcagttgctcaggcaaaggcaaaacggaaggcacagaagcttgacattgtttctcatcctaataccaatgaaggcagagacgacacttcagatgataaagctcatcatggatcctccgaattgcctcctagaacggagttgatcggcagcaagcaaatggcaatagaagggttcaaggcgcaaagcgagatggtaatagacagcctggacagattaattacgtcctgggaggagcagaaacaatctgtaattgttgagggagttcatctaagcctcaattttgtgatggggctaatgaagaaacacccttccataataccatttatggtatacattgcgaatgaggagaaacacatggagcgattcgctgtacgtgcaaagtacatgacactagacccagcgaagaacagatatatcaaatacatccggaacatcagagcaatccaggactacctttgtaaccgtgcagacaagcatctggtgcccaagattaacaatactaatgttgaccagagtgtggcggccatacacgccacggttttcagctgtcttcgcaggcgagaagctggggagcagttgtatgacctcaacacaaacactgtagctgtagtgaatgaggaatacaggaaccagcgtgctgctaactcactgggttccaagggaatgtttcagttgatacaaagacagggatcttcaagaaatttgatggctatccttaatactgacggtagtgtcaccaaagcttggcatgtggataaaaacaatggcaatggaagtctcgatggtacaagcagtgacaaatcaacaaaaaatcccatgtatgatacatttgggaaggcggagccagtcaatctccagttcggatctttcgggatcagtgcatggatgagtgacacaggtggcaccagccatacaggaagtgtagatgacttgagagctgatggcattgaaacgggcggcagatattattcctcatgctgcagttcaccaaaggtgtcagattgcccttcaaaagagcttatggaggatgattattcagtttttggtagcgaagaagatgctgatgatcctcctgatgctggaactgacgaagacctaactgatgaagaaagagatatgcacgagatagaagcaggctctgttgatgaacactccaccaagtccgacgaggaatacgacgatctggcaatgcaggatgtgatggagaacggttactggtccgacgacgaacaggctgcaagcagcaccaagaactcatcgaaccaggagaagaacatccatggagcagctgatggtgatgttgttgatgatgaaggcagtggcaatgacaggtttcaccacaatctggccttcttcctgaagatgtccaagaaagtagccgccacagaactgccgtgtgcatagtgcctccggtgtcaaagcaactgttgttggtccagatgtgctctgaactcggttgttatgtatcctgatgagcttacctccatgactgtaactgtaagagaggatctgctgcttgtctaagcaatacagatcacttagaatccgtgtaatccaataactcttgaaaagatgaaataataaagggtgaataaatagtttgat

SEQ ID NO: 25480 - DNA, 2261 bp, Oryza sativa
  ref <308>: DATABASE ACCESSION NUMBER: AK100922
  ref <309>: DATABASE ENTRY DATE: 2002-08-28
ggtgcatcttccccgtcttgacttgctccggttcaattcaaatcacctcgctcgccgtccgtcttcgtggagctttcgaatacgaggcggcgatcgatgcattcccgccaccaacgcctcgcgtcgctgacgaagttgctcacttcccacgtcaacgtcggccgtcaccgggatgctctcgccttcttctcccgcatggtctccgacccctccctcccgccgctctccgacccctccttcgcctacgccttcccgctcgccctcaagtcctcctccgccctccgcctcccctccgccgccgccgccgccgactccctccacgccctcgccgccaagtgtggcttcctctccagtccattcttcgcctccgcgctcgtcgcctcctacggcgcctgcgcctcccccgccctcgcccgccgcctgttcgacgaattgccccaccgcaacgccatcgtctgtagcgccatgatctccgtccacatccgatcgggcgacctcgccggggcgctgcgtgagctcgatctcatggatgtggcgccgaccgcctcctgcttcaactctgtgatcgccgcggttgctgagtccggggaacatccggcccgggccatcgatctctaccgacggatgcagagaatgggcgttctcccgagcctcattactctgctggcgctcgtcccctcgtgcacggcgctgggtgcgttgagctcaatcaaggaggttcacggttttgctacgcggcacggcatgtttgcgagctgccacctaggaagctccctcattgaagcatacgggcgatgtggttctctggctggcgcacggaacgtgtttgaccaggtgcaggagcgcgatgtggttgtctggagctctattgtatcagcatatgcattccatggccacgcagatgttgcaatgtcgcttttcaggcatatggagctggacaatgtccggcctgatggcataatgttccttggcgtattaaaggcttgcggccatgctggtcacgcagatgatgcattgaagtatttcgatgttctaaccaaaatatttggggtcgaggcctgtggagatcactattcatgcttggttgatgtcttgggccgggcaggaagactacgccaagcttatgatgttatacagacaatgccagttaaggttactgcgaaagcctggggtgctcttcttgctgcttgcaggaaatatggggaggtggggttggcagaggttgcagggagagcattgtttgagattgaaccggagaatgcaggtaactttgtttcacttgcgaacatctattcaggcatgggtatgcatgacaaggcagaacaggtgagaagggagatggagcagcgaggtgtgcggagattgcctggaagcagttggatgatacattgcaagtcaagtgaactgttctgaaaggggaaacacactttgagaactgcatcacagactcacaagaaaattttatcaagatattcaaatcgtttcgtatccatgaaagacaggcagtgagatcagcatcaagcactaccagcgggcaccagcagatgcatgtgggccacagcactagccagtaccacggatggttccgtcttcctggccgtgcaagccagtccacttctcatcatcctctgtccgtgcaaggtgccctggctgcaagtataaatacccagtctccttaccttgcaagtctgggctcttaaccaaatgagcaggagccaactgatgcatatgtataagcttggagatctgacgcctgctccatccatgacgattccaatggcacattcctcaaggccaactctgggttttcccctagggacggcgctcctgatctttgttatcttctccctcagtggcatcttctcatgttgctaccactgggacaagctccgtgccttcctctggtctcggcatcctgatgtgatactccaagaaggccagcacaccgtcatctccattgcgtctccgagcaagacaacatctgatcacaagaacgagaaagcagagaaagagtgtggtttgcccgttattatgcctggggacaggatccccaaattcttcgccaggccgtgcccgcatgagaagtgtttgcctgcagcagaggaggaggaagctgaggtgcaagtcaaatgttctgttccacaatctagttagtagctgtaaatgaagccatacagagtgggtgtatataagcttttattagaacctctaaaaaaaaattccatttcctctttggtcctatgaaaatattcaatttcttc

SEQ ID NO: 25481 - DNA, 3574 bp, Oryza sativa
  ref <308>: DATABASE ACCESSION NUMBER: AK100923
  ref <309>: DATABASE ENTRY DATE: 2002-08-28
ggtagatttgacagatcgatccctcgaaccttcgctaagctaattccgcgcctactccacccgtcacgtgcctccgaagcaagcaacggctcgtttcgtttcctctcgcgctcgcccccaaaaccctcgagatctctgccctcactcgcgcaaacctcctcctcctccgaagcttcgatcccgacacgcctccgccgccgccgcccgccggaggcgagcccgagatgcggcccaacgtcatcacggaggctgggatttcaactaggttgaatcagtggtggggcagcataccattcattacatccggtgttatcttgatatgtggagcgatttatctggtgtgcttgttgactggctatgactcctttgccgagatatgcttcttgccttctgtagtagcatcacgctttcaagtgtacaggttctatacatctgttgtatttcatggttctttgcttcatgtgctattcaacatgctggccttggtacccttgggcactgagttggaaagaattatgggatcagtccgtctcttgttcttgatgtttcttcttgctacgactaatgcgatttttcatctcatcattgctttcttggcggcttacaatccgctctatcctctccactttcttgtggatgaatgctccattggcttttctggagttatattctcagtgattgtcattgagacaagcctgagtggggtgcaaactcgaagtgtctttggcctcttcaatgttcctgcaaattggtatgcgtggattttgctggttctctttcagtttctggcaagcaatgtttcgttgctgggccacctgtgtggcatcttgtcaggatacttatgggctgttcaactacttgcttcctggaccatcattttattcttctattgagggcttgtcagtgctaatattggatatcagtctgtttgtgtaaggcgtcctggcttcattctgtgtactggagggactacatatggccagcttcctacattttctaacacatctactgcaccaagcgctctgattaatgcaaatttcttaagaaatatttcttcatggataccaagcaggcagacaaccaccactcaggggaatactcaggaacaagatcccaggtttccagggagagcacggacacttagttctgctggaactgaaccaactgcaagggaggcaagtgcaaatttgcatgctagcttgttggatagcacaactccaagtgatccgcttacgagttcacagtaatgcattttctacttggcatttctttaatacggtagacatctggtgaatatcacctatgcattggaaccagaagctcatatgaagcctgaataacttgaatatacaaaacgatcttttctaaagcagtacttaatagtttaaataaataattggtttggtcattggtactccatagcattttgttggagcaccttctgttgtgttctttttctatatcagactaaacattttgttagctctaattagcatttaccaagttctgtttctttagtcagtttgaatgtttgcattatgcaattagcactattcgtcccagtaataagtccccgttcaattagttagtaaaatgatatgttttgcaaaggtaagctcaaagttttgaaattccgcactacacaggtgagaactgagcagtgctcaagtgatccttgcttggctagtgcaccacctcaagttctgctcaatggaagctacccaaattgagcttggttcagatgcattcatggttgatttatcattaataggctaatcttgctatacgaaattgtaattcttgaaatagtgtacttaaaatcaaactccataaatctcgccgcaaacttgcagtatccaaagaagagtatgatataaaaggtggagataccaaaaaaataagcttatgatgactcaaatttgcatgcaaatgatttccaagaccccagatcgtgccaattggtaccctcaattcaggattgttgttagggctcataataggaacagttggtattcatttctggttataatcttttagaatatattggctttgattttgaactcaaggcagacttgggatatgcacactttccttttgagttgagttaatttcgagcatatcaagagaagcgcataaactttgacttcttgcccacaaacatgagtcatctaacacagccttcttgggataaaaaaaaaacttattttgatgcaaatagtcacttacaggattagggagctttctggaattgcagaattcctggtgcaggattgaataattaaaatgctttgtttgaattttctgccaatgttatgatcaaagaacatatcaagtatttctcaaataatgcaaaataaaaaagagaagtactgagacacttcataaaacaaggcttgtcaggtaaaaaaaaaaatcgacacttgattttttttggctagaattgggtaatctggtgggaaccagctggttcctgctggttattctagctttcacaggataggttttttgttgttgttcagcaattatatatgttgtcctagtgcctataagcgttcatctcatttgatagctacaactaatattgtcagttttatccagttagtgatttatgccttctaaaatgattaaatatttaatgcttatactaattcaataaaatgacccatcccaaaaaagaaaagaatcgatgcaatgacgctaatggagttggcatcctttttagtactgctgtaatttcaatttcttctctgacatttgagatagctattaactcaggtaatggtttacttccacagagttaaaggatatttataatcagaagtcaccctatatactgttatgagatttatgacttaatccttaccatgatatcatctacttgcacttcataaacaatgtctcatgttttatgtaagatgcccctgagaagccagtcactggcttatgtgaactttctgatagtgatatatgagaaatatcaagcaaaaccatccttaagatttaagaactgtgacacttctaatacgagaataaacctagttgttttgtagttcttacttctggttttccattacaataggcatccagcagcaaacacagtcagagctgatgcaactgtagcagctgaccaggttgatacatttgatgaagaacttaagaagctggttggaatgggctttgaaaagactcaagctgaagttgctcttgctgctgccgatggagatccaaatgttgctattgagattctcatgagtcagcagggttaaaggtttcaacatcactgatagcaagcgatggaggctcaattttagggtgtagattctggttagtaaaattcaagaatggaccattctgggcaattgtttttgccaacatggttatattgaagatgcccttaattgtgcttctatgaaggtcaaaactacagttaacaatgacaatagttgcattgaaggctgtttcttgatgtattagtaaaacagtaattgatgctcggggcgctcattttgttggcagatcttcacaattgctatttggcaatatgtctagctagacaataaagcttttacaaagg

SEQ ID NO: 25482 - DNA, 2249 bp, Oryza sativa
  ref <308>: DATABASE ACCESSION NUMBER: AK100924
  ref <309>: DATABASE ENTRY DATE: 2002-08-28
ggtccgtacccaaaattgccaaaatcaccctccaattcctttcccctcctccctcccctctgccgccatggccgcctcctcctcctcctccccccttgacccacaccaccaatcgccccaaatccatgagactccccgcgccacaatccagccctgccgcacgaggatgtcccagtccgacgttgtctacagctgcggatcttgtggataccctctgaacctttcatcttctaaccgaagcacatctgacgtaggatcctcataccaaaagtctgtgaagaaaggtctgatttcattcattactgttgatctgagccgatttactcaggtagacgagatatcttgctttcccctcacctggcgtagctatcggccaaaaactaagcttctctgccgaaagtgtggggcatctattggctatgggtatggtgaaccagctgttctgtgcagctttgatccagccagttcatcatctagtacatcccaaaagtatttaataaaaatccaggctctccagccttcggatagtactcagtagtctgtcaacttcagccaaaatttggaaagagaggaaatggatgacaacgtggaaaactatatcaatttcctatcagatgattgcttgatttgtatatttaacaagcttgaaagtgaatcggacaggaatgcttttggcttaacttgtaagaattggtttaaggttcgaaacattgcccggaaatcaataattttccattgttcttttaaccctaaagtatataaggagcacgccaattgcctttcaaagttattggcccgctcaccttatcttaacttggtctccctcgctgggcttacagaactacctgacacggctttaaatcagctgagaatttctggagcatcattgcagtccctttctttctactgctgctctggtattacggatgatggtttagaggtggtctcaatcggatgccctaatttggtgagtcttgaactctaccgctgctttaatattacagatcatggtttggaaaatctttgcaagggctgccatgctttgaagagtcttaacctgggttactgtgtagccatttcagatcaagggattgctgcaatctttaggaattgcccgaatatttccacaattatcatagcatattgcagaggtttatccggtgttggattcagaggttgtccaggtacactttctcatctagaagctgagtcgtgcatgctttctccagatggtttgttggatgtagtgagtggtggtggactggagtatctaaatttgtacaatttgaaaagcccaactggacttgatggcctggacagagttggttatgcgagaagtcttcggtttttaaacctcaggatgtgccgttaccttaccgatgattctgtgacggcaatagctagcgggtgtccattgattgaggaatggagcctcgctgtctgccatggagttcgcttgcctggatggtctgcgattggattgctctgcaacaagctgagaatcttgcatgttaaccgttgccgaaacatttgtgaccaaggtttgcaggctctaggggatggctgtgtatgccttcaagttctgcatatccatggatgtggcaagatcactaataatggtctggcatcatttagcattgctaggcccaatgtgaaacaaagggctgatgaagtcatgtgcattggcccctccattgaggatttattccgattgcaatgatcagaaactcagaaagtttcagctaaagtttggggttgacaagattcaagccattgccaccagcattgtcattacaagtcacaagatatttggttctgtaaccattatgcccttctaatttgctcaaaagtgcatacttatttattataaacaggaccacaaatatacaaatggattgcgaggagtcaagtccatttgttcctgtggttatttgcaagttctgagtttattgggtgatacagaaaatggttgtagaaggttgtttttcgtacaatttgatagctagtttaaacttgtaaattgacatgttttaaaaccatcgaaaattgaattggatgggttggttgtactacagcggttgaaccggtgtttaaactttccgatggattgtattaggttaactcgagaagttcaactatcagaatgccaccatagctgaaaacaatttttaagttttgatgaaatgtaaacaaagaaaatcctgaacttgttgaccaatcgaagttgttgacgaatgatttagcaaacg

SEQ ID NO: 25483 - DNA, 3611 bp, Oryza sativa
  ref <308>: DATABASE ACCESSION NUMBER: AK100925
  ref <309>: DATABASE ENTRY DATE: 2002-08-28
gattatcacaccatttattattccattaacaagtaattgaatctagaagtatatcatttcctagtagtaggaaagagagggggagggagagagaaaagggtgagaaatataggcggaggaaaaacggaggaggaaacggcggcgagaaatcgaggaaatcggggaggggattgggctgggattttgatccgcgtcgcctccttcgtcccccccgaatcccatcccaaatccctaatttcggtggcgccaccgcggaattcggaatccgagcatcggagtccaaaccgctctgtgttggtgtttatccccaaattttctcgttcgtgtaggcaataaaccctatctggtccagccatccatcggctggaatctgtgctccagtgcggatttagctgcctctccaccctcgcggattgaccatcgccgtcgcgctaagccgggggatcggagcgtcggggatggccgccgccgccgccgtataggatggagctggattcctccggcggctgctcggctgctcccgcggatggtgtgatcgttgcgactggggttgggttcggagttgctggtgggtggtggtcggcgggcggtaggagatctccccgagcaactgtaagagctgccgaatagctggcggacatggaggagaaggcggcggcggcgccgccgtgggagcctagcgtgggcacggtgttccgacgtctcgctggtgctggggattcggggcggtcgccggaggcgtccctcccctccccctcgtcctcgggcaatggggttgcgacccgtataagcaatcttcacggcgtcaagaggaaaccgtttgttgcaagactaacggcagacatcattcaaacatttgtacgatgcaaccctgcgtttaagtactcagagtcactaaacccaaagatctttctgacgaatccttcaaccccagctcataatgatggacttgataatgcgaattgggacctcatattgtatgtcaacttggaattggtcaacaggacatcaaatcggaggttcgtagtcaaggaaatgcttggccaaggaacgttcggtcaggttgtcaaatgcttggacactgaaaccaatgattatgttgctgtgaaggttattaaaaaccagcctgcattttaccatcaagcgctcgtggaggtttcattattgagagcgttgaatcaaacacatgatcctgatgaccagtataacattgtccgtatgcttgactatctcctattccaaaatcacctgtgtatagcatttgaaatgcttggtcaaaacctgtatgagctcttgaaaaggaacagcttcagaggactgaaaatgaaatttgttcgcgccttctcaaaacagatattggatgccatggttgtgatgagaggcgctagaataattcactgtgacctgaagcctgaaaatatcctgttaactccgagtgttacaacagatgcagccgtgaaagtgattgattttggttcagcatgcttggagggtaaaacagtatactcatacattcagagccgctattacagatctccagaagttatccttggctatccttataatactgcaattgacatgtggtcatttggctgcatagttgctgaactatttttaggccttcccttatttcccggagcatcagaatatgatgtgctccagcgcatggtaaaaattcttgggggtcaaccaccagattacatgctaagggaagctaagaactcagcaaagttttttaaacatgttggaagtatttatcgtggtaacgaagtgcatgatggtattggcagttcttacagattgttaactgaagaggagattgaagtgagggagtctgaaaagccaaaggtagtgaaatggtacttcccacaactcaggcttgaccaactcatatgcagttacccttggaaaaattcagaactgacagagacagaaaaggcagagcgggtgatactggttgatttcctaaaggggcttctgaaatttgatcccaatgagcgatggtcgccattgcaggcttcatgtcatccatttataacaggcgaacctttcactggtccatatgaacccatacctgagactcccaaaattccaattggtcgtgctgccgcagttgaacacaatcctggaggaggacactggctagccgcaggcctatctcctcaggttggaagtgttaataggtctctaccacccaataatccctatcctccaaaaataccttattcttatgggagtagttatggaagctttggtagccatggtagctatgttggtaatgctggtcatgccagcagctatggaagctttggtgatggcaatgctgtcaacatgtattactcaccattaggtcctggttttaaacaaattgagtctagtccagacgtaagattgcgaccccgtttctcacatgatagagggattcgcttgagccctgggagtacggggcctatgtctcttggtgccagtccatcacaatttaccccacctaactaccaaatgcaaatcccatctaattccactgggatgcatggttctggttcacctgcaagtggaggcattcatggatccccattaggaaaaactccatccagttacagcaagaggaggggtttgccaatgccacctcatgaatatccatctcagcatggacaaggacgtcatggagatggtgtcggttttagtcattctgatgccaatgttcgaggacatcctgtctactcccagaattcaataccaagttctggttattctagttggagaccgcaaattggttccggtagtttttccttggaggcttcttctagtcatgggccttctcaaacatttcattcacactttgctcctcgtctgcaaactcttgataatttatctgattcatcagcggcatccacacttgacaatgcttattgggacccttattttagtgatgagtcactattgcatgaagacaattcactgtcagctgatttaagcagcagtcttcacctcggggattcagctaatccaacaagtggatccgccagaacagcaaatgtccaaagccacattttcatgggctcgaaccctttaccagcaggcgaaagttacagagcagaccatttttttcacgcatcttctcgtgggtcgcttggagggaatactcattctgctgttcctgttaactatggtggctataaccctgtaaatcatccccaacaaaatccccaaattcggcatgggcaaccatatattcagcatcgatacaaccaggcaacttcaactcataatcatcctagagggagtcaccacaacaggcaacctgcatggcccatggccgatggaacgccctggggaggaacgagtgggcatccatttaccacaactgggctaccttcatctcttccaagaaaggattacgggagcatcttctagcgcggaattgtggagcagtgcgattcattgctggcgacatgaattatttgtagtttcaaactgggagttgcgttgcgttgcctcagcccgtctgagtattcttttgcagtgttgctgcacttgcattcttccattgggggtggtcctttgtcgtactcacaattatatgaaggcataatgcgatcgataattacagc

SEQ ID NO: 25484 - DNA, 1028 bp, Oryza sativa
  ref <308>: DATABASE ACCESSION NUMBER: AK100926
  ref <309>: DATABASE ENTRY DATE: 2002-08-28
ctggtccgcgttgctgatccgacgttcctaggttacttcatagacaaagctgtatcttctgctgcaaaggttgttaggaaggcttacccacaagagaatgttggagtatttgttcgacgaggacgtggtggacctctctctgtagttgagtatagtgaaatggacgcagctatggctactgaaattaatcagtcaacgggacgccttcgttattgttggagcaatatttgcttgcatatgttcactttggattttttgaatcaagtagcaaacagccttgagaaggacagtacttatcatcttgctgagaagaagatcccttccatccatgggtacgcaatgggcttgaagcttgaacagtatatattcgacgcgttcagttactccccatccacagcactttttgaggttttgcgggaggaggaatttgcgcctgtaaagaatgcgaatggcgcgtcttatgatacccctgatagcgcaaagctgatgctgcttcgtctccatagtagatgggtagttgctgctggtggcttcttgacccattctgtcccattgtacatgacaggtgtggaagtttctccacttagctcctatgctggagaaaacttggaagccatttgccgcggacggacattccatgcgccgagtgagatttccttctaggtgacctgtgacacaaacagctctgtaacttcaaatttgtggaacagtggcagagaaaggattgcaggatttcatctcaaacagaaaaaaaaaaaagatcacagggtttccattttccctatgtcatggtatgaatggatgctgtacagttcagtgagctcctcagatattggccgggttgttttatgttgtgtcatctgtgagtattgtaatgtagcccccaaaattctaaggccatcttgattttcacacaaaaacatttgtgtggcagtgccattttggtttctcctgtagtcctgtgttgctcccatgtaatctgtagatgttttttcccccttcaaaacaatatagatctttgaatgccc

SEQ ID NO: 25485 - DNA, 2313 bp, Oryza sativa
  ref <308>: DATABASE ACCESSION NUMBER: AK100927
  ref <309>: DATABASE ENTRY DATE: 2002-08-28
ggtaaacttggccttcaatttcccacccactcgcgagctaaccgcattgaaaatcccccccgccccaaaatctccaatccccaactcgccctccccttgccttggaaaatcttctactactccccccgcgggttcctgagccccgcgcgcgcgcgatcaggaaccctcggggtactcggattccgcccgcacgggggtcgacgaattccgcaacccgttgtttcttttttttttcttttcctcgattggtttttctgcgcgattccgattccggcggaattttttttctttttggtctccctgttccatctgaactgcgcagctgttcgtagagaaattgtttttgggggcttttccacccaatcctgcagcgattccccgcagaaacctctcaccatctatcaaaaatcccctcttgtttttttcttctctcatcggggggaaaaaaaaagaagatcccctttttgggtgggcgatcttgagcccgcatggggctgcagcaatccaaggaggagctggtgtatcagcaggtcaactacggcaacgccgatgggattcgggcgctccgggcgcagggcgcaggtcttgagtggatcgacaaggaagggaagacgcccctgatggtcgcgagcatgcggcctgatctgatcaatgtggttcaggtgctgattgaattgggtgcaaatgtgaacgcctaccgtcctgggtcatattgtgggactgcattgcaccatgctgccaagaaaggtcttgagcagactgtccatttgcttctatctcatggagctaatccgtttataacaaatgatgattgccacacggcacttgatttggctagagaaaagggtcatgtgaatgtcgtacgagccatagagggacgtatttctcttttttgtggatggatgagggagaactatggtcctggatttttggaagcatttgctccacaattcctgactaggaaaatttgggcggtgattttaccccgtgaagcacgaaatcaaactcggccactcaagcttgagctgacgatataccctgaattgcaggcttctaaaccacaagctgtaattaaactttggaaatgtcaacttgaggaaccaaagtttaatcaggccaatccttctgtgacaattttcgacaagggaacaagaactcgatacaagcttctaccggtgtgtgaaggtgacaaacagcagcttcaatggttttatagtgcatgttgtggcattccacaggttgccagcatggttcctgctcaaccagcgaatgccccactgccaaatccatcatcagcatcatcattaccttcagtgatatccacacccagcaaggaggatgctgagttagcaatggccatcaatgcctccatcctgtcagctatagccgagggagtgcccgatgttcagccaataacaacgactactgcgaccaatgattggggaaactccaagcaactccctcaatggatggggcccaccagatacttctgcgccttcaaagacaagtggccaagtaccagttgttacatcaagcagtagcacatacaatgggtgggacgtgcctggaacaagctctggccaaagttcgtccaaacacaacaaaagccagaacagcactttcgtggttccgcaggaggcgcttccatctcttccagtcccaactgcgcctccacttgccgtgggaaccttctacgatggtcctattcagtatccgtcaatagattccacgccagtcgacgtaaccatgccttctgctgacggtggtacagcggtaagctctgcaaaacctgcagagaacgaaggtgatgcaaaacctgcagaaagtgatgctaatgcaagcaacagcggtaacactccaccgggaacctgtgttatttgtttggatgctcctgtggaaggtgcctgcattccgtgtggtcacatggctggttgcatgtcctgcttgaaggatatagaatcaaagaaatggggatgccccatttgtcgagccaagattaaccagattatccgcctctatgcagtttgagcaattccaacaatcaaatagtagacatgggaatgaacaatgggtgtttgttcttcgttacaagttctgatggaaaaagaaaagctccatctgtaaagtatgtcatgctgtcagctgtgattttgatgttccaattgtactgaaaaaattatacattctgtgttatgtgcattacgtgaagctatgaacggtagtacgatacattactatagggaacttgtgtacatatatatctatgagaactatacagtatacataagattaattgttggctaaatgtctggc

SEQ ID NO: 25486 - DNA, 1672 bp, Oryza sativa
  ref <308>: DATABASE ACCESSION NUMBER: AK100928
  ref <309>: DATABASE ENTRY DATE: 2002-08-28
ggtgtgcaagctaacaacatcgctaggcaaaaggaagtcgttgctttcgagtttcccacccatggcatcctccgccggcgacccgctcctctccggcgaggccggcgacggccgccgcaggttcgtcccgtccaccatacggctcaagacgtcggtgtggtcggagctgggcggcgcggtgggcgatctgggcacctacatccccatcgtgctggcgctgtcgctcgcgtcccacctcgacctcggcaccacgctcatcttcaccgcgctctacaacttcgccaccgggctcctcttcggcatccccatgcccgtccagcccatgaagtccatcgccgccgtcgcgctctcctccgcgcacctcaccatcccgcagatcatgtccgctggcctcgccgtcgccgccatcctcctcttcctcggcgtcaccggcctcatgaccaccctctaccgcctcctcccgctccccgtcgtgcgcggcgtccagctctcgcagggcctctccttcgccttcaccgccgtcaagtacatccgctacgtgcaggacttctcccgttcctcctctgcttccacctccgtgccgcgccccctcctcggcctcgacggccttgtcctcgcgctcgccgcgctactgttcataatcctcgccaccggctccggcgacgacgaggacgtcaacagggacggcacgagccgtcgccgtcgctcctgcagccgcgtcccggcggcgctaatcgtgttcgcgctcggcttggtgctctgcttcgttcgtgatccgtccatcctgcaggatctccgctttgggccggcgccgttggggctggtcaagataacctgggacgatttcaagatcgggttctgggagggcgccgtgccgcagctcccgctgtccgtgctgaactcggtgatcgccgtgtgcaagctgtcgtcggacctgttcccggaacgggccgagctctcgccggcgcgggtgtcggtgagcgtggggctcatgaatttcgtggggtgctggttcggcgccatgccgtgctgccacggcgcgggcgggctggcggggcagtaccggttcggcggccggaccggcgcgtccgtggtgttcctggccatcggcaagctggcgctcgggctggtgttcggcaactcgttcgtgacgatcctggggcagttcccgatcgggatactgggcgtcatgctgctcttctccgggatcgagctcgccatggcgtcgcgcgacatggggagcaagcaggagtcgttcgtcatgctggtctgcgccggcgtgtcgctcacaggctcgagcgccgcgctgggcttcatctccggaatcgtgctgtacctgttgctacgcctgagggatttggagtgggatatcagaggactgctcggtcgctgggccgcgggacggcggcaatcgaccaacgaggccaatgaagatggggctggagatgcttgatcgaaatcttgagaacatctgttgatttgagattttgagtgtggtgtgaattgttcgagcgaatatatatagtatcaacatgcatagcggatagccacgagtgattgaatttctgaatggagtaactccacataatcgcccaaactttcaaaccaactactccctctgtccttaaacatcttaaatgtttgacgccgttggcttttttaaatatgtttg

SEQ ID NO: 25487 - DNA, 2239 bp, Oryza sativa
  ref <308>: DATABASE ACCESSION NUMBER: AK100929
  ref <309>: DATABASE ENTRY DATE: 2002-08-28
gagtctccaagcgcgcgctgctgtctggaacaagagccgggagcagatatggtcccggacggcggcgaggggcatgagatcgtcgaggtcgccggcgagcccggcgcgccgtcgtcgacaatgcggctgatggacttcatacccatctacatcccgacggtggagacgggcgcgctgagccggagcgtgcgcaagcggcggttcttggacttcctccgcgcccacccgtccagggactggttcctccggtcaaccttcgtcggccgcctccgccaccggggccagggccaggcggcgtcgggggatgacgaggaggtggactccgacggcggtcgccggcggccgcggaggcggttccgcgtgccgttcgtgaggaagatcaagtgggggaagctgtggagctacgcggtgagctggtgcaggaagcccgagaacttcgccatgatcatctggctggcgttcgtcgccgccgggctgctgatgctgttcatgctcatgaccggcatgctcgactccgccatccccgacgacgagcagcggaagaagtggacggaggtgatcaaccagatcctcaacgcgctcttcaccatcatgtgcctgtaccagcaccccaagatcttccaccacctcgtgctgctcctccggtggcgccccggcgccggcgccgaccgcgaggagatccgcaaggtgtactgcaaggacggcgcgccgcggccgcacgaccgcgcgcacatgctcgtcgtggtggtgctgcttcacgccacctgcttggcgcagtacttctgctgcgctctcttctggagctacgcgcgcaaggaacggccggactgggctctcaacatcggctacggccttggcaccggctgccccgtcatcgccggcctctacgcggcgtacggcccgctgggacggaagcagcacgaggattccgacgaggagtcagcggcggcgcaggccggcggcggaaaccggccggcggagaacgaccgtgaggtggagatcaagatatacaaccggcgcgtggtggtgagcagcccggagtggagcggcgggctgttcgactgctgcgacgacgggacggtgtgcgcgctgtcggcgacgtgcacgttctgcgtgttcgggtggaacatggagcggctcgggttcggaaacatgtacgtgcacgccttcaccttcatcctgctctgcgtcgcgccgttcctcatcttcagcgtgacggcgctcaacgtccacgacgacgacatccgcgacaccgtcgtctccgtgggcgtgctcctgggcctctgcggcttcctctacggcggcttctggcggacgcagatgcggaagcggtacaagctcccggcctccggctgcgggtgcgggtgcgagtgcggcgccggcggacaggggcacgcgtgccgcgcggcggtgagcgactgcgccaagtggctcttctgctggagctgcgcgctggcgcaggaggtgcggacggccaacttctacgacgtggaggacgaccggttcgtgttccacggcgcccgcaacgaggacgggcgcgccgtgctggtgccgcttccgcgggaggcctccaccgccacggcgcactcgcggagcatgtcgtgcccgcccaagatcgacgccgtggcggcgctgagcggcgcgagcccgctgggcgtgcagatggcagccatcaacatggagaggtcggccacgtacagcggcgagcaccaccccgccgccatgcgtccgcctgtgcccccgctgatgcaaatggaccaggaatagtggcagcggcagcagcacgcgcgccctagctacaccgtggccatgtatacggtagtattaattctatgatacgtacggtagtattaattctatgatacgtataaggtcgtcgtctacacgtactgcaggttgtattagactattagctggtttttatacatacggattcgtttgtttgatagtaaaagaggacgggtaatttcgcttgaaattgaattagacacggggtgatcgaggttagcaatgacatccgtgacggtacgggaagccgggaaggattgttgtgataacggctactgggccatcaccatgggccttttaatcactgtgacatgtctggatctgtgtggacacaagggccgaataggagttgaggctcagattggacctatttcggcctgacgcaggggcggaggtagagtatggaggggttccagaaatttttttaagctatacttcacatatttttacc

SEQ ID NO: 25488 - DNA, 2405 bp, Oryza sativa
  ref <308>: DATABASE ACCESSION NUMBER: AK100930
  ref <309>: DATABASE ENTRY DATE: 2002-08-28
gctctctctctacctccatctcctcgagatcgacatgccacgctcacgagttcttcttgagtggatcaatggagatgtgttgctgctgagctgagcagagtgtgtgtagaatgatgggagccctgcagcagcagagcaatggccatggccatggcgtcctcctcctcgctgaggctggctatgccgaggttgatcccactggaagatatggcagattcaatgagattcttggcaagggatcgtcaaagattgtgtatagggggttcgatgagtggaggggagtggaggtggcgtggaaccaggtgcggctgcgcgacgtcgtgcggggcggcggcgagctggagcggttctacggcgaggtccacctcctcgccgcgctccgccaccgcggcatcgtgcgcctccacgcctactgggtggacgcgccgcgccgcgccctcaacttcgtcaccgagctcttcgtctccggcacgctccgccagtacagggagaggcaccggcgggtgagcgcggcggcggtgcggcgctggtgcgcgcagatcctcgacggcctcgcctacctccacgcccactcgccgcccatcatccatcgcgacctcaagtgcgacaacatcttcgtcaacggcaaccagggcgaggtcaagatcggcgacctcggcctcgccgcgttccgccgcggcggcggccacgcccgctgcgtcggcacgccggagttcatggctcccgaggtgtacgacgagtcctacgacgagctcgccgacgtctactccttcggcatgtgcgtcctcgagatggtcaccctcgattacccctacagcgagtgctccaatcccatccaaatctacaagcgagtcatctccgggatcaagcccgcggcgttgtacagggtgagcgacccggtggtgaggcaattcatcgaacggtgcctcgccccggcggcgcggcggccggcggcgagggagctgctcgacgacccgttcctgctgccgcttgaggatgatggcttcttctccggcgacggcggcgatggacatggcggttttggcgttggctactacaatctgatgtacaactacctgcaccagcctgcttgcatcgacgaccaccatgcctgcagcaatggcggcttgtcgccgtcgaatagcgtcggcgacaacgacgtggacgcggccgtgcagcggggggacgacgacggtgacaactggctccgcgacatccacatgctgttcgacgaggacgacgacgacgccgccgccgccgacgccaacgagcgtgtcggtggcgtggacatcaccatcaaggggaggaggacggacgacggcggcgtctacctcggcctgcgcatcgccgacaagaacggcacagggcgtggccggataatctgcttccggttcgacaccgaggccgacacggcgatgaccgtggcggcggagatggtcgccgagctggacatcaccgaccacgaggtgactcgcatcgcccagctgatcgacggcaaggtcgccgcgctggtgccgggctggaggccgggtccagcgacggacgacgacgacgacgacgatctcgtcggcggcggcgatgatccggacgcgccgggcggcgccgccgccgcctgctgcaagaactgccggccggcggcgtcgtcgtcgtcgtcctgcggctcgctcgtcgacttcatgtcatcggcggcggcggcggagcgccatggctgcaggcggtgcgccgagctgcacggccggtttgaggagatcacgttccaagccgacgacgacgaagaggagcagcatttgcaggggagctcctctgacaccggaggcagcaaccatgagcagcacgccatgggcaaggacaaggaggtcatgaacatcaatggcattgcacaagatggcacagtacaaggttcagaacagccatgatcagtaattcagtatgatgatgatgaacatccgaagatcgagcaattcgacgctgataggcgatacggatcggcgatgtttacaaccattgatgggttcttggatttgagcaatggcgcgagtcggtgccgccaccatgatcatgaccatggtagctcaaaggattcatgatcattgtgagggggaattgctcattgtgagggggaattgctgacagcaatctcgatcagccgctgctcactttcagaggttaccttgccgacacattgcaagagcaacaaagtctgtactgttgaacaatgctactgacgttcgacatgcccttctgacaaagtaaatctacagtttcaagattggatttgctcgtctttttttcagagatttagcatatattgtagggaagaaactgaaagatgtagtataacgttttgtgactgtgctatgaatctgaagaagatagggtacagtttaggtaggccaagtgcaatt

SEQ ID NO: 25489 - DNA, 1663 bp, Oryza sativa
  ref <308>: DATABASE ACCESSION NUMBER: AK100931
  ref <309>: DATABASE ENTRY DATE: 2002-08-28
ctgggcgagagaatctgagagagatgagatgagaaaccttcacccaccaatgatgaagatgctcctcgccgccctcgtcgtcgtcgccgccgcctccttcagggcggccgaggcggcgctcccgtcgatggcggtgggcgtcaactacggcgccaacgccgacaacctccctccgcccaaggacgtggcggccttcctcgccgcgcacaccaccatcgaccgcgtgaagctgttcgacgccaacccggccttcatctccgcattcgccaacacacccatctccctcgccgtctccctccccaactccgacctcccttccctcgccgacaagcagaccggcctcgacaccgcccgcgcctgggtccgcgccaacctctccccctacgtccccgccaccaacgtcaccctcctcctcgccggcaacgagatcctcctctcccctgaccccaacctcgtcctctccctcctccccgccatgcgccgcctcgcccaggccctccgcctcgagggcctcaccggagtccgcgtcaccaccccgcactacctcggcatcctcgccccctccgacggcatcccatccaacgcccgcttccgcccgggctacgacaccaagctcttccctcccatgctccagttccaccgcgacacgggctcccccttcatgatggacgccatctacaccgccatgaagcgcctcggctacggcgacgtcgacatcgccgtcggggaggccgggtggcccacgcaggcggacccagggcaggtgggcgtcggcgtggaggaggccagggacttcaacgaggggatgctccgcgtcgtcagcagcggcaagggcaccccgctcatgcccaaccgcaagttcgagacctacatcttctccctcttcgacgagaaccagaagcccggacccatcgccgagaagcacttcggcatcctcaacccggatttcacccccatctacgacctcggcctcctccgccaatcctccgattctggagctccaaacccttcgccgaatccatcacctaaccctagtccgaaacccgctccttctggtggagggaagtggtgtgtccctaaggctggtgcgagtgatactgacttgcagaacaacattaactatgcctgtggctatgtggactgtaagccgatacaaagtggtggcgcatgctttgatccgaacaacgtgcagtcccatgctgcatttgtgatgaatgccttctaccaggccaacgggcggcacgactacgattgcgacttcaagggcaccggcgcggtcacctccaatgaccctagctacgggagctgcaaatacgtctcctgacgggacgcagcaagccatggcagtgcaggtgcagcggcaccaacctcgagtctacctccaggcttaagtcacggaagcgctggagggttgctaatactgcctggcttgcgcctaatttttctctgctcttgtctgacagcagccatgcttctttcttagaagagctatactattcattactctcgtagcaccggggaatgaacctattaaaattgtgtatccgttatcagtcaattcttgctcatgtttggctataccgcagttttctcattgtgtagtgaaatcatttgtgcttaacttatcattccattcttctattctatgtagaaatataaaatg

SEQ ID NO: 25490 - DNA, 1259 bp, Oryza sativa
  ref <308>: DATABASE ACCESSION NUMBER: AK100932
  ref <309>: DATABASE ENTRY DATE: 2002-08-28
gtaaggcatgcacaatcttttcttcttcctttctttctcctcttcctttatattcccccacctccatgctcgcgagctttagtgagcacagtgaattaaagcgaagcgatgtgaaaatataattgtgtacatgtgtgttgatggatgtgtgcagaagcagctggcaggcatggtggagaaggcgtcgatcgaggacgtgatgaaggtgcttatggcgtcgaggaagcaggacctgcaccagctgtggacaacgtgctcccacctcgtcgccaagtcggggctcccgccggaggtgctcgccaagcacctccccatcgacgtcgtcgccaagatcgacgagctccgcctcaagtccatgtcgcgccgctcgccgttcctctcgcaccaccaccaccacccgcacgcggccgccgccggcatcgaggcgtcgtcggcggccgagctcgacgaccaccacaagatccgccgcatgcgccgcgcgctcgactcctccgacgtcgagctcgtcaagctcatggtgatgggggaggggctcaacctcgacgacgccctcgcgctgcactacgccgtcgagaactgcagccgggaggtggtcaaggcgctgctggagctcggcgccgccgacgtcaaccacccggcgggccccgccgggaagacgccgctgcacgtcgcggcggagatggtgtgcccggacatggtggccgtgctgctcgaccaccacgccgaccccaacgtccgcaccgtcgacggcgtcacgccgctcgacatcctccgcacgctcacctccgacttcctcttcaagggcgccgtgcccggcctggcgcacatcgagcccaacaagctccgcctctgcctggagctcgtgcagtcggcggccatggtgatgtcccgggaggacgcccagaccgccgcggtcaatgcggcgcccatctacggcgagtcccccggcggcggcggcggcggtggcgtgtacaatgccagtggcaccagctcgagcatggtgaacctgagcttggacaacaggatggtgtacctgaacctggggatggacgcgcagttcgggaagatgaacgacggtggcgacggcgacgacggcgggagcagagggccatcgtcgttgttctccccacatggcttcccctgacgacgaaagggggtgtggccgcttctgctctactatctccttgtaagcttagaactaattaattacatgttatttatatccacattacaggagatgagaatgatccttttgggct

SEQ ID NO: 25491 - DNA, 2925 bp, Oryza sativa
  ref <308>: DATABASE ACCESSION NUMBER: AK100933
  ref <309>: DATABASE ENTRY DATE: 2002-08-28
ggccctccgaccactcatcccctccacgttgcagcaaaccgccatggccaaagcagcctgacgaggcgggcgggccgcggggggcaagaagagccagcggcgcggcgaccgcgccattgccggcgcgcgcagtggggcgcggatgcagaggaggcagacgccgaggaatcgttgggaatggataagatcgactgctacgtcgtgccgcagaccacgggcaccggccggaacatcttccagggcggcagcccgctctcggcgtcgctgccgctgctcggcgtgcagctcgtcctcatcgtcgccgtcacccgcgtcctctacttcctcctcaagccgctgaagcagccccgcgtcgtgtccgagatcatgggcgggatcatacttgggccgtccgtgctgtcgcggcacgcggcgttcagggaggtggtgttcccggcgaggggcgagccggtgctgaacacggtggcgacgttcgggctcatgtacgtcatcttcctcatcggcgtgcggatggacccgaggctcgtcgtccgctccgggaggaagggcgtggtcatcggcctctcgggcttcctcctcccgctggccatgaccggcgcgggctcctccggcgaggccatggcgacggagccggacgtgtcgaggcggtccacgttcttgttcgcgctcgccacctcgctgtcggtcacgtcgttcgcggtgctgtcgccgatcctgtccgagctgagcctcctcaactcggacctcggccgcatcgccatgtcggcgtcgatgaccacggacggcatcgcgtggatcatcatggtggtgtacatcctcgccgaggcgttcctcgtgtcgcccgccacgtcgatctgggcgttcctctcgctggcggtgctcgccgcgttcatactgttcgtggtgcgccccgtcgcgctgcgggtgatcgagcgcacgccgccgggcaagccggtggaggagacctacgtgttcgtcttcctcctcgtcgtcctcctcgtcggcttctacagcgacgtcatcgggacgaactcgttccacggcgcgctgatgctggggctggccatccccgacggcccgccgctcggcacggcgctcggcgagaagatcgaggcgatggtgtccggcctgatcctgccgctctactacgccatgaccgggctcagcaccgacgtgtggcgcatgcactggggcaggctgcaggtcgtcatgttcctcgcctgggtcgggaagctcgtcggcgtcatggtgtcgtcgctgtaccttgagatcccactccgcgacgctgtctcgctcagcctcttcatgaactccaagggcatcgtcgaggtcatcaccttcaacttcttcttgaccaacaagctcatcggcaagaacacgttcagcatcctgatctgcttgtcggtggcgatcacggcggtgtcggtgccggtggccggttggctgtacgatccggcgcggcgctacgccgtgtacaagcggcgcacggtgcagcatctcaaggcggacgccgacctgcggatcctcgcgtgcgtccacgaccagtcgcacgtccccggcacgctcgccgtgctcgaggcgtcgaacgcgacgccacagacgccgctcagcctctacctcctccagctcgtcgagatcgccggccgctccgcgccggtgttcatcccgcacaagctccgccacagcgcctcccgagccggcgccgcggcggccagcgcggcgccgcccaccgactccgaccgcatcatcaacgccttcttccagtacgagctgaagcacccggagggcgccgtgtccgtgcaccccttcaccaccatctccccctactcctccatgcacgacgaggtgtgccgcctggccgtcgagaagcgcacgtcgctcatcctcctccactaccacaagcgccacatctcgccggcggcgtgcgcgccgccgtggggctccgcgtcgtcaaccgcaaggtgctggaggtcgcgccgtgctccgtcgcggtgttcgtcgaccgcaacgccgggagcgtcggcctctgcgccttcatcccgggcccggtgcaagaccaatcgacgtcctccaggagcaggagcggcgggcacgcggccagcggcagcggccaaggcttcaaggcggccgtcgcgtcgctcttcttcggcggcggcgacgaccgcgaggcgctggcctacgcgacgcgcatggcgcgccacgagggcgtggcggtgggcgtgatccggttcttgccggcgcggggcatcaaggacgagccgtccgaccgccggatcgacaaccgcgccatcgaggaggtgaaggcgctcgcggcgaggagcaggaacatcaaggtccaggaggagctcgtcggcgacatggagaggatcgtccaggtgctgcgggggctcgacgaggcgggctacgaccttgtgctcgtcgggatgcggcacaggtggtacccggtgatgccggcgaacgggatgtcggattggagcgagtgcccggagctcggcgtcatcggcgacctcctcgcctcgtcggacttcgacacgccgtactcggtgctcatcatgaagcagcaggaccagggcgggctgaacgccgccgtgccgggcgcccaggacgtgtggcacgtgaacgacggcggcgccgaggacgcgccagcgccgccaagaaacatgtcaaccgccggatcttagcaggttcaggcagtaggcgattgttctgttctagcctctaggacctggttcaatgtagactttcagattccctttttgcgtccaagtatgttgtgatgtatagctatcaggattagcatcaatccttaaactgagatgagatcttaagattatttcaaggaaacagcattgtgtatagcagcaatggaacaaatgcatccaatgttaatttgacaattcagtcaatgagtaaggtccaaattcc

SEQ ID NO: 25492 - DNA, 1525 bp, Oryza sativa
  ref <308>: DATABASE ACCESSION NUMBER: AK100934
  ref <309>: DATABASE ENTRY DATE: 2002-08-28
tgcatcattgtgtccggctccggctcccgggacacgacacagcgcacgcccagagcgcgctactacttgctttcgagagggttgcgtgcggctttgcatgaggaggaggaggatgggggcactgcacgtcggcgagccgcgggtcagcttccagcagcagcagcagcagcaggtcggcaagaacgggcagcaagggcatggccatggcgccgtggtggaggagatacacgggctcatcaaggtttacagggacgggttcgtggagcgcatcccggcgatccccgacgtgccgtgcacgtggggcacgacggcgtcggtgccgggcgtcgtcatcgcgcgcgacgctgtggtcgaccgtgccacgagggtgtgggcgcggctgtacgcgcctgcggcggcggcggcggcggggagggtgcccgtggtggtgtacttccacggcggcgggttctgcgtcggctccgcggcgtggagctgctaccacgagttcctcgccaagctggccgcgcgggcggggtgcgccgtgatgtcggtcgactaccgcctcgcgccggagaaccgcctccccgcggcgttcgacgacggggtcacggcggtgcggtggctgcggcagcaggcggcgatctccagcgcggccgacgagctctcctggtggcgcggccgctgccgcttcgaccgcgtattcctcgcgggggacagcgcgggcgccaccatcgccttccacgtcgccgcgcggctcgggcacggccagctcggcgccctgaccccgctcgacgtcaagggcgccatcctgatccagcccttctttggcggcgagacccgcaccgcctccgagaagacgatgccccagccaccaggctcggcgctgacgctctcgacctcggacacctactggcgcatgtcgctccccgccggcgccacacgcgaccacccgtggtgcaaccccgtcaccgggcgtggcgcgccgcggctcgactccctgccgctcccggacttcctcgtgtgcatctccgagcaggacatcctccgcgaccgcaacctggagctctgcagcgcgctgcgcagggccgaccatagcgtggagcaggccacgtacggcggcgtcgggcacgcgttccaggtgctcaacaactaccacctctcgcagccgcggacgcaggagatgctcgcccacatcaaggctttcgtcagagccagatagccccagccagtggctaagcttagctgacactcgccgtgtcacgctaattaatccatcctaatccatccaaccatccaaccagtttctgctgcagcagatgatgagtaggtgtcgtgtaagctgtaaattaattacttttgtagtacgtgtcactcaagacaagcgttgtccatcccaatacccaacttggatcgtcgtagcggtgtcggaaagcaaaagcgtagcacataaaaacgacactgccgctatgccacgatgttgttgctccgtgtatcattcatgttcatcaatatacttaaaaagcaagttgtggatactgttttc

SEQ ID NO: 25493 - DNA, 1292 bp, Oryza sativa
  ref <308>: DATABASE ACCESSION NUMBER: AK100935
  ref <309>: DATABASE ENTRY DATE: 2002-08-28
gaacctcctctcctcttctcgccttctccgcttctcccttcccatctgctgctcgcgaatctcctcgtcgtcgtcgtcgtcgtcgtcgtctcctcgccgccgggagaagcgcagggcggagcgcggaggcggaggcgatgggggaccacgaggcccgcggggatgacttcgagaagaaggcggagaagaagctctccgggtgggggatcttcggctccaagtacgaggacgccgccgacctcttcgacaagggggccaactccttcaagctcgccaagaactggagcagagctgcacaagtgtacatcaagattgctaactgccatttgaagggtgacagtaagcatgaagctgcctcagcttatgtcgaggcggcaaattgctataaaaagttctctcctcaagaggctgcacaagcgctaaaccaggctgttgatcttttcttggaaattggtagattgaacatggctgcaagatattgtaaggacattggtgagatatatcatcaagaacaagatttagagaaggcttcagattacctggaaaaatcggctgatctttttgacagtgaggggcaatcatctcaatcaaacagtatcaagcagaaagttgcagaaattgctgctcagttggaacaataccagaaggcaaatgagatatttgaagcaattgctcgccaacaaatcaacaataatcttcttaagtacagtgtcagaggtattctcctcaacgcaggcatttgtcagctatgcagaggtgatgttgttgctatcacaaattcaatggagcgatatcaggatattgacccaacattctcggggacacgagaatacaagcttttatctgatcttgctgcagctatggaggaaggagatgttgccaagttcactgatgccattaaggaatttgacagcatgacacgtctggacccctggaaaacaaccctcctcctcagggcaaagaatgagctgaagaaaaaggaggatgacgaggatgatctaacctaagttttgttgtaaagctcgtttcatgcttaatatggttgcctcctttgcattctggaggctccatgttccatatgatgagcatgagagctgtcgtttgccctgttgtatagaactccttccagctatcatattggatgtttggttgccctggttcttttctggccaccacctgatttgccgtcagtgtttaaactagtaccctacgtgtgttgctgataccttatattataacatgtttgtttcacctgctttcgtcatgatatttattcatgcactttacacacc

SEQ ID NO: 25494 - DNA, 1201 bp, Oryza sativa
  ref <308>: DATABASE ACCESSION NUMBER: AK100936
  ref <309>: DATABASE ENTRY DATE: 2002-08-28
ggccaactttagttttccatcgtgaacgccgggaatcacgaaagatgagagcgagcggagggcaacaaaaaaaaaaaaaagcttctttccgtcccgtgaatcaaaccgggcaaatcgtagaagacctatacgcaaattgcagaagacctatagagctttaaaggattcaacgggaagaacccgatactcgttgggccgtggggagggttgggaggaaccctttgggacgacggcgtgcactccacggtgaggcaggtcgtgattactcatggtgcagccattgattccatcaagatcgagtatgacctgaaaggaaagtcagtctggtcagagaagcatggaggtgatggaggcaccaaaactgatcaggtgaaactcgactaccctcaagaaatcctcacctctgtcagtggctactacggatcattgggaggctgcatcgtcgtaagatcactaacattcaggagcaacctctccaagtacgggcctttcggctccgaggaagggacgcccttctcgctcccagtggcggtcaccggtaaggtcatcggcttccatggcaaatccgggtggtttctcgactcaatcggctgccatttcaagaaggagaagaacgccactccgtcgtccaatgctccttcagctctcaggagcatcacgagacctcatgacaagaatggcaacaggtacgcagatagcaatgctgggtatgacatggttcttgccgtcagagacagaggtgacagctacagtgtcctgactagcaacaatcccaaggaacagtatcctaaccaatcacaggatgctactctctggaacaagatggtgtcactgcctagtttctactcggataatgggaccatgacaataagcactccggtgagatttggtccctggggtggaaatggcggcaccatattcgacgacggtatatacactggtgttcgacagatcaatttaaagcgaggattgggtatatcgacgatgaaggtcctctatgatcgaaatgggcaggctatatggggtgataagcgtggatccagtggggcagcaagggctgagaaggtagtattcgattttccatcagagatcttaactcacataactggttacttcagttcgacgatgatcatgggatcaacggtgatcaagtctctgacattccacacgacgaagaagagccatggtcctttcggggatg

SEQ ID NO: 25495 - DNA, 845 bp, Oryza sativa
  ref <308>: DATABASE ACCESSION NUMBER: AK100937
  ref <309>: DATABASE ENTRY DATE: 2002-08-28
ttgatctctgaattaatctgcactttcagtttcatttttgtgatttgctttacaccgttagttcgttcttcatctttaggcttgagctgttgagcaagtgagatgtctgactggtttatatgatctctccctgtttgcaggccaagcatcacgcttctctatccgctgtaagtacagccacgattttatctacggatatctcatcgttagtaattatagtttggttcatgtgcactgttcttgtgcgtactggtaatcgactgagtgcaggtacgcgtccatctgcgcgatggagagcccgaccaaggttgacgacgagcagtggctggcctactggatcctctactccttcatcaccctcctggagatggtcgccgagcctgtcctctactggattccggtgtggtatccggtgaaggtgctgttcgtggcgtggctggtgctcccgcagttcaagggcgcctccttcatctacaagaagctcgtcagggagcagctcaggaagtaccgcgccaggggcggcgccgccgccaccgtcaccgccggcgaagatcacaaggtgcacattgccaaggctgagcacgatcatgggcactgatggggacatcaggggagatgatctgagcgaaccggaagcttggctgctctagattaattgctgatgtatgatagaaacgccatggtattctgtcgagaaacatttgggagtaccccatatgtactatatctgaaatctgaattgtgaaagattagctactactgtagtttctgctgtagggggaatgtgtactggtctgttttgagttgaggcacttaacagcgttacagtgctgagtgttcactgc

SEQ ID NO: 25496 - DNA, 1896 bp, Oryza sativa
  ref <308>: DATABASE ACCESSION NUMBER: AK100938
  ref <309>: DATABASE ENTRY DATE: 2002-08-28
gattatgcatggcaaagccttctgccacgtcggcggcggcggcgccgccggcggcgagggtgctgatcggtgccagcgtcaacgtggccttcttgctcctgctcgccttcttcttcttcatctcgccacgcggcggctcgccgccggaggtggtttcgtcgtcgaaggaggtcgggatccgggggcgtcgcgatggcggcggcagcggcggcggcggcgtgttccgggttgagagctacggggagaggtgcgagcacgtcggcgaggaggatggccttgatcgccggcgattcccgcgtggctacgtcgactacctgtacctgttcgactgcgtgttcggcgaggagcggcgggttcttggctacgccgtgatggcggcgtggctcgccgtgctgttctacctgctcggcgacacggcggcggtgtacttctgctccagcctcgagggcctctcgcggctgctccgcctctccccggcgatcgccggcgtgacgctcctgtcgctcgggaacggcgcgcccgacgcgctctccaccatcgcgtcgttcgcctccggcgggggagagggggagaccaccgccgtggggctcaacggcgtgctggggagcgcgatgctcgtgtcctccgcggtgctcggcgtcatcggcgtccgcctcggcgcgcgcggggtcgccgtggacagggtggacttctaccgcgacgcgtctttcctcctcgccgccctcgccgccgtggccgtcgtcctcgccgccggcgaggtgacaatctggggcgccctcgccttcacctccctctacgtcgtctacgtcgtcgccgtcgccttcacccacggccgcgccccgagcaaaggccacggcgcggaggcggaccacacggcggacgccttctccgagctctgcaacgtcgcagagacgaagttctacggcgaccaagaaccactcctccccgacactgcaccgctactcagctactaccccggcgacggcgacggcgacggaggcggcggcggcggcggctccaagaagaagatcaggagcgcgttctggtcggtgttgcgcgcgctggagctcccactatggcttccacggcggctgaccatcccggacgcgagcaaggagcggtggagcaagccggcggcggtgaccgcggtcaccatggcgcccgtcctcctctcccacctctgcagccgcgccaccggcatcacctcgcccctcgctgtcctcctcggcgtcctcgccggcgcgtccctcggcgccgtcgccttcttcaccacctccccggacgcgcccccagccgaccacctcgccgcctggctcgccgccgggttcgtcatgagcgtggcctgggcgtacgccgtggcgaccgagctcctcgcgctgctggtctccgcggcgcacgtcatgggcgtcgactcggcggcgctggggctcaccgtgctcgcgtgggggaactccctgggcgacctcgtcgccaacctcgccgtggcgtcgcgcggcggcggcggcgggggcgcgcaggtggccgtggccgggtgctacggcgggccggtgttcgacgtgctcgtgggcctcggcgtgtcgatgttgctgtcgtcgtgggcctcgcatccgcggcccgtggcaatgccggcggaggccggcccattccagacgctgggcttcgccgccgcggggatttgctgggccgtggtggtgatgtccaggagagggatgagggtggacaggacgctggggtttgggctcctggccatttacttgtgctttctttgcatcaacatttctcaggcacttggaccggtatgaactttttttattttttttattcttttcataaggggcccggttggccaccattttgtgttggcccctccgcgcattgcaacgaaaattttaaggt

SEQ ID NO: 25497 - DNA, 1909 bp, Oryza sativa
  ref <308>: DATABASE ACCESSION NUMBER: AK100939
  ref <309>: DATABASE ENTRY DATE: 2002-08-28
gattgctgccctcctctccgtcttcctcctccctcctctgtcgcctgttcttcttcttctcacgatttttttcccctgtaaatttcccggcggcttctcgcatctcgttcatcgtcgtcgtctgctcgcgacttgacggacgaggaggaggaagaagggagcgattggtttggacggtaagaaagggagggacgcgcgggcggccggagccggtggccgacggccattttttcatgcgtggctccctggaggtccacgcgattggcagacacgccgcgtcgccgtgcgccctgagactgaaagccctcccggcattggacatgatgaggtaccaaaggcttagcccggactgcctcccgctagccaacggcggcggcggaggaagcggtagcgtgacacggaagccggcgtcgagatcctgcaaggacgacgatggcggcatggccgtcgccgcggacagctcccgcctctcgtcgtacctcccgtcgtcacagctcgattccaagccgctgcgcgctcgggcgccgcagccgtcgtcctcgtcggccgccgcctggagcccggcgcgcgaccacgcgcacgcccaccacaaccaccaccaccaccaccacccgtccgactcctccgacacggcctcgccgagctccaacggcgcgggcaccggtggcgacgtgctgctgcagtgggggcacaacaagcggtcccgctgccggcgcgacgcgtcctcctcggccaacgcggctccctcctcctcgcagcgccgccagaccgcctccgccgccggcaagatcctgcgccgctcgtcggcgccggcggagaagctcatgccgccgccgcccccatccaccaccaccgggtcgtacacgcgcgggtccaacctgaggtccgcttcgtccttcccgacgcggtccgccgccgccgccgccgtcggagacgcacaccaccacaggtccgccgtggaggagcgatcaggcggcgggtacaagcggtcgccggacaaggcgcacaagtccgccctggacgcggcgctgcacatggattccaagaacaaccaccatcaccaccaccacgactcgtcggtgaccgcaaacggcggcgccggcgccggcgagaagatcggctccgagcggtttgagctgccccggatctacatctcgctgtcgcgcaaggagaaggaggacgacttcttgatcatgaagggcaccaagctgcctcagaggcccaagaagagggccaagaacgtggacaagaccctccaatatgtattccctgggatgtggctttcagacttgacgagaggacggtatgaggtgcgagagaagaaatgtgtgaagaagaggcgtagagggctgaaagggatggagagcatggacagtgactcggagtgacggcagctggaggtcaagcgaggcacccaaagcgaaaggagcaataagattggagtggatggagattgggccattgcaatcaaagtggatggggggagaagaagtaagggcaagccaaagggaaggcgaaggcgaagagtgttttttgtgtaaatggagaggaaaaagaagaggaggatgtgccgagggcaggaggtgcacgcgtaacgcgtttgcctcacacaccctcctcgaggcgcccggcccagcggaagtggtggcttgagacgacgacgacgactatgccccggggtgaatttttttcgtttctttcgggttttgtcagagccggccacctgctcgcacgtcgtcgcagcggcgcacaacttggtgccgcgtttttctccccgcgagaggccattttgtggtgtaattttttgggtgggctccgttggcccggccggcctcgccttcctgtgagcttttgcggtttggtttggttggaatggttacccggtgactcttgtgcatagttctttact

SEQ ID NO: 25498 - DNA, 1595 bp, Oryza sativa
  ref <308>: DATABASE ACCESSION NUMBER: AK100940
  ref <309>: DATABASE ENTRY DATE: 2002-08-28
gacacacaagggaaaaaaaaagatggacaagatgatgcgcacggtgatcgccgccgtcgtggtcggcctcctcgccgcggcccacacggccaccaccgcaccggaacaatcctacggcggcgcaacggcgaccgtggcgccgaagcagccggcggcgggggaagacgtcaacaaggccttggcggcggagacggcggctgccgaggcggaggacgccgccgaggaggaggacgccgcggccgctctggtcaccggcttcaccgccggcgcggcgaactccgcgccgggggtgactgccgtcatgaagccggtgctggagaaggcggacgccgggcaattctaccaggacgtgccatggattccggatcccaacgacgaggggaatcctcccaagtctctgccggcggcgcaggtcctgccggccaagggcggcgctggcgcggcaggatcatcgccgccgtcgaaggaggtgcaggtggattactacgcgacgacccagccgaagaagccggaggagccgccgacggtcgcggcggtccaaaaggacaattgcgtcccgccggcggcgcccaagccagctgttccggcgacgccgtcgacgtctcctccttcgaataaggagtatgctccggcggcgccaggcgtggtgccggtgaaccagccttcttccccggcggcgccagcaggcgtggtgccggcgccggtgcagccttcttccccggcggcgccagcaggcgtggtgccggcgccggtgcagccttcttccccggcgacggcggtgccaaagcctccttccaatgacccgtacgccccggcgaccagcaacactccggcggcggaggagcagaaggacgggctgaacgagaaggcgatcagcgacatcgtgagggagcacaacatgttccgcacgagggagcacgtgccacccatagtgtggaacgcgacgctggcgaagtacgcgcaggagtacgcggatttgaggagaggggattgccagctggagcactctcatggcccctacggggagaacatgatgttcgggacggggaagcagtggacgtggaagaagacggtggacgagtggagcgacgagaagaagagctacgactacaaatccaacagctgcaaggccggcgccatgtgcacccactacaccgccatcgtctggaagaacaccaccgccgtcggctgcggccgcgtcgtctgcacctccggcgacaccatcatggtctgcagctactggccgcccggcaactacgtcggcgtcaagccctactaattcattcttcatcatatcgatcgatccaccacccctgctgctgccctccatctctcacccatcatcgatcgatcgtcatccatgcatccaccatcgtcgtcgtctcatcttattaataatatatatatgcatcagattcttaattattataactaattaattaatgttatcttaacttgttagtgatatgccctagaggctatcatagagatgattatatcacacactatgtttacatatttatccgactttgttccttgaaatagataaacttattattggttaatgaatgtgtgattctttcataagactcttt

SEQ ID NO: 25499 - DNA, 1679 bp, Oryza sativa
  ref <308>: DATABASE ACCESSION NUMBER: AK100941
  ref <309>: DATABASE ENTRY DATE: 2002-08-28
gactcgcctccccaattttaaactcccttctctctctctctcgtcgtcgtcgtccaccgccgcaaaggggtctcgtctctctcgggggcgatggcggcgtcgtcgtcgtcgtcgtcgtcgatggcgtcgccgagggggaggtcgatccgggagacggtgctggagacggtggcggcgtaccaccagcagcagaggatgaggcgcaagttcaggaagagcctctcctacgcgggggagctgtcgccgcgctcgcctcattctatgccaagaaggttgaggctggactcaagaagtacaaaccagatattataattagtgtccaccccctcatgcaacacattcctctatgggtactcaaatggcaagggctacaaaatagagtggtctttgtcactgtcatcacagacctcaacacttgtcaccctacatggttccatgctgatgtcaatagatgttactgcccatcggaagaagttgccaagagagcagcactggatgacctacaaccttctcaaatccgtgtgtttggccttccgattcggccatcattctgccgagccgttcttgttaaggatgatttgaggaaggaacttgaattggatcctgagctgcctgcagtattgctgatgggaggtggagagggcatgggtcctgtcaagaagaccgcaaaagcccttggagagtcgttgtttgacaaggagcttggaaaaccaattggacagttaattgtcatttgtggtcggaacaaaacgctgagctcctcattgcaggctcttgaatggaaaataccaattaaggttaggggatttgagacccagatggagaaatggatgggggcttgtgattgcattataacaaaggctggaccaggtaccatcgccgaagccttgattagagggttgcctatcatccttaatgacttcatacctggacaggaagttggcaatgtcccttatgttgtggacaatggtgctggtgtcttctccaaaagttctagggaaactgctaaacttgttgcccgctggtttggtccagattctgatgaactgaagaggatgtcagaaaaagcgttaaaactggctcagccagaagcggtgtttgatattgtcagagacatccatgagctatctcgggagcaaggggtgatttcacagatatccagttccttgacatcatcctttttcataccatcgccagaaaccacacctatacaacttatgtgaaaaatccgtgtatagctagaactgcattctttgacctcgtgaaatttgcctttgtcctacaatgtcctgaaaaagaaaaatatgtcaatggatttagctggtttgtttcatctgtctcacggcgttgggatgaggtaagcaggatttcgactgcttttcagtttgtggtctctcatggtagttatgggcttgtttgactgacagctgctcttgtgtaatatccatattcggtttttgttaaaatcattcgttcatatgattttttttaaaaaatcctgtcgtcctttgttcagagggaccagcgatgggctgcaaattgtacactgttagttgatgttggaaagtttaaacctctcgacttgtaacatatccattcatgtaagatccatcgtgactgtaaagtgtatgagacaatgacaaattgtgctagtgagagagtcatgtgcttgttgaagg

SEQ ID NO: 25500 - DNA, 1316 bp, Oryza sativa
  ref <308>: DATABASE ACCESSION NUMBER: AK100942
  ref <309>: DATABASE ENTRY DATE: 2002-08-28
gccctcccacaagacgaccgaagaaaaacgggcaatcgccaaatccccgtgaaaccccaaagcggccgcaccgcgggccgagccgccgaggcgatggagcttgcgacgcacgacctcgcggcgctgggcgcggccgacctcgtccgcgtctccgcctcgatcccgcgcgcggcgccgcgcaccttcgcgctgctcaccgcgggcctcgtcttcccgctctccgccgcggtgctcgtccactccctcttcacccaccccatcatcctccgcctccagggcgccaacggcgactactcctcctccgactccgcccagtggctcaagctcttcgcgtaccagttcctctacctcatcctcctcttcaccctctccctcctctccaccgccgccgccgtcttcaccgtcgcctcgctctacgccgccaagccggcatccatcgcctcctcgctcgccgcgctgccgcccatcctcccgcgcctcctccgcaccttcctctgggtctcgctcctcatgctcgcctaccacctcgtcttcgccctcaccgtcctcctcctcctcctgctcttcgccccatcttcctccccgccctccctccccttcgtcctcatccttgtcgtcgtcgtgttcgtcttcctcgcgatccatgtctacatctccgcattgtggcacctcgccagcgtcatctccgtgctcgagccgctctgcggtctcgccgccatgacaaaaagcaagcaactgcttcaagggcgcacccgcacggccggcgtgctcgtcgtctcctacttcgccgcctgcggcgttaccgctgtgctgttccgcgcggccgtagtcaagggccgcggcgaggaggggagccttggcctgagcttgcccggtcgggtgcttgctggtgctgtgctggtgtctgttcttgtctgcgtcaatttgctggggctactcgtgcagagcgtgttttactacgcttgcaaggccttccacaaccagcagattgatcgaagcgcattgtatgagcatctcggagggtaccttggtgaatacgtgcctctcaagagcaatattcagatggagaaccttgatgcataaagggtaagaactgctggatcttgctctaaagaagagagtaggatttgttttgtgctcttctatctagttcactatgatgctttgtaatctgtaagtagtaataatatggaatggtctatgcaatggaacagagatgcataaggaaaattctctttcttttacattattgtgtctctgtttacattattttcctgtcattcatgactaatttatgatatacgggtttcttttct

SEQ ID NO: 25501 - DNA, 3019 bp, Oryza sativa
  ref <308>: DATABASE ACCESSION NUMBER: AK100943
  ref <309>: DATABASE ENTRY DATE: 2002-08-28
agaacgcgttaaaaagatctaggggtgtcattggcaacctgagagatatgcaacctacaggtcgaggtgggtgggctaaagatggaggtaatattagctcatattctagtgatgggtttcagccaaatcaaaatacaagacttggaaataacacaactggaaatcataatatcaggacagatagtacacttgctagtaacttaaataatacgacaaataatagtggaactagtcctggaattgtacaagcaccccaaactaattcagctccgcaaaccagttctgctcctgctgtttcattgcctgctatgttaaaagacattgctgtcaatccaacaatgctcatgcaatggattcaaatggaacagcagaagatgtcagcatcagaacctcagcagaaggtaactgcttctgttggcatgactagtaatgtaactcctggcatggttttaccacttggcaatgctccaaagaccacagaagttgcagcagtcccttctgttagaccacaagttccaatgcagtcagctcccatgcactcacaaaatgatactggagttatacgtatgaaaccacgtgatcctcgtcgcatactccatagtaacatagtgcagaagaacgatacagttcctccagttggtgttgagcaagccaaaagcaatggaactgctccgccagactctcagagcagcaaggaccatttgctcaaccaagaccaaaaggcagagcaacttcaggctattgcattgccttctctacctgttacatcatcagcacggccagtcaccatgaatgcaaatcctgtctcaaattcacagttagctgctacagcacttatgcctcctcatggcaatacaaagcaaacttcaagtagtgtaaataaggcagatccaagattagctgctggacagaatgaatctaatgatgatgctgcaacaagtactggtcctgtaacagcacctgatgctgtgccgcctgctagcccatatggagatgttgatcatctccttgatggttatgatgatcagcagaaggctctcattcagaaggaaagggcaaggcggatcaaggaacaacacaagatgtttgcagcacggaaactttgcttggtgcttgatttggatcacacgctcctcaattctgcaaagtttatagaagtggaccatattcacggggaaattttacgaaagaaagaggaacaagatcgagagagggcagagcgccatctcttctgttttaatcatatgggaatgtggaccaaactgagacctggaatatggaactttcttgagaaggcaagtaaactttatgagttgcatctgtacacaatgggcaacaaggtttatgctactgagatggctaaggttcttgatcctactggaaccctgtttgctgggcgtgttatctcaagaggcgatgatggtgatccttttgacagtgatgagcgagtgccaaaaagtaaagatcttgatggggtgttggggatggaatctgcagtggtgatcattgatgactctgtgagagtctggccccacaacaaacacaatttaattgttgtagagagatacacctatttcccctgcagcaggcgtcagtttgggcttcctgggccatcacttcttgaaattgatcgagatgaaagaccagaggatggtactcttgcttcttcactcgcggttattgagcgcattcacaagaacttcttttctcatcctaatctcaatgatgctgatgtgcggagcatactagcatctgagcagcagaggatacttggtggttgccgtattgtctttagccggattttcccggttggagaggccaatccccatatgcatcctttgtggcagactgctgagcagttcggtgcagtttgcacgaaccaaattgatgatcgggtcacccatgttgtggccaactccctcgggactgacaaggtgaattgggcgctatcaacaggcagattcgttgttcatccaggatgggtagaagcttcagctctattataccggcgtgccagtgagctcgactttgcggttaaataacacgacaatgaatccctgtttgccatccaaagtcgtgagtaacttcctgggaccatccgaagtcgtgagtaaacttcccggggacaggatccggtcaaggaaaacctaacatgacaacaaaaatcaaacaacataagtgaaagaaaaaaccggaccgtactaagaaaacccctaaaagaatctcaggcgaaaaacaggtaaaggaacgcttcatcatacaacaaagcctgaaagaagagagggcaatccacattgtttctgaggtgctgagcgtttgcctgacaaaagggttccagtgtgaaccatgaaagaaaattatgccaagcataaaaaatggcaaatgctcaccaatctccccttgtgtaacatgtagtagtaaatctggtacatttttggttgcagtcctaggtccctgcctctttgctgcagtcctgccaggctcctactactagccacagactactccgtggtggcttgctggtagcagtcacccatcgagaccaggtgagagtggcatgtcgactggcaagagcagcaggcaaggagcaggagcgatactgctttggactgtgtctctgtgtattcatgtggctgtaatactgcagctgccgattccttcctcttgtgccctccctctgatgaaagccacatggaaaaggacacctgaggatgctcctgcctctcttcatcaaaagagatgaggagggttcagggagagggcatatgtactatgcaggattcatgttgcgacagcggagaatttcccttgttggttgaggctatacctttcttcttgtgccaacttgaggagtcaatgggtgtggcagaagaagaacgtggaagatgtggttggtttggtgaacaactgtaagaggagggctcacagggagctcatgctgaaaattactactactaactcggatgggtgaaaactgaaaagattgggatggtgagggatgcttttcatgttttttgtt

SEQ ID NO: 25502 - DNA, 1484 bp, Oryza sativa
  ref <308>: DATABASE ACCESSION NUMBER: AK100944
  ref <309>: DATABASE ENTRY DATE: 2002-08-28
gaggtttcgggcgtcgcgccatcgatcgcgggcgcgcatttgcgttgattccgggccaggctccctccccggccatggcgcagctgccgcccaagatcccagccatggcgacagcttggccggagttcgggggcgggcaccatcaccatgctgcccacggccaccatcaccagcgcagcccctccatgggggcgttcctcgcggcgccattgccgcccttcccgctcccgccgccggcgccggcgaacggcggggcgcagcagcagcagcagcagcagcagcatcagccgtcctgggtcgacgagttcctcgacttctcggcgaccaagcgcggcgcgcaccgtcgctctgtgagcgactccgtggccttcctcgaccccgtttccgacgacaatgccggcgtcggggcgcacgacttcgaccgcctcgacgacgaccagctcatgtccatgttctccgacgacctgcagccgcctccaccgcagcaacagcctgccgcgcccgcggcgagcgcgtcgtcgccgtcggaccacaacagcatgaatgacgagaagcaagacaagggcgagacagatgaggcgcagagcgagtgcgacggcgccacgcccgggcagccggcctcccccgccaccgtcgatcccaagcgcgtcaagaggatcttggcgaaccggcagtccgcgcagcggtcgcgcgtacggaagctgcagtacatctcggagctggagcgcagcgtcacgtcgctccagacggaggtgtcggcgttgtcaccgcgcgtcgcgttcctcgaccaccagcgctcgctgctgacgctgggcaacagccacctcaagcagcgcatcgccgccctcgcgcaggacaagatcttcaaagatggaggcactgaagaaggagatagagaggctgcggcaaatctaccaccagcaaagcctcaagaacgcggaatcccaaccggcggacgcggccccggtccgcggccgcgacaatgccgacctgatcggcagcgagggggccgccgcggccgcgccatgcccgcactcgtgatcggccgagatccggacgctctctagacctctagcgaggtggcgccggcccgtcgcgacaaccacgagcgttgccgcgggggtgggccggcgccgtgttaggattggtgcattgttaatttgggttttgcattctttggggtgtaatgtaacatgatttgttcattcgggttgcttttgttcattcttgtgcatcctctgctgctgctgctgctgctgctgctgctcctgattcttctctacttccctgatttgtaattttattccggcattttgggcgaaggttgtagctaagaattgtaattcagattgggtgaggtcaagtgttttgtttggctggtttttttttctctttttcttttttgtatctgataaaatcaaatgtaatgttccttcatttttcctgtatgatccactgtatgtatttacagctatccatcagtc

SEQ ID NO: 25503 - DNA, 2850 bp, Oryza sativa
  ref <308>: DATABASE ACCESSION NUMBER: AK100945
  ref <309>: DATABASE ENTRY DATE: 2002-08-28
gccaacaccagtcggactgtgccaaaaccccgtccaaaaaccgattaccccggcaattaaccccgtccaaaaacccaacccccgccgccatgctccgcctcctccgccacgctcgccgccactccacctcctcctcctcctccgccgccgccgccgccgtgcccctcacctcgccggccttcgccgtcttcggcgccaacacgggcgtcggcaagacgctcgtctccgcgggcctcgtcgcctcccttctcgcctccccctccccttccccttccaccgtcgcctacctcaagccgctccagaccggcttccccgatgactccgacgcgcgcttcgtcttcgaccgggcccccgcgctcctccgccgcctccgcctcgccggcggcggcgcctccacccgcctcgtcgcgtccaaccacaccctcttcccttcccccgccgtggatcccctccccgagcgccaggacacggtggtgaactacggcggtgaggagggggtggaggagaaggcgctcgtgtgcaggacggtgtacgcgtggcgggagcccgtgtcgccgcacctggcggcggagagggaggggatgccggtggaggacgaggaggtcaggtggctcgtggaccggtggctggcggaggaggacgggggtggggaggtgtggaaggtgctcgagacggccggcggcgtcgccagccctggcccttctggcacgctccaatgtgatctctatcggtcctctaggttacctgcagttcttgttggagatggtcgtctaggtggtatttcatctactttatctgcctacgaaactctgttgctcagaggatatgatgtgggctcagttattttggaagatcgtggcttgtcgaatgacagattcctgctctcatacttgagaaagagggtacctgtgcatgtcctgccaccaattcctgaggatcccaaagacgacctaactgattggttttctgagtcatcctcagcttttagttcacttaaagatagtctgcaatcttttcattcacgaagagttcaaaggctaaacagtatgcagagaaaatcaaagtatttgttgtggtggcctttcactcagcatgatcttgtacctgtagattctgttacagttattgattcgcgttttggtgagaatttctcagcatacaaggttaaagacaaaacgattgttccccagtttgatgcatgtgctagttggtggacacaaggacctgattctaacttacagattgaacttgcaagagatatgggttatgctgctgcaaggtatggtcatgtgatgtttccagagaatgttcatgaacctgctcttcgttgtgcagaacttttgcttggtggtgttggtaaagattgggcttctcgagtttatttttcagacaatggatctactgcaattgaaattgctttgaagatggcatttcgtaaatatgcatgtgaccatgggattatagtggacagcgaaaaagatatcagaagtgaaggaagtgttcattttaaggtccttgctttaaatggttcctaccacggggatactttgggtgctatggaagcacaagctccatcagcttacacatcttttcttcagcagccatggtactcggggcgaggactttttctagatcctcctacagtgtacattaaaaacaaaagcgccaacctttctcttcccccatcgataatgcatgatcaactgagttcttgtgatacatgtttttcctcattaactgaagttttttgcaagaccagggacacatcgtctgctgctaatgtatatgtttcatacatatcacaacaactatcacagtatgctatgtcaaataattcagagcatattgcagcattaattatagagccagtaatacaaggtgcagggggaatgcatttgatagatccccttttccagagattacttgtcaaagagtgtaaaaatcgaaaaattcctgtcatatttgatgaggtatttacaggattttggcgtctcggtgtggagtctgcttcagagttgcttggctgttttcctgatatctcttgttatgctaaattgatgactggtggcattgtaccattggctgcaactttagctacagagcctatttttgaagccttcagaagtgactctaagctaacagcactcttgcatggccattcctataccgcgcatcccatgggctgtaccgcagcagtaaaagctatccaatggtataaagatccctccaccaattcaaatattgatcttgatcgtatgaagctgaaggagctatgggatagtgcactagtgaaccatttatcgtccctgccaaatgtgaaaagagtggtgtccttaggaactctgtgtgcaatcgagctaaaggctgagggatcagatgctgggtacgcatcactttatgcgagttccttaatccgacaacttcgtgaggaggataacatctacgctcggcccctgggtaatgtgatataccttatgtgtggtccatgcacaactcaagatagctgcactcgccagctcgccaaagtgcatcgtagacttcaaaagttgaattgagttcgccactaacaatagtgagcagaataatgaggtatcagacagtcccataaaataaaagggtttgtgtccatgccattataattttcgcgttgaattgagtttgccaataatatttaatgagcagaataatgaggtgtcagacagtacccgtaaaataaaagggttaattgtatccatgatattataactttcacggttttgaaatatgtcattactattgacataattggaaccatataaaaggtggggtgtgagacatgctatctggttatgttcacacgagtttgtggcc

SEQ ID NO: 25504 - DNA, 3691 bp, Oryza sativa
  ref <308>: DATABASE ACCESSION NUMBER: AK100946
  ref <309>: DATABASE ENTRY DATE: 2002-08-28
gatctcctccaaaaccctaacccctccactttctcttctcgcgccggcgccatgacgctcctcgccgccatcaccaatccctccgccgccgccgccgccgccgccgtcgcggcgaaccccatcgtcctcactcccggcgccgctccgccaccgccgacctcctccgcgctccccacccagatcccgccctccgactggtccctctcccccgccgaccccgccctcgccaccgccgcctccttcctctccacctccctctcctccacctccgtctccctcccgcgcttccgctccctcctcgcctccttcctcaccaccctctccaactccctctccctccccgccccctcccccaacctcccacaagccatccgctccgtctccccctacttccccgccgccctcgcctcccccgtcgcctcccgagcggcgagcctcgctgagtacgacgtcctcctcgccctcgccgagtgcggcctcctccgccaccccccgccgagcctcctttcctcgctctccgaggccgaccgccccgagctcgtctgcgccgtggtccgacaggccgccgacctccgctcctccgagctgctcgcgacgctccgctgcttcctctcgccggcctccgatgccgcctacgacgccatgatgagtgtcaagaaccggtggaaggaagccgcggtgctagcggtcaacaggtgcaaggagaagggcgcggggaagaaggtcgatgccatggcgaggcaggcggcgctgctgctcatgatgggatacgatgggttcacctcaccggaggtgtgcctgcattacctgtttgcgtctgagaatgtggactctgtggtcttcggcgcagccgtatcggagctggatggtggggaggtggtcaggctgatgaagtacctcaccaagtggatagggaaataccagaggttcccagaggcgcaggcatgcccagaggctgtgggaatgccagggctggagctgtgtgacattgtgccctcatttcgggtggtggctggggcgctaggattggtgtttgaccagcacttctcgcacctagcgctgaatgcagagttgaaggaggatttgaaggccgcggagatgatggtgaaacagctggccacagaagctgaatctgcagggcctatcctggacttgcttcgacgtatgcagcaagatgtgtgagacactaaaatgtgcccctcaattttttttactgatcttagctgttatgctcatgtccgagaattttgattgttttactgcattgcagtgatgagttatgtgctctattatctaatatcatagtatgataatggtacatgttctgtttggaacccgacatgtctttgagtggtattactacactgctagctagattgtcactcccttagttggtatgccctgcgatgtgctaatgcccgctggccactgctagttaaattgatgtgtaaaagcaccatttacaaatgcaaattcaaatgtgtcgtggtagttaactttctgatattatgtgggaagagaagcttcaaaatgctgccatttctcatatgagtaactaaattcgtcattcataacccaagccaattgaaatacaaaattgttcaaatagtttagaacttccgacaacaaacattttcatacataactactttaacattactgaaaactcatatatttgcttctttcgtttaattcatttccattgttgggtctgactgaggtgataaagcttaattcgttgacaaatttacttcttgtacataaaactgaatagtccttagaaccaattgtatctgtgacttcaatggttgaaggagagagaaattgattggctgttctgcatattctttgtgaaaatcaaataaggctgaacttgttgacaatctttcttcttgtgtgtaaagctgaacaatcctcacaatcaattgtttctgggacttcaaagggttgaatgagggtgaaattaattggctcttctgcatatgttttgtgaaaatgactctgtttatcagtactcagtagtcagtacaaatagttcagttgaaaacgtaaagatgacagcctaaatatataaagtttttcctagtctatgctgtttctgggaattcagaacataatcaattctacatgactttatgcaataattggtcttgatgctttccaatatgcttcttttttctgtaagagggatctacttgtagtcttaatagtgtccaaggaaatcgattctcactgatctgatcttataatctgaattcttgtttcttagatcagtgttcaaataaggaagcccttgatgtgcttcaccttactgcttgaaggaactaaatattttttcctaaatatatttgagaatgctgatcatacctcatcatttcaaatgctgaccaagtattccatcagacaaaatgatagagctacctaccaggtagttacttgtatgatcctcactaagtcactaatttgtttccaaattgctgaattttagattctggtatcctgtgttcgatccagttttgtgatttaagattattcattactacttgatcttttgacaggtttaagcttgacagtattacctctggtatctttttagtgtaaaatggtgcccatttttaattatgaggttacatgtcttaagtaatgctcaaatattctgaccttcttgtaaatttactttgaattggacacacccatgtgtaagatgtgaaatgctggattcacattttttgaagtacaaaagaaaaaggtgcatgcactgggagcctgcctcatgcctattgaccaatttaaacgacagtgaagacgagagtgcaacagatgactggtgccataggcagtagaaaaaggaagagaaatggagcataccagccaaagttgaagacgttctcaaccaagcgggctatcttgggatagcagaatagctgccaaagttgaagacgttgtcaaaacaagcggctatctttgtgttttctggtcccaaggtatgatactccagctctcctgtttaccccatcttagaaaaaggaaaaatgtcatcttttgcatattgaaagtggtaggtaaggcagttcaatcttcaatcttcccaaaacgagctcaagcttcctaaaagtttctttttattaaagaagtaaactttccatttatgttcatctgagaaaattctatacaattagttagtgcctcgagtacattttagtttgatgcgtcacttcttttgcttcagttagcaactaagctcgctgatattatctaggtctcatggattattaaattgtttttggttgttggctagctgggtttgcaatcgtccccttccccagtttagatatatggggtatactttgtgagattttctctcatcctttgagatgtatgtacctcatccttgagatatacctctccataaaaagaggtaccaaaattaatctaacaggttggaaaaggattgaaaacttatctttataaatatttcagacttttttttttacattttctagcggtatagatatttgattaagaggtatatacctcaggactaacactataacactatgaggtatatgtacctctctatacctcagaacgactagaaaagtcttgccagtgctaatcataaacttgttttctaatcagttaaaccggtataattttttacctctcaaattgtgaggtatatacctctccc

SEQ ID NO: 25505 - DNA, 1963 bp, Oryza sativa
  ref <308>: DATABASE ACCESSION NUMBER: AK100947
  ref <309>: DATABASE ENTRY DATE: 2002-08-28
gcactcacccacatcacacgctgcgacgacagcattgcgagctatagctaagctagtagctgcaatggcggttcgctacgagaagaaggcgatgtgcgcgctgctgctctcgctgatcatggtggcgctctcggtggccgccgccggcgacggcgacgcgccgccgtccacgccggtgtcgccgacgacggcttgcaacgacacgacggaccccagcttctgccggaccgtgctgccgccgcgcgggtccagcgacctctacacctacggccgcttctcggtggcccggtcgctggactccgcccggaggttcgccggcctcgtcggccgctacctcgcccgccaccgcggcctgtcgccggcggccgtcggcgcgctgcgcgactgccagctcatgtcggagctcaacgtcgacttcctctccgccgccggcgccacgctgaggagcgccgccgacgcgctgcccgacccgcaggccgacgacgtgcacacgctgctgtcggcgatcctcaccaaccagcagacctgcctcgacggcctccaggccgcgtcgtcgtcgtggtcggagcgcggcggcggcggcctcgccgcgcccatcgccaacggcaccaagctctacagcctctcgctctccctcttcaccagggcgtgggtgcccacggcgaaggggtccaagcaccacggcggcggcaagaagcctcaccaaggccacggcaagaagcagccgccggcggcggcggcgagcatgaggagggggctgttcgacgcggccgacggcgagatggcgcggcgggtggcgatggaggggccggaggcgacggtggcggtgaacggggtggtgacggtggaccagggcggcggcgggaactacacgacggtgggtgacgcggtggcggcggcgccgagcaacctggacggcagcacggggcactacgtgatctacgtggcgggcggcgtgtacgaggagaacgtggtggtgcccaagcacaagaggtacatcatgatggtcggcgacggcgtcggccagacggtcatcaccggcaaccggagcgtcgtcgatggctggaccacttttaactccgccaccttcgctgtggtggggcaagggttcgtggcgatgaacatgacgttccggaacacggcggggccgtcgaagcaccaggcggtggcgctccggtccggcgccgacctgtcggcgttctacgggtgcagcttcgaggcgtaccaggacaccctctacgcccactccctccgccagttctaccgccgctgcgacgtctacggcaccgtcgactacgtcttcggcaacgccgctgtcgtcttccagtcctgcgccttcctctcccgcctcccgctccccggccagtgcaacaccgtcacggcgcagggccgatccgaccccaaccagaacaccggcacctccatccagggctgctccctcctcgccgccccggacctcgccgccgccggcgacggcggccggacgctcacctacctcggccggccgtggaagaacttctccaggacggtggtcatggagtcctacgtcggcggcctcgtcgacccggccgggtggatgccgtggtccggcgacttcgcgctcgacacgctcttctacgccgagtacaacaactccggccccggcgccgacaccagccgccgcgtcgcctggccgggctaccacgtcctcggcgccggcgccgacgccggcaacttcaccgtcaccagcatggtgctcggcgacaactggctgccccagaccggcgtccccttcaccagcggcttcctcacttccgatccacctattagctaatgcattatttaattaattatatatatgatcatctaaacccatctattaataattaattaattatagaatgacaaacacataatgtactactactattcgatcgatctcggtgtcggcattattagttagtttacttcttatttattagtt

SEQ ID NO: 25506 - DNA, 978 bp, Oryza sativa
  ref <308>: DATABASE ACCESSION NUMBER: AK100948
  ref <309>: DATABASE ENTRY DATE: 2002-08-28
gagggctcccggattcaccggtcgatcgcgtcgcgcgatccctcggcgaggccctgatcggcggcaggagcagagccatgatcgacgacgacgaggaggcagcgctatggtcgcgacgaaacacgccagtggagcaccccatccgccgcgcgtacgaccgcgtcgccgccgccctcagggagaagcgatccaacgagcggctcgcccgggagtgcctggaccactacaacgccctgcacccgggcgacgagcacgacctcgcacccggcggcgacgtgacgctgtcccgctggcactgcagcaccggcgcctggacgcacggcaacttcgtggctcgccgccgccggcggcaatggcgccgctgcctcgccttcgtcctccccgccacgcggacgctcttcttcttcgagcacatgtccggcgacgactacctcggcgtcatcacgtgcatcccgatgccggacgagccggtcggcggcttcctcgccagaatccctgtcatccgccggtgggcgacccctcgccggagcggcaggtgggactgcgtctgcaagacgtgccgccgcggcctccgcgtgacgcaccactggctgaagaggaaggtgatcggcgagttcccgtgcgggcacatggtggcggagagcgtctgcaagatgtgctaccactactccgacgtcgtccatccgagcccgggcaagttcgcgcgcgggtacctggagcacgaagacgaatttggccactacggccgtaatggcttgagggattatccatgttaactaaccccagcgtgtttctcttcgcttgcaatgctcacattagaagatctacactaataaatacgtatgtaacagatatttttgtcacttacaggtaggagtagaaatttgacatgttgcagcaaacaattcgtcatgcatgttagagctgcacaatttcagattttgctatatatatttcagaatttgatgcttgtgttgg

SEQ ID NO: 25507 - DNA, 2992 bp, Oryza sativa
  ref <308>: DATABASE ACCESSION NUMBER: AK100949
  ref <309>: DATABASE ENTRY DATE: 2002-08-28
ggttggcgacgcggctgtcatctctctcgcccccgctcccttcccttctcctgctcagaataccaagtactcggatcccgaaccctctcccccctctcgtcgtcgacggcgacacgacgactccgctgccagcgcgtcggcctgccccagcggctcggagcaggggcggagagacgggaggatggaccccgagaagcgcggctacaggctccaggaatttgtcgcacatgatgctgaagtgaggtccttgtctatcggcaagaagtcaagccgtgtgtttatcactggcggcagcgaccgcaaggttaacctgtgggccattggcaaacagacaccacttctgagcttatcaggccacactggctcagttgaggctgttgagtttgatacagcagaggtgcttgtgcttgctggttcttcaaatggttccatcaagctctgggacttggaagaggctaaagttgtgcggtctcttactgggcacagatcaagttgcacctctgttgaattccatccatttggcgagttttttgcatctggttcttcagatacagatcttaagatctgggatataaagaaaaaaggatgcattcacacatataagggtcacagaggagcaattagaataatcagatttgcacctgatggacgatgggttgtcaccggcggagaagataatattgtaaaagtgtgggacttgacagctggaaagcttctacatgacttcaagttccatagtgggcaaatccggtgtattgattttcatccgcaagaatttttgcttgcaacaggctcagctgatcgaacagttaagttttgggatcttgaaacttttgaattgattggttctgctggacccgaggctactggtgttcgctctacggtctttcacccagatggaaaaaccctattctgtgggttagaccaaagcctaaaggtattctcttgggagccagtaagatgtcatgacgttgttgacatgggatggagcaatttggctgaccttagtatttatgaaggaaaactcttgggatgctcctaccacgaatgccgagttggtgtttgggttgctgatatatcgctcattgggccctatgctcttggtgttttgcccaaagcaaatttctttgctgagctggtacattctttagacgacaatccttcgaaaacgattgataccactgccaagtccattcctgctctagcaacgacacatccaaaaaatctgtacaaggtcaaggaaacagggactgctgaaagtggaattcgtggctcaaatttgactccagcaagtatggataaaaccaagagagataagagtggtgcaactcctcgaagacctgattcttctttcaaatcatctattcagagctctactccaatgaggcgcatgaaagctgctgatagtccatacacaaatagaaaaacagtggagcgcaattttgcacagagggatgcctcgctagcatcccgtacgggaacagctgataattcttcaactgttaaaaaaggccatcttgctgagtcagtatctgtaaaagatatttacactacaccacagactgtttctgtgcctgtcgttatgcctagagacattttagaggacaaaacagcaggcagcattagtggaggaatcagagggagagctgcagttgcagatgatttccatgctcctgttcattcaaggaaactttcagttaatagttttgtgggtgatagtgttaactcaacaaaatccatgctaactgatcctgatgtttgctctgagggtttctctggcttaaaattctcttttggactaactccatattacaagaaagaagaatatgataatgtggataaagttgatagtatggataaaggtgataatacacaaatgacagaaaaattggacagaacagtgtcgttggagcatcaacttcagtcaaatgatacctctgagccaccatgttctactacagaaacaaccaaggtcaaatatgtcagaggagttgctgtgccattaggaaaaacatagtctcttgttgagagatgggaaaagagagaggctactaatgttgagtgctcaccaccaactggttcttgtggtgaccgtgcagtgagatctgatggtccttcctccttttcagcagaaccaagtcaggcatatgagaaggacttgtcaacaattgatgaggcgatgattccaatcaatttgatgcagaaccatgatgaatttataaatgccgtaaaatctcggctgacaaagttagagatgatgcgtcatgtctttgaccaaaatggtatcaaaggagcgattgctgcagtggcaaagttgcctgacaatgctgttctagctgatgttgttagtactctgaaggggaaacttgatctcttcaacctagacattttcttaagctttctgcctgttcttgcggggttactgaccagcaaggctgaaaggcatgccattgtttctttggaattgttgttggatcttataaagatctttggaccagtattcgttcaacattgtcagctcattcagcagttggagttgatattcaggctgagcagaggttgcaacgttgcagtcggtgttttaaccatttgcaaaagattcagcaagttctacacccgttgattatgcggggtggtcaatcagcacaacttgcccaagaactgaacctgtctttgcaagacttggtggtgatctgaaacaagcggggaggttcattcatactagtacaacacagtgagagtagataactagacatcattctttttggcaaaaaacgcgccagcgccatacagtttttgtagcttgttgccatagctttgcaattgagctgtgtaattgtgttttgacttggcttttgattcggcgtagtcccctgttgtacatgtgagcttggctgtgcataatctgtaattaacatttgttacatggacagccccggatgagggagaagcaagttcaaaaatggttgatgtcagttcaacgtggtgattc

SEQ ID NO: 25508 - DNA, 1825 bp, Oryza sativa
  ref <308>: DATABASE ACCESSION NUMBER: AK100950
  ref <309>: DATABASE ENTRY DATE: 2002-08-28
gagcctcctcccatcaccgaggagagagagagagagagagagtagtgagagaggaagacgagagagccgcctccgcggccatcgccgccgccgcagcagcggggccactaccccgactgccccctcccctcctcccatggccgcgatgccaggtgggcccgaccttgccggggccggtggcgccgtcgccgtcgccgtcgacgcgatgcaggtcgacgacccgccgcgtgcgtccgccgaggagaagcatggtcccactataatgggaggaaatgatccagtcacaggtcatataatttcaactactattggagggaagaacgatgagcccaaaaggactattagctatatggctgaacgagttgttggaactggatcctttggtgttgtattccaggcaaaatgccttgagactggtgaaactgttgccattaagaaggtcttacaggacaaacgatacaagaacagagagttacagataatgcgatcaatggatcattgcaatgtcatctccctaaagcattgtttcttctctaccacaagcagagatgaacttttccttaacttagtcatggagtttgttcccgagtcactttatcgtgtcctgaaacactacaaagatatgaagcagaggatgccacttatatatgtcaaactttacatgtatcagatattccgcggattagcttacattcacactgttcctggagtttgtcaccgagatataaagccacaaaatatcttggttgatcctcttacccaccaagtgaaggtctgtgattttgggagtgctaaaatgctgattaaaggtgaagcaaatatatcttacatatgctcacgttactatcgtgctcctgagctcatatttggtgcaactgagtacacaacatcaattgatatatggtctgctggatgtgttcttgctgagctgcttcttggtcaacctctgtttcctggtgaaagtgcagtggaccagcttgttgagataattaaggttttgggtactccaacgcgagaggaaatccgttgtatgaatcccaattacacagaattcaaatttccgcagataaaagcatgcccatggcacaagatcttccacaagcgaatgcctcccgaagcaatagatcttgtgtcccgtctccttcagtattcgccaaatctgcgatgtactgcgctggaggcatgtgctcattcattttttgatgagttacgagaaccacatgcaaaactgccaaatggccgtccgtttccgcctctgttcaactttaagcaagaattagcaaatacacacccagagctcgtgagcaggctgttaccagaacatgcgcagcggcattcaggattttaattcattgttttgcactggaccataggacgaagtgtggtatgacgacatttacacttgtctgctcatacctgtgtatgccaaagggcaaataacatttctcaccttaaggttttagaacctaatcatcttcttgcaaagctgaaaatgggctcccctgacaaggtagtgtgcggtgtgccgtactacaatcaaatgttaaaccttgaggaggccattgtgtccagtgttctgccaagaggagcccgaatagctggagggatggtgggtgtattgttaagctgtggagggtgacttttatgttgaaacttcctttgctgtatgttccatgcctgtaccgcacctgcatccattcaacctcatattcacaactgatgtaatcatgataaaattgaatgtgtcaatgatggtcgattcgtatgccattatatgcgaattgactgttgtttctattatgatcaacttatcctgttattactg

SEQ ID NO: 25509 - DNA, 1630 bp, Oryza sativa
  ref <308>: DATABASE ACCESSION NUMBER: AK100951
  ref <309>: DATABASE ENTRY DATE: 2002-08-28
catcgttatggcccaaccacattgacaacacgcggcacacgctgcgtccaggccgatccggtgttgccgaacagcctgctcgtgtcgccgccgcgcgagtacaaaacacgctcggcacgccacgcgggggcggcacgagctttccacggtggattccccccatccatccctctcgcccgagttccctgcctcgccgtccctcctctcatcttgctttccccttcttcgcccacgcggccgcggccaaagcccaccgaccgtgcctgccttccccctaccacatcaccgccgcggcgtccacccgaatcccccctcccacaagacgaccgaagaaaaacgggcaatcgccaaatccccgtgaaaccccaaagcggccgcaccgcgggccgagccgccgaggcgatggagcttgcgacgcacgacctcgcggcgctgggcgcggccgacctcgtccgcgtctccgcctcgatcccgcgcgcggcgccgcgcaccttcgcgctgctcaccgcgggcctcgtcttcccgctctccgccgcggtgctcgtccactccctcttcacccaccccatcatcctccgcctccagggcgccaacggcgactactcctcctccgactccgcccagtggctcaagctcttcgcgtaccagttcctctacctcatcctcctcttcaccctctccctcctctccaccgccgccgccgtcttcaccgtcgcctcgctctacgccgccaagccggcatccatcgcctcctcgctcgccgcgctgccgcccatcctcccgcgcctcctccgcaccttcctctgggtctcgctcctcatgctcgcctaccacctcgtcttcgccctcaccgtcctcctcctcctcctgctcttcgccccatcttcctccccgccctccctccccttcgtcctcatccttgtcgtcgtcgtgttcgtcttcctcgcgatccatgtctacatctccgcattgtggcacctcgccagcgtcatctccgtgctcgagccgctctgcggtctcgccgccatgacaaaaagcaagcaactgcttcaagggcgcacccgcacggccggcgtgctcgtcgtctcctacttcgccgcctgcggcgttaccgctgtgctgttccgcgcggccgtagtcaagggccgcggcgaggaggggagccttggcctgagcttgcccggtcgggtgcttgctggtgctgtgctggtgtctgttcttgtctgcgtcaatttgctggggctactcgtgcagagcgtgttttactacgcttgcaaggccttccacaaccagcagattgatcgaagcgcattgtatgagcatctcggagggtaccttggtgaatacgtgcctctcaagagcaatattcagatggagaaccttgatgcataaagggtaagaactgctggatcttgctctaaagaagagagtaggatttgttttgtgctcttctatctagttcactatgatgctttgtaatctgtaagtagtaataatatggaatggtctatgcaatggaacagagatgcataaggaaaattctctttcttttgcattattgtgtctctgtttacattattttcctgtcattcatgactaatttatgatatacgggtttcttttcctctcc

SEQ ID NO: 25510 - DNA, 2957 bp, Oryza sativa
  ref <308>: DATABASE ACCESSION NUMBER: AK100952
  ref <309>: DATABASE ENTRY DATE: 2002-08-28
ggcgcgcgccgtccgcccccaaaaaccctcgccccaaaccccgcgccggccgaagcggcggctccgtgcggatgccctcccgtcccgtcccggcgcgccccggccggcggtagtaggaagtggggggcgccgagcgtaagatgcggcgcttctccccggccgccgcggcgctgctcctccgacgctcgctcgccgccgccgccgccgccgcctcaccagcgctccgctcgggtccgagacagctggtgcgtgcctcgcttcttgacgaaagtttgtctacacagacgagttcagcggcttcaaccatggctgtgcagtaccaccaatggtctagttcagcagacggggatgatgatgaggttcttgaggctttcaatcgggactgttgtaccgatgcaggtgctggtgttttggatgattcagcatctactgcctatgttgagaagctctgcacatcaggcaacctccctgatgctgttcagattctccgacatttacatgataggaagatccatgtaggattgggtacgtttaatttggtgctggagcaaacaggcgaagtgaacaacttcgttctttttgccaaggtgttcaggtacctgctgctttccaaaatagctcctgacttgacttcttatacaaatgttgcaaaggcccttcagaagttggatgactatgaactaatacttaaatttgtgagacaagttatggaaattacacatgatagagatcctacagtgatgaatcgcattgttttcaccacggctaaatatggacagattgataaatgtttgatcatatttgaagaactgaagaaagatcaaagagggttagatgttgtcacattcaataccattttggacatgcttggaaaggctggtcgggtggatcaaatgcttcaggaggtgaagctaatggatgaacttggccattctcctgacattgttacatacaatactgtaataaactgcttgcggaggcttggaaggttagatcagtgcaaaatcttcgcaagagaaatggttgagagaggcatcgatccagatttaagaacatatactgcactgattgatattttcgggcgggctggccatattactgaagcccttgaaatgtttgaccagatgaaaaggtcacatcaaccttcaatttatgtctaccgggccctaatcagtgacttaaagaaggctggacagtttgaacttgcacaaaagttatctgaagagatgaaaacaagtgcttcagaattactaggccctgaagattttaaacataagttcaagggtagaaagatcaacaagaacaagtaagaaaactgtcaatgatcttccaggtgtgaatatttcgtttgcatgtgccttgtgctcatccactgtttcagccaaagattctgggataagttgaaatttttcagggaatgtatctcattaacaatgagataatcacatgggcttacaaaagagtgatgattactaacagatacaatgatatcaggccgagagaaccagaatataaatcataaacctctttgaaatatcatggttggaggcttttgctgatgtgcatttgaagagacaggaacacacttctctcatttatatcttcacggatgcaagagattatctagagacaggtcctttgcttatgagacctgaactgtttatctgagattgttccaccatagcgcaaacttgagccaatgaagagttaattctcgattgaattatgtgtgatgtgcttctactggattatcatgtgaatgacttgtgatttgttcagcactcactggttcaatttctgcttgttctgcacttctacaagttcaatttcagcattgccattcatgttcagtgccgtgaagaatagttggagccttgagtaagttgtttaggtccttgtcgtggatcactagatataacaaattaaatatagatcacattcttttattgtcctctactttgccatgcagccaagtagaatattttgtactcatgtaaactgttagtccaaaggaagtggctaaatttctgtcgatttttcctcccattttattagttttttggatctttggattgcatatcaagattcgtgcaaagaaactgaggttccacctgttttgtttttttattcgaaccccctttgttactgcgcctcctcctttttgttttcttttcaccagatggagaggggggaagctacatgagaggagaggtgatgggggcgatttcgtcgccggtagatcctgcagcggtgagcttcctgatccctcctgtcatttttgtgttgattttgtcttccttgtcctctgcaggtttcagcaatctatgactggaggccagtggtgtcgagcttggccaggcttttgtcggtgtagcacttcttctgtctgtttccacattagagatacctagctttagatgagctcacctctgaagtcagcatgctcaatcttgagcgtgctaggcaaataaagagtcgactggtcgctatatctggcatagttcacaaggtcagggatgaactacagtgctagctagatgacgacatcgacatgacaaagctcgcttaccactcagctggctgccagtcatcaagatttgacatcgagaaagaagcaagcgagctcgaagatagtaataggtatactcctacaagacaaaaaaaaaaaaaaatcttccacaagttgataagttggtgcttcatccaaccatggacatgacgtgtgcctgaatgcagcgccagggaggacgatgttgataagttgcaaacatgcttccacaattttcatgttttcttgggatgatagcatacggagtataagccttcattttatatctttacctacaatattcagtcaagcatctcacccttttacttactgataacaatgtaaagatagatgcattgctcgagtacattaaaattggagtggcattagttttgaagcattattcctg

SEQ ID NO: 25511 - DNA, 2632 bp, Oryza sativa
  ref <308>: DATABASE ACCESSION NUMBER: AK100953
  ref <309>: DATABASE ENTRY DATE: 2002-08-28
ggcctctgccgcctctccttcccacccacctctgctctgctcctcatcgtcgtcgcgcggccagctcagccggccggagaatccaccgaatccggcgcgaatcccgcagccatgttcggcgactccgacggatccaaggacgccaaccccggggcgccgccctccaccaccgacccgcccttccccaaccgcgagctcaccctcagcagctacctctgcgagaagccgacgctcgcctccgccgccgccggtggcggtggcggtgccggcccgtcctcgccgccgaaccctgctgcagccgcggctggcgacgacggcaagcactgcgtcgagcgcgacttcctccacctctccgcgcccaagcgcggggatccacccggcgacgactcatccgtcgtcggcggtaagaagccccgcctcgactccctccagctctcgctgtcccttaactccgacggccccgctgctccgccgtcgtcccagccgccgctcgcctcgctcctccagcccgtccccgcgaccgatggagatctacggggagcggcggcggcggcggccgtgcccgcggcccccgccaggaggacctacagcgcgacgacggcgcgcacccgcagcatcaactccgacgacatgtcctactcctactccatcttctcgcacaaccctagctgttccctcacgcacaactccaccgacatctacgccgccggtgaaggtaccaacggctccgttcacagccgattcaatttccgccccatgggggacggcagcgtcgccttcgccacgccgccgctgaaggagggcacgtcgtcgttcttccccacggagctccctgcgaggatggcggcggcggccgcggcggctgctgccagcgcgggtggcagcttcgacggcggtcgcggtgggcttcacgcgtcgcgccctgacaagatcctgcgggatattgtgtccgactctgtgacggctatggcgcaggtgctgcaggatttcccaagcgaacgactggagttgctgcgagaggcagtgcggggcatgattgactctcatgagaagagggatgagctggccagcctgcagcggaagcttgagcgccggtcagacctgaccaccgagacattggggagggcgaacaggacgcagcttgagatcctggtggccatcaagactggaatcgcgacgtttgtcaccggtaaaggccgggtaccaagcagtgagcttgtagaaatgttcctcatgacacggtgccgcaacctgaactgtaagagcacgctgccagtggatgactgcgattgcaagatttgctccaccaagaaagggttctgcagcgcatgcacgtgttcagtatgccacaagtttgactgtgctgcaaatacctgcacctgggttgggtgtgatgtctgcggacactggtgtcatgttgcatgcgcgctggagaggaatttaatcaggccagggccgacgctgaaggggccaattgggacgactgagatgcagttccaatgccttgcttgcaatcattcttctgaaatgtttggatttgtcaaggaggtgttcaattgctgcgcagagaactggaatgctgagactctgatgaaagagctggattttgttaggaagatatttgctggttgtgaggattttgagggcaaggggcttcatgccaaggctgaagaggtcctcagcttgcttggaaagaaaattatttctcctttggatgcaacaaacagtatcttacaattcttcaaatatggagttacagattattctgttactggtagcacgtccaaaggtatattggcagctcaggcaagtcaatctacagatatgcggtctcttcaaactccaacgatcacaccaccgaaatcctcattcaacttcaagaccactacttccattcttgacaccgatgcacttaagcccagcccaaagccactctctattgaaccccatttcagcaccgcttctaaggaggatgactctagcctcgaaaccatcgtgaaatgcaaggaagctgaagcaaaactcttccaaaagttggccgatgatgccaggaaggaagtagatagctaccgccagattgtccgctccaggactcagaagctagagaaggagtatgctgcgaagctggcaaaagtatgcttccaagaaacagaggagaagaggaggaagaagctggaggagctcaagatgctggagaattcgcactacgactacctcaagatgaaaatgcggatgcagaccgatatccagggcttgctcgagcggatggaagccacaaagaagatgtgggtataggctggtaaaaattcatctgacgccgctgaatgtgtgaaaaatctgttgtacaccattaggatgttttccgagttgttgtattcatcctgtgatttgtgttaccagttaaaactgttataagcagagggccgcctaacctcgtgctggcagataacataactagacaccatctcatttaattgctttccgtttgcaaacatatggtgtgtcccttgcaagtatgcatatcattatctctagtatgtgaactggagttgttgggtcatgccatttacattctgctgcatgacgatactatatacagatattctggagttctggatccatgagactttcc

SEQ ID NO: 25512 - DNA, 1248 bp, Oryza sativa
  ref <308>: DATABASE ACCESSION NUMBER: AK100954
  ref <309>: DATABASE ENTRY DATE: 2002-08-28
gacttcttcttcttcttcttccccccatttctcacttactccggcgatcaccgtggttgagcgtcggcggcggaggaggaggcgatgattaccatggatctgatgggtgggtacgggcgggtggacgagcaggtggccatccaggaggcggcggcggcggggctaagggggatggagcatcttattctgcagctgtcccagactgggacgagcgagaggtcgccggcgccggcgcaggagcagcagcaacaggtggactgcagggagatcacggacatgacggtgtccaagttcaagaaggtgatctccatgctgaaccgcaccggccacgcgcggttccggcggggcccggtggtggcgcagtcgtcgggcccggcggcgtccgagccggcgccggtgaggtcgtccccgtcggcggtgtcgaggcccatgacgctcgacttcaccaaggcggcgtccgggtacggcaaggacgccgggttcagcgtctccggcatctccgccgcgagctcgtccttcctctcgtcggtcaccggcgacggcagcgtgtccaacgggcgcggcggcgggtcatcctccctgatgcttcccccgccgccggcgaccagctgcggcaagccaccgctgtcctccgccgccgccgccatgtcagccggcgcaggccacaagcgcaagtgccacgaccacgcgcactccgagaacgtcgccggcggcaagtacggatccaccggcggccgctgccactgctccaagcgccggaagcatcgggtgaagaggacgatccgcgtgccggcgataagctcgaaggtggcggacatccccgccgacgacttctcgtggcggaagtacgggcagaagcccatcaagggctcccccttcccacgaggatactacaagtgtagcacgctgcgcggttgcccggcgaggaagcacgtggagcgcgacccgaccgacccgtccatgctcatcgtcacctacgagggcgagcaccgccactccccctccgccgccggccaggaccacccgccggcgccgcctccgccgctggcgctgccgctcgcctgagatacccccggtgaagaagagtgagaattagcttgtcggtcatcataattaccgttagaaattatttttttcgtttttctctctttttttttcttttttttactgcatcattgtagaactagcgtgtaaaacaattttaggagactttgagactgagcttttactgaagaaaaaataaagcag

SEQ ID NO: 25513 - DNA, 3427 bp, Oryza sativa
  ref <308>: DATABASE ACCESSION NUMBER: AK100955
  ref <309>: DATABASE ENTRY DATE: 2002-08-28
gcacccgtgctccccgccggccgccggtggacggagctctgtgtcaaccggagctcgagctgctttccatcaccggacatgatgaaagccttgatctgttgccggcaacgtagtttctctgccggccaacgcgacggcgcgacatcccctaatcactctcaatccattctgtggtaaggtagggcaaccgcaggtgattggagaggcaccctcaaaatctcaatccacccgccggcgtacatctccgctaccacctgctgcgcgtggcgtgatggctccaagctagctttccccgccgcgcccgcctgaggatccacaccacctgctcggctgtcacggctcgccccacatcgcgcgcaggatgttcgacgaattgcctgacccggacaacgtctcgccgttacgcgtcgttgaccagactgcgcctgcttcccccggcatgtgcacgcccacgccgtgcagctcgggcttttgctacagcacgttcgtcgggagtgctctgcagctctggtgcgcatgtcccggcggcgcagggtcagacaggcgctcgggaaatttacacggagagacatgttgcaatatcactgaacataccgggtggagatcatttctgttctatattgttggagggcgcccaggaattctttgattcattcagattttaccatcaggttgcacagatttggtttctggttcattataataagcaataaagcaacaagatgacccaaaggatgaattctttgcatctcccatctctccacaggtaccaccttttggctccatttgcttgtcttctttggcctaactggtttcctccacagctgcatagctctgtcagattatgtgataagaccaattgcatgtcacttgaagccggttatgactccacaatgcaacattgttgcaagcgttggactatgtgataagacatattgcatagcctactattaatgaatgggtttgggccaattatgaaatgctaatagtccgccatttggaaggcttcaacctggttagccggccggccagtcagacagctaccccgctgtcttgcaaaattatggctagcagttctcccaagcatcagcagtggcagcaatgagctctcatcgccttctattcacacagcttcacctctacaacttgctgttgctcatccatgttcaccatgctacctcactcaacttcagatttgacttctccgagcctggttcgtactgtacccctggttcagagatcgcctgtgctggcgatgcctacccctacgcccatacgattgagctgacaaagaccgacatcagcgacagaaacctctgcagcatcggccgcgtgtggtatgcacggccggtgccgctctggaacaacaccaccggtgaggtggccagcttcaggaccaccttctccttccaaatcaagccggccaacctggacgtcagtgctgacggtatggccttcttcctcggccattacccgtcaggcatccctcatcgcagctatggcggaaacctcggcctcttcaatggcagcaacaacaagaacgcaacgggcaccgctaggatcgtggcagtcgagtttgacacctacatgaacaaggaatgggagaaggatggcaaccatgtcgggatcgatgttaactccatcgtctctgtcgcggcaacctcaccggacaagaacttagcaagcggcaccaccatgactgccgatatcagctacgacagcagtgcagagatactggcagtcaccttctggatcaacggaacctcctaccatgtcagtgccagcgttgatatgagaagatgcttgcctgaggtggtcgctgttggtttctctgcttctaccggaagctccattgaagtacaccgggtgctgtcatggtcattcaactccaccctaacatggatgaattcttcagtaatgccaccaggagcagcacctgtgcccccagaaactatcagctctgaaccaataatgtcaccaggagcagcacctgtgcgcacagaaactttgagctcccaatcacaaggtaaattacatggtataatagctatttcagttgcagtatcctttgtgctggtatgtgctttcatgggttttcttctacgacgtcgattagtatggaagaaatcaaatgaaatctctgatggagattgtcagattgaacttgatgaaattttttattcaaaaaaggaacttgatgaaattaagtttgcaaaaggtgttggccccaaaaggtatcattacagtgaactagctgctgcgacgggtaactttgcagaggagaagaagctaggaagagggggttttggtcatgtttaccagggcttcctgaaaactgatgatcaggaacggcttgtggccataaaaaagttctcaccagactcatctgctcaggggaggaaggagtttgaggctgagatcaaaatcataagtcggctgaggcatcggaaccttgtccaattaataggatggtgtgacagttgcatgggactcctgattgtttatgagctcgtatcagaaggtagtcttgacaagcatatatataaaaatgcgaggttgctaacatgggccgaaaggtacaagatcatcattggccttggctctgcactccactaccttcaccaagagtgggagcagtgcgtcgtccacggcgacatcaagccaagcaacatcatgctcgactcctcctacaacaccaagcttggggactttggcctggcgaggctcgtcgaccatggcgccaagtcacggacaaccaaggtcgtgctcgggaccgccgggtacatcgacccagagctcgtcaacacgcgcaggccaagcactgagtccgacgtctacagcttcggcatcgtcctcctcgagatcgtctccggccgtcgccccgtggaggaaccggacgacagcgacgagctcttcgtgctgtcgagatgggtgtgggacctctacagcaagaacgccgtcgtggaggcggtggacgagaggctcaggtgcagcgacgatggcgacgacgagctgcagatggagcgcgtgctcgccgtcgggctgtggtgcgcgcaccctgaccggagcgaacggccgtccatggcgcaggctatgcacgccctgcagtcggaggaggcaaggttgccggctcttcggccgcagatgtacaagggtgtgccatttcttgccatgggagaacataggtacagcgatctttcaattggcaccactaccagctccagtgccagtggaaccggctgcactgcacattcagagccaactaaactgtaaaagacgatgccctattagcgatgtaaaatgcagactctgactgaaatttattttcttggtaaaactgaaactggaacaattgacacagggtgctgtgggaaatatggctgactcctaagctgttcatggattggataattttgtcgttatactt

SEQ ID NO: 25514 - DNA, 3115 bp, Oryza sativa
  ref <308>: DATABASE ACCESSION NUMBER: AK100956
  ref <309>: DATABASE ENTRY DATE: 2002-08-28
gatttccattccattctcctcctctgtcctcttctccatgggaaactgtgatgaggccacaaaaaagaatgttcttgtatgccccctgccataaacattcctaggaccacatccgcacccaaagacccaaacaaacccaagaaccacccccctgtttcggcctgcacttcactttactctctctctctcccagttcttctaccactgcaggagcagggattgctggtttcttgggttgattctttggttggtggtttcttctcttggagttctgatttggggggctcgagttcctgtctcaaagtttcgattttgggggggttcttgggggtgtcggtgttgatggtttagcgagggatttttctgttggggggtttaggttggtgtagatcagagttttttttggcttcgaaaggcatctgctttccttgcgtgggtgtgggaatttcaggagttttgggaggatttgtttttccttttgggggttgaagtaatctcttgttctgtagatgtgcaacttcgtctggctgctccgtgtaatctgcacgatcttcagcttcgccctctgatggtattcagtccgtgttcttcactttggcgattttagagtggattgagttttttttccctcgggggaaagtggtgttcttgttacttttttctcaatttccttattagggtttggtgtaagagtgtgtggaaagctcgaaccattcagcctttgatctgaagaaactctggtgggctggtggttcattgatgtagtggtatccatcgtcctgaccattttggaggagctccaccatggcctgcctgaagctaggatcaagagctgatgtcttcagaaagcaaggacaagactggtattgcacaaccggtcttcctagtgatataaccgtcacagtgggggagcaatcttttcatcttcacaagtttcctctattatcaaagagtggccttttggagcgttgtatccgagagaagattgagaatggagaccacagttgtgtcattgacctatcggatattcctgggggagcaaaggctttggaactaactgctaagttctgctatggtgttaagttcgaaatgactgcctccaatgttgtgcatcttcgctgtgctgctgaatatctcgagatgactgaagagattgctgaggggaatttgattgcgcagacagagaacttccttaccccaaccgtccttaggagttggaaagattcaatcaaggccctccatacctgtgatgacatcattgatcttgctgaaaaattgcaaatcgtaaagaggtgcatcgactcagttgcaactagatcatgtactgatcctgatttatttgggtggccagttgtccagtacggaggccccatgcagagtccaggaggaagcgtcttgtggaatggcattagcaccggagcaaggccaagacatagcagccctgattggtggtatgatgatgtttcatgcttaagccttccattatacaaaaaagtaatctcagctatggaataccgaggaatcaatcaggatattattgttggatccttgaaccactatgccaaaaggcgtttacctggcctgaatcggcgtaaaagcatcagtgatgtcagcagttgcctttcaatatcatctttaacatcaatcccttctgaagaggaacaaaagtacctacttgaggaaattgatagactgttacctttccaaaggggggtcacatcttgcaagctgttatttggtcttctgcggacagcaatcatcctaaaagccagcccttcttgcgtgtcaaacttggagagacggataggtatgcagcttgataaggctaccctggaagatcttctgattccaaacatctctgagtctgttgaaacgctctatgatgtggattgtgtccacaagattcttgaccatttcttggcaatggatcaagaaactggtggggcttcccctggccttggtgaagatgcacaaatgttagcttcaccatcacttatgcctataacaatggtcgctaagttgattgatggctacctagctgaagttgcaccagatgtcaacctaaagctgccaaagtttcggtctttggctgctgctataccagattatgcccggccaatagatgacggactttaccgtgccattgacatctatctgaaggcgcatcctcacctgtctgaatcagagaaggaagaactttgccgggtgatggactgccagaagctctctctcgaggcctgcactcacgcggctcagaacgagcggctcccgctgcgcgtcatcgtgcaggtcctcttcttcgagcagctccagctacggagctccatcgccgagtgcctcatggtctccgagaacctcgaaggcggctcgaggcagctcatccccaccatctccggcgagcaataccgccccggctggcccctggcctcccgggagaaccaggccctccgggagggcatggacaacatgaagcagcgcgtcgccgacctggagaaggagtgctccaccatgagggatgagatcgagcggctgggccgcagccggagcaccggcaagggcagattctccctcaacatgaaaccacagatttgcagcaccaaggaggctattccgacgacagcgacgacaacggcgacggcgagcgaggagaagatggccgtggtgaagggtgacaccacgccacggctgaagctcagcaggcacaagaagaagctgtccatagaagcatgatgatgatgatccgctgatcactcacactaccaatccttttcacttttcttcttctctgaattcttgataatcgagtgccatcagctcagtagatgtgttgccgtgttggtgtcgtaactgcgaacttagtgagttgttgttagagtgttttacatccatccatccatccagcaggaggagaatctagtgaaagagctgttacctgttcattttctggtgctaagtttttgacattttcatcatcatagtaaaaattgccaaagtgttgttagcatatctgttggaatttggatcacatctcattggattgtttcttctgtgcgtcgacagtagataaatcggcacgtttggttctttgccaatcctaacattatcttatttttgc

SEQ ID NO: 25515 - DNA, 3245 bp, Oryza sativa
  ref <308>: DATABASE ACCESSION NUMBER: AK100957
  ref <309>: DATABASE ENTRY DATE: 2002-08-28
tatactgtccctcccatgatttcctagccacagccgacaagaccgatgcaacctggtccttgctcatcatgtcaagagaccacaactatgtgctgtgttctttgttccagggactgacaaatcatattttatcacgtattgattatggacgtggtactgccctattgttacctacaaaattggattctagtacgcgaaatcttagaaaaaaaagctctgatgatgctgaaaatatggcatctggatcataatatgaatctcgtgatctcactactttttccctcccttctgctaatttttatggatgcagttttcaagacagtgtagacctggtgtggcttgtttagaataaagataatttttatttaaggccgaagcgggtgaacgtgtagctggtagagcacccagtagaagtgccacccgcctagggattgcatcctgggagccacatttgtgctcacctccctgtgctacagttgcagagggtcccaggctagcaagagcatgtgctggtgaggttcctgcctggctaggttttgatgggaccccttcttaaaagctaagtcaagggggtcgtccttcccccttgatcaaggttttttttttttgatttaatgccgaaagaaatagaagcatgaattcagtatgcagtttcaatctttcagatttgatatggaaaaggttttagagaccatgaaagcaatagaaggcctcacccccacagatgcacccaaatgaagatgtggagactgaacaaataattatatcattcatgccactagactgaggtcttaccagccttcatcaatgtcgggtctcatttgcctaagatcatgacatttgaattgactcattgggtgttcctaacttcacactacatacgaatagtgttgtaccttaagatacctgtaggagtaaattagtgaaattgctgactttttgtctcttaatgccaattcttggtacaattgcatttctgtctagtctgttactcaattctgtaaattctttatacatatcaacataacaattattgctttccactcatgctatagtggtgcgactattcttagagttgacctacaagaagaaaaagtaatatctacaaaaactgcacactatcataatagtcccacttgttttcactatctttacccccacctttcctctttccctctcgccttttgaatttcataattcccatctactgattcttgtaatttctttttctgtgcacctaattatcaatgcttaattcatctgatagtgatggtgctcttaattgaaaccaatgcaggttacatccaaaaggaaatcatagcaactgtaagaacttacaatttaagaattttgctgcacatgaaaggaaaatgaatctatatgcaaggttactccgtggtgccctttgactttatcctgtcgggttggctaggcctacttgaggttggtcgagctcagttgtcaggataagtcaacaactcaacacgcgattcttaagtgggctactgtagggattaatcagaagctgtgccatagcagaaggcagacctgtggtggatttaggacacttccagttacctcaccaacaaattgccaattgaaaactgcatcctggatctagagcagcaaacttctgtccaatagatggttgaaaaacaacacagattcctgtggatctctatcttgtaggctgcaatgttcaaaggggacatgattgttcctcaccaaaatcttgggagatgtcacttttgaaaaagcttaccataggattgctgcggactttggagggagaatcttatcgaggaccgtcttttatacttgtatctaatcatgatcagcattcagtgagcttcctgcgcatctttattttcatttatccaattttgcatatccttgcctttatgactgtatccgagcatcctatcgttaatgatcagggatgacaaaaccttggaatcagccaaattggcatatccaaccccagaatagtgagtttggattcttgcagcaaagtggtagggcctgatgttaatttgtggtgaatagcaatttgagcaatagtgccagtgttgaacaatggcatatcccctggtgtacagcagggaatatgcatggttgaaggatgtgagtggaagaggtaggagatatacccaacttgtccatgtctccttgaatggtctgtactggctgccttggccgtagtgttggtgttgagattgccgggtagcttgttgattgtggcactttttatactaatcgattgatgagatagattctctttacgagaaaacttgtattgattagttgctgttgggctgatgtatgtgttgtgcgcaacagcgagcttccattctgtctgtcatgtaggagtatgctagtggcagtggtggctatcaatcgttttgatgcttgtactagtaccttactagcctgcatacctttgacatgccagcttccttctcaacattgcaaggaaatacagggatatgctatatacatgcacgatcatcaaatcataccctatcacaaagtggagcagctcatgtcaaatcagggcttaaccaaaattaagagttgactcctttgaagagatcagatcaaattgaagagaagctatagtggcagtggaagtggaggccaaggcggccatatataaatggcctgatcaatgtatctaccttcacgtacgtacctggactaactaccacaatgtatcatcatcagggctggagctcatcatcatcttcgtcgtcgtcgctccgccgggtgttgagcaccggaggaggcctggtggaggaggagcggcgggagcgcattgacaagtaccggagcaagcgcaatcaacgcaatttcgacaagaagatcacctacgcttgccggaagacgctcgcggacagccggccgagggtgaagggccgcttcgcccgtaactcctccgacgacgctgctgctgctgctgcagctcaagtcgaggtgtcgccggcgacgaataataatgtgccggagtggtggccggcagtgcaggaggcgctggccaggcaggagcaggaggcggctggcctccatctctgcgacaccgccgacgatgacctgctaggcgcctacctcggcgtctcctccatcgatctctactcaccccgcggccactgatcgatccattcaatcatcactgctactctgctacctactcctacctcttaaaacggttcaatttactctgctatctactccatagatattttacc

SEQ ID NO: 25516 - DNA, 1556 bp, Oryza sativa
  ref <308>: DATABASE ACCESSION NUMBER: AK100958
  ref <309>: DATABASE ENTRY DATE: 2002-08-28
gactgcctcactgcagctctgctccgctgcaatggcgcgccaccccgtgctgatgctgctcgtcgtggtggtgatgagctggcactggggcggcgcggcggcgcaggtgttccggccgccgtggaacggcacgttcccgatggggccgggcggcggcggcggggggagcgtgggaggaggagggggagcggcggcggcggcgtcggtgccggcgatgttcgtgttcggggactccctgacggacaacgggaacaacaacgacatgacgtcgctggccaaggccaactacctcccctacggcatcgacttcgccggcggcccaaccggccgcttctccaacggctacaccatggtcgacgagatagctgagcttcttgggctgccgctgctgccatctcacaacgacgccacgggcgacgccgcgctccacggcgtgaactacgcctccgccgccgccggcatcctggacaacaccggccagaacttcgttgggcgcagcccgttcaaccagcagatcaagaacttcgaggcgacgctgcagcagatctccggcaagctgggcggcggcgccgccggcaagctggcgccgtcgctggcgcgcagcatcttctacgtcgggatgggcagcaacgactacctcaacaactacctgatgcccaactacaacaccaggaacgagtacaacggcgatcagtactccactctcctcgtgcagcagtacaccaagcagctcaccaggctgtacaacctgggggcgcggaggttcgtgatcgccggagtagggtcgatggcgtgcatccccaacatgcgggcgaggaacccggcgaacatgtgctcgccggacgtggacgacctcatcatccccttcaacagcaaggtgaagtccatggtgaacacgctcaacgtcaacctcccccgcgccaagttcatcttcgtcgacacctatgccatgatctccgaggtcctccgcaacccgtggtcctacgggttcagcgtggtggacagagggtgctgtgggatagggaggaacagggggatgatcacgtgcctgccgttccagcggccgtgcctgaacaggaacacctacatcttctgggacgccttccaccccacggagagggtcaacatcttgctcggcaaggcagcctactccggcggcgccgacctcgtccaccccatgaacatccagcagctcgccgcctggcagccgtagcagctgtcgccgccggcggtcgtgacatatatcctctctcttactctcttcgtcccgaaatataaagaattttggatgaataagacatatctcagtactacgaatttagatatgaagtctgattagattcgtagtatgtgttacatccatccaaaatcttttctattatgtgacggatgaagtacttagggtatgaatctattcgtttttgcatgcagtgttactatgttgttgtagctaggtagggggtgagctaatgaacgagctggggtggtgtttgtttgtgggtgtgtttgtgtgctcagtttggattagggcaagtgctgcttgtgtttgtactact

SEQ ID NO: 25517 - DNA, 1313 bp, Oryza sativa
  ref <308>: DATABASE ACCESSION NUMBER: AK100959
  ref <309>: DATABASE ENTRY DATE: 2002-08-28
gaccaaaacaaagctcagaatcctacctgactagtactaccactactagctagtagcgagctactctctctggtcatcaagctttgagtggttggagtggtggcagctatggctttttccatctccaagaaggctgcagttgctgcactcttctccttccttgttgtcacctgcgtcgccggcgccaggccggggaacttcagcgcctccgacttcaccgccgatcccaactgggaagtcgccagggccacctggtacggcgctcccaccggcgccggccctgacgacgatggcggtgcttgcgggttcaagaacaccaaccagtacccgttctcgtcgatgacctcctgcggcaacgagcctatcttcaaggacgggaagggctgtggctcatgctaccagataagatgcgtcaaccaccctgcctgctccggcaacccggagacggtgatcatcaccgacatgaactactaccccgtttccaagtaccacttcgacctgagcggcacggcgttcggcgccatggccaagccggggcagaacgaccagctccgccacgccggcatcatcgacatccagttcaagagggtgccgtgcaacttccctgggctgaaggtgacgttccacgtggaggaggggtcgaacccggtgtacttcgcggtgctggttgagtacgaggacggcgacggcgacgtggtgcaggtggatctcatggaggccaactcccagtcgtggacgccgatgcgcgagtcgtggggctccatctggaggctcgactccaaccaccgcctcacggcgcccttctcgctccgcatcaccaacgagtccggcaagcagctcgtcgccagccaggtcatcccggccaactgggcccccatggccgtctaccgttctttcgtccagtacagcagctaagccaatgatcaagaacaagcataattcatgcctactatagcagcagcagaagcagcattagctactatacatacctctacgtacgacatttgagatcgatcgtttggccatttttatctgctcgggtattgattagctctccctcggtattgtatggatttgcatggatggttcattaatctgtcatcaggagttcgttttgagtaggtgagacgtcggttgttgggtgtcatatagacatcgctcggtgtcttgaggttgagagtgggataaggaggaggcaaagtttgcatgtgctgtcccgcccactctcactgtaccagtgtcactgtttgtgtaaccagaacaaaggtcataaattatactactagtatacagtttgctgcctggcattcagc

SEQ ID NO: 25518 - DNA, 2339 bp, Oryza sativa
  ref <308>: DATABASE ACCESSION NUMBER: AK100960
  ref <309>: DATABASE ENTRY DATE: 2002-08-28
gggagagcgcgcgaggtaagaagattttcttctgcttcgatttttggttggtctaatctagttttgcggctgcttgattggtgatttgcttcctgttaatctcgctgcgtggcggtggcggctgcttcggtggggggtggttagatgggcggggggatttgaatggtacgctcgcggctagggtttgtgcactattcgtcgatttgatcgcttcgggggatttatcctgttagttttaccttacgattagtttcgcttggttgtggatagtcgtgtgtacttcgtgcatggtttgttgctacgagattacatggttggaaacgcgtgattctatagcctacgagatttgcccatggctaattaggattttcctgcaaatctctacctgtgcaattagttgtatcaaatttctcttcgaaataattgattggtatcggtgtttgaggttttggtatgtggtgttgggttgggtgtggaagcgattacttcctactctataggttgatatacttgtcttcataatgtcagctttgaaataggaattgatttggattgtgtgtatatgtggtgagaatggaattctgtattagattgatcgtcaaacttgaatttgcatattgatgctttgtaatggcaaggtcaattttctcatataaatagtaattaattctggattttgattgtgtgtatacgtggtgagaatagaaatctgtattagattgatcgtcaaacttgaatatgcatattgatgctttgaaatggcaaggtcaattttctcatgtaaatagtaattaaccgctctagattttttaactatattgtcatgttacttcaatcatatgtgaatagaacatcccattaattagtggctttattgcattcaaaattggtcaggacctgtcactcctttccatcttgcatgctcaacatcttagtatgttatatgccacctgtcactcctttccatcttgcatgctcaacatcttagtatggttatatgctgtctgtaggtgttacatgttatatgactgcaaatcttttagctactgctcatgttttgggggaactgaagattaggttcgtaattttagaaactggtgtgggagtaataagaaaatagatctagggatgttgaactggctacatttcctgctgtttttttttttttgaaatttaggtgccggtaatgcttttcttcactgctagagatggcaatggggaatcactgcagttggtatattttagtatttggaaaagctatcgtagtcctatgattgttactggtaaaatttaccctgctgtgtttatttgtgagcaatgatttccctgtatagctcttttatgaagaatcatagttataacgacctttgattccttttgcaaaattgtctcatgatttaagtttgtgaatgcaatagaaattataaactggttagtcatagtcgttcagactttttgcttaattgcaaacttgataatatgctagtttgttggcaacaagcaaacactttttgtgtaccgtcatctgaaagttgcggctgtgtgatgtcttgagtccttgactatgcgcattgttgatcatgtcccttgtttttgtcctcaggtaaaccaaagttctttttccgatggctcgtactaagcaaactgctcgcaagtcaactggaggaaaggctcccaggaagcaacttgccaccaaggctgctcgtaagtctgctcccacaactggaggagtgaagaagcctcaccgttaccgccctggaactgttgctcttcgtgaaatccgcaagtaccagaagagcactgagctgctcataaggaagcttccattccagaggcttgttagggagattgcccaggattttaagactgatcttcgtttccagagccatgcggtgcttgcccttcaggaagctgccgaggcgtacctggtgggtctcttcgaggacaccaacctgtgcgccatccatgccaagcgtgtgaccatcatgcccaaggacattcagctggctaggaggatccgtggtgagagggcttaggctttctcatctctgggaggggctctggtgtttcatctgtgactacttcctgcttttgctgctgaactcttatttggtgtcgtgaatggtgctaatactactcacatgtagtagtagattgttagtgaagtactctgtttctgtgttctagaactggatattttgctagtaagttgtctcgactgttgatttcatccatccatctgatggatgtgtatctagtagtttctcatctgaagtcctgaaatctgaaccttgaatttacctgtggaatggaacttagaaaaactgtgttaaatgttc

SEQ ID NO: 25519 - DNA, 3725 bp, Oryza sativa
  ref <308>: DATABASE ACCESSION NUMBER: AK100961
  ref <309>: DATABASE ENTRY DATE: 2002-08-28
gggggctagcattttggttggttcgatggagtctaaatcccccagtttttaatctgtagactcggacgctagctggccggcgcaaatatgtgactgtgtaaagctgacaataggatgttgacatgttgctgtttagatgacaccagatgaaactgcccttattactttaaagaaaggtactaaactcatcaagtatagccggagaggaaaacccaagatccgtgcgttcagactttctagcgatgaaacatctttaatttggttttctcacaaaaaggaaaagttcctcagactgtcttctgtcactaagatcattcctggacagagaactgctgtgtttgggaggtttttacaccctgagaaggattatttatcattttccctcatatttaaaaacgggcaacgctcacttgatctggtttgtaaggatcaagctgaagttgaagtctggttttcagcacttgaggggttaataagttcattccgcaaaaaatctttgattaacgaacacaaggatagagtatcattttctgaagaagtaacttattatcaagatcgccattcctatgattcaacactagatattgcttcaaatatttcacgcagttttaactcagctggttactgtggaaccaattcatttagtttcagaaaatcagatgtgggatttgatcgtctaaatatgataagaacaagtgctgcagacagtagccgggttagtatttctagtgcccttagttcttacagtcaaggttctggaacagatgacatagaatcccttggtgatgtttatgtctggggtgaagtatggactgatgtaaccccatcagatgggcacacaagctcttcatgctcaaaagtagatgttttgatccccaaacctttagaatctgatgtcgtgttagatgttaatcagatagcatgtggtacgagacatgtagctcttactaccaggcaaggagaggtgtttacgtggggtgaggaatttggtgggcgcctaggtcacggaactgatgctgatattagtcgccccaagcttgtcgagtctttatcactaaccgtagttgatcttatttcatgtggagaattccatacttgtgctgtgactacttccggtgatctattcaattggggggatggttcttacaatgtcggactgcttgggtgtggcactgaagttagctactggcttccaaagaaagtctcagggcccttagaaggtcttcaagttctatctgttgcatgtggctcatggcattctgctttgaccacatcaagtggaaaactttacacatttggtgatggaacatttggtgttcttggacatggtgaccgtgaaactttagcatacccaaaagaggtagaagccttgagtggattcaaaacgatcaaagttgcatgtggaatttggcattctgcagcaattgtggaggttactaatcagacaggtgcaaatgtgatgtctaagaagttatatacctggggtgatggagataagaaccgccttggccatggggacaaagagcctaggttagttcctaaatgtgttcaagcgcttttagagtacaattttcatcagctggcttgtggacataatatgactgttgccctagctacatctggtcgtgtgtttaccatgggtagttccagcaatggccagcttggaaatccaaaatctgatggcaagcagccttgcttagttcaagatagattggctagtgagttggttgaagagatttcatgtggagcttctcatgttacagttttgacttcaagaagtgaagtatatacatggggaatgggtgccaatggaagacttggtcatggcgatctcaaggacaggaagaagccatgtcttgttgaagcacttaaagatcggcatgtcaagagtatatcatgtggttcaaatttcacaacatgtatttgcatacataagtgggtatcaggtgcagatcaatctgtctgcacgggttgcaggcaagcatttggtttcactagaaagagacatgattgctacaactgtgggctggttcattgtcatgcttgcagttcaagaaaagtgttgaaggctgctctagcaccaactccaggcaagccacatcgtgtgtgtgattcatgctttctaaaattgaaagccgcagagaccggcagcaacaattctaacagaagaaatgctgttactcgtcgctctattgatgggagagagaagcttgagaggccagaaataaggccttccaggacaacagcaccagcggaatcagtcaagtatacagaggtaaaagctgcaagaaatgatatgagagcatcccaaatttcttccttgctacagttcaaagatcttagcttctctgctcttcaacccacggcgatgtcaccagctgtaactatgtcacctgcagtacctgcactctcaacaccatctccatacacaaagaaaacaaaatcacctgcacctgcaatcccgcaattccctaaaactgatatagataacttgcagaagtctaacgaattgctgaatcaagaaatgttgaagctgcaatctcaggttgatagcttaaaacaaaagtgcgaggcccaacacgagcagcttcagatatcagataagaaaactaaaacagttgtctctatggccacggaagaatatactagatgcagtgctgtggtcgagtttgttaaatttcttgataacgagctcaatggtatagtgcatgaactgcccagcgatgcagcagaaagcttgaaagccttacaaaatcaggtgcaggcactgctgagggagcaaagaagtcatccttctgagcttctaaatcctatggatcatgatggtattcaactgtctagtggtggaaatgcattacatgatttttccaatcataggtcaggaagtacacgctacttgttcatgtcacaagatgccagttctgcaagtggctctgccatttcacttacaagtgaacccccttcccatcgtggcatggaacaccacgcaaaggttcctaacgattttgtaccgaagcatgatactcatggagaagttcaattaattgagcagtttgaacctggtgtatatgtcacacttatccagctgaaggatggtagcaaagtattcaagcgggtccggttcagcaagaagaaatttgcagagaatcaggctgaagaatggtggcgggaaaaccaagagcgggtcttcaagaagtacagccatccgactgttcctcaaacaacatcaacgaaaacaggatcttctaacgaggaagaacatcactcatgatctttaatgaggtttctacaaattgcggaagaagcttcaaattggtgagacactgtacagcgagtcttgacaggaaatttcgactctctaattggttattgctcggagaaaaatacctgcttatgtcgaaagtataggataatttttatttagtgccaaaacttagtttagttacagaccatattaaaagcaagtcggagttaagtaactcttttctaggtgagaaattagtagagtattgagtattgactatctgggtcgatgttgcgaagggaatgacggaggaagcggcgctctggcgggcggcaaactcggcaatcccatcatttctttcacaaatcccaggccattttgtttctgtcttccagtatcggccccctgctgtttttcgatctttaattgtaaataacttttatttctcttaatagaaaaaatgcgcctgtggcgtattccc

SEQ ID NO: 25520 - DNA, 3472 bp, Oryza sativa
  ref <308>: DATABASE ACCESSION NUMBER: AK100962
  ref <309>: DATABASE ENTRY DATE: 2002-08-28
gactgtgtagtgtagcccctcctcgacttccccgagcagagctccctccgacccgacccgaccccagcgactcggatagatccagcgccgccgcccgccgccgctgtcaaccggccggctagcccgtcctccgtcgtcaccaccgcaccggctactcgctcctatccccgcgcggctccgtctttctcaaaggtacttaccacccgcattctcttcacccttctactgtattcgattaattagggagacctgagcatgagtcacttgtgacctagtagacgggagttcactggtcccaaagattcactggtcgagagtccgagaagatgatccccaaggcgaatggagtcgcttgtgaccttagacgacgcagtggaggagcctagtgttgcggacatggaagcaccagcccggctattgttgttagactgcttgcttaacggtaggagagagagagagagagagagagagaggagtgaaagctggatttgagtggcgtgcctggtctggccgcaccatgtagaggtggggaatctggttagtaggggcacattttgtagagcaaatatggtctgatttgaaagataaatgaacaatgaaagttttaaaagaaacatttaagtccaaagtgactgattgacccaaagtgtgccatattatcaattagatccttaagaagggcaaatcctagaatggcgagttaaagagtggcatatccttgatttccctttcagttatcgtattttgcaccaaatgttgtgtattgatctggtaggactggggcatttaattttcttgttatcatggcgtagaactagacacaaggggaaattccaatggcccgccgcccgcatccctcaaagcctcttatgttgtctgcgcagttgttggctggacaaaggttcatttcacgtggctgttgttatacttaatgtattccctacccattaccttagaggattcgtccataaatttgggaaaatttaaatttttgtgctattgattgttttctctaataggatgcaagtgtgtagagtattatgtgtgcctttcgctctaaagaacaaagacaaccttggtttatctactttcaacttttcaagagacttgcaagctgttgtttttagaagttcttcgtaaaaatatatgaactactgttcttattcaataggctataactgcatgttttgcccttcttttggcagataaatatatctcttaaagttgtagttgaaatgaacactgtatacatatctaatctcttgattatgcttcaacttttgttattgtgtaatttctttttgtgccttagacatgaaaatcatattttctatgcttccagccactgcagttgacccagttactccatcatcaatccttgttgccattgctgccagttactgtttcctattccccactgcttcgtcccttttgactccaatactttggcacatcatggtcggaaaggtatgtggtaggtacaccctgttccacccttttggtctagtatttttttttcatggtgttgtagaacttttgagtgggcacatcaacagaatagatagatagaaatttatttattagactcttcttttctcaagctgtggttgaaacgaacagtgtatacatcccttggctatgcttcaaacttgagcgttgtacaatttttaattcacattgtagatacgaaaagcttgtcatgtattgttctaagcaaaaatttgttacatttttaggtgttagaagcttgatctagtcatcatcaatcggatcttgtaggatattgcgatgggaagcttattccaggttaatataactccaccttttttctgttgtatttgtatattgttcttattatgcataaatcttccatgcaatatgtttcaaatcctaacaacatcaagtacaccactggtattttgtaggtttcaatcatgttgtatatctgtttatgtctatacaaaattctaatttttttccttgtaatccaaaatagtcataagcaagttgtcttttagtgttatggtacataatacttgaatgatagtgtaacaattgaaatgttaacctgtagtaaaaattatgtgtttattttgacaacccatttttaaatgctaggctggaagttctttttatggagattatatcctcgattttaatgccaattgtgagagatgcgtcgtttcattgagtttttataaggacaatgatgaagagaagaaagaaacatatttcgctactggtataatttttgcttcgggaaagagatcatgctgcgttttaacaacaatagatgatgctagtaaaaggaaagatgaatcatgtgtggtaaaattttttgatggaacttcaaaaattattgattggaagagaataaaggtgcggccagagtttaaatgtgcaacaatttatatccacaatattgatatgattcatggagccaccgtcacatttagtgatcaagagattgatcattctcaaaaggtattcactgttggttacaacacaaatcaaagggacagaaccttcatctcaggaaatcttgtgaagtaagaatctaaactttatattctttgtattactaatttttatttaagacgtgcgacttatattgagtgataaacagtggtgtagggatacggaacaaagacgctatcgtatttgtgcacggctgctcaactggcaattctggtcatttgggatcagctgtatttaatgaaaataaaaatcttgttggcatgaatgtttcttatactagatctagaggcactcattatatctctagcagctccacatcaacatcagattatggtggcatcgtatctgcattgaatttacaatccatacaacttgggctttccctgctatataaaaaagaaggagaggtatgatgcctaatttatttcaaacaaaattatttacgaacatgctcttattttttaatggttgcatcttctctttactagactattggtgaaattgttcgtcacgtgaatgctgtcttgctcaattcagaaaaggaatgggcctaagaatgtagcggaagcagctggtgttgatttagaaggcagaagatgatgaggggcctttgatcattgttctgcagcttttctcatttttagctgctatgcgcatctgcattgatgacgagctcagaccttcaagagcaatggtgaaggccatcacgatctgagtgtctcttttttgttattattattctctatgaaaatttgatagcccaacctgtgttgatgatacaatgtgggtggtttttcttttgtaagctgacctgtgactcattttggggcacggtggtgtcagactgatgaaatgtaagtggctgttagacaggctggcctcacactgaactcggcctattttgagcttcctgtactgtctaacttttctcattattcactgcccaactttggtcagagacccgcaacatcagaaaaggagcatatggaccctt

SEQ ID NO: 25521 - DNA, 1787 bp, Oryza sativa
  ref <308>: DATABASE ACCESSION NUMBER: AK100963
  ref <309>: DATABASE ENTRY DATE: 2002-08-28
ggtttccacccgcacccccatctcgcctcgtcggccatggcggacaacggtggccacgaggatgctccgccgaacggagaccaccacccaccggccatcgtcgcgaacggagacgaccaggagccggcggcgaacggagacgaccaggcggaggcggcggcgaacggaggcgaccaggctgcggcggcgaacgaccaggctgcggcggagaacgaccaagctgcggcggagaacgaccaggctgcggcggagaacgaccaagctgcggcggcaaacggaggggaacacgaggaggcgaacagggacttgccgaatgtagcagggattcgtgccccgcgcgaactgcggcgcgtcgaggtggacgcgctccaccaggtcctcctccgcatgccggccgccgaggtggcccgctgcagcggcgtctgcgggcggctgcgcgacctcatcgccacggactccttccgccgcggccaccagcgccaccgctcccgccaccccatgccgctcttcttctaccgcctcgaccactgggccttccccgaccgcgtccgcgtccacctccgcgccgtcgacgtcgccgcccgcgagacccacccggtcatctgcttctcccacgccgacgccgacctccgcagcgccgacccgcgcgtgttcacgatcgagggctcctgcgacggcatcctcctcctctcctaccacaccaggctctacgcctgcaacccctccacgcgccggtggcgccgcctcccgccgctccacgacgaccacgtcatcgtcggcttctacggccacggcgccatcgacgagagggagtacagggtgctgtaccacacggcgcgccccggctgccgctactgggtcttctccctgagcttcttcccggaccagccgccgagggacatcgggcgccccgccgacctggaggccgtccgcgccgtgctcgccgaggggatctccccttcctacgagatgccgcccgtcgccatcgcgcacaggctgcactggcgcgcgcaggcggccagcctcaacgtgctggtgttcgacacggtcgccgagtccttcgggtggatacctcccccgaatcaacaggaaggtaatcagatgatcccggtggagggagaccagctgcttgagatcaacgggaggctcgccatgacgctcgtctcgcagaccaccgtggatgtctgggttcttcaggaaggggaggcttgggaacaccattaccagatctcgctgccggtggatctgctcaacgttttcggtggctacgacgacgaaggcttcgtatccgcagcagtgttcgccgtgtcccaggagaggaatgtgctggcacagtgcccggcgatgatgctccagtgcgacaccgaggggaacgtgctcatgttttactccctcgccggccacctcaccgtcctgtccagatatatgctccaggaaagccttcttgcgcatgcgttccttccgatgcggcaggaagatgcaatcgacggcgacccgccgttcttccaaggtccgtaatctgctagatagcaaccaggttttgcaatctgctgaatctatgctttagatgtgtgttcaagtttccgtagatgtagaagaagcttgaaattgcctgtggcaatcaattcgacagaattggtttgttgctgttgctaagtcatttggacattttgtatttagtagcaagcatgctggttgggattcatgttgatacagatgctctctgttaatttctgaattttcagttggactgaaatactgaatgaaaaagctaaccactgttcacc

SEQ ID NO: 25522 - DNA, 1736 bp, Oryza sativa
  ref <308>: DATABASE ACCESSION NUMBER: AK100964
  ref <309>: DATABASE ENTRY DATE: 2002-08-28
gatcaagagaatgcagtgcaagtgcaaactctcgcagtgagcctgtgtgatcgatcgatctgagtaggggtcggccatggagtcgctgctcgcagccggtgcgggagggatcggtgtggcggcggcggccgtcggggggtttatcgcggcggcgacactcgccgtggcaccgcccaagaaccgccgcaacccgcctccagctgttcctggtttacccataatcggaaatctgcatcaattgaaagaaaagaagcctcatcagaccttcacaaaatgggctgaaatttatggcccaatctacactataaggaccggggcttcttccgtagttgtgctcaattcaactgaagtagccaaggaggcgatggttgcaaaattctcatccatatctacccgaaagctatccaaagcactaacagtgcttagtcatgataaatccatggttgctaccagcgacagtggtgatttccacaaaatggggaagcgttatatcatgttaagcatgctgggtacttctgcacagaaacaatttcgtgacacaagagatatgatcatcaataacatgttaagcactttccatcaactggtgaaagatgacccacatgctcctctgatattcagagatgttttcaaggatgagctattccggttgtccatgatccagagcttaggagaggatgtgagttcagtctatgtggatgaatttgggagggacatttcgaaggaagaaatctacaatgctactgtgactgacatgatgatgtgcgcaattgaggtcgactggagagatttcttcccctacctcagctgggttccaaacaagagcttcgaaacaagagtgtttactacagaatctagacgaactgcggtgatgcgcgccttgatcaagcagcagaaggaaaggattgtgcgtggagaggcaaggacatgctatctggacttcttgctggcagagaacacactgacagatgagcaactaatgatgctagtgtgggaggcactcatagaggctgcagatactaccttggtcaccacagaatgggccatgtatgagcttgccaagaaccctgacaaacaggaacggctttaccaagagatccgggaggtgtgcggcgacgaggcggtcaccgaggagcacctgccgtggctgccgtacctcaatgccgtcttccaggagacgctgcgccgccactcccctgtcccgctcatacctccgaggttcgtcaacgaggacaccatgctcgccggctacgatgtccccgccggcaccgagatggtgatcaacctgtatgggtgcaacatgaacaagaaggagtgggagtcgccggaggagtgggcgccggagaggttcgccggtgggaggttcaaggtggcggacatgtacaagacgatggcgttcggcgccgggaggagggtctgcgcagggagcctgcaggcgactcacatcgcgtgcgccgccatcgcgcgcttcgtgcaggagtttgggtggaggctgagggagggtgacgaggagaaggtggacaccgtgcagctcaccgcctacaagctccacccgcttcatgtccacctcacgcccagaggaaggatgtgaaccattatattcattggaagctgttgctcgttgaataatgatatatagttatctttgagatgtatttactattagcaaaatctccatgctttgttctggataggagaaaacatattataatatatcgtggaatattttttttacc

SEQ ID NO: 25523 - DNA, 1956 bp, Oryza sativa
  ref <308>: DATABASE ACCESSION NUMBER: AK100965
  ref <309>: DATABASE ENTRY DATE: 2002-08-28
gactctcactctcacactctcgcgcacgcggtcgaacaccttggcagcaaacagcagcagcagcagatgatgccgcactccggcgtggtggacgcggcggcgaagggggtgaagctggggggcggtggtggcggggcgctgatggtgcgccgggtggcgagcggcaagctcctgtcggcgtcgtcgcacctgctgttccgggcaaccatcctggcgacgctctgcctcgtctgcctcttcaccgtgcactacccgtcgctgctgtcccactccttccacctctcctccgccgccgccgccgcgaacgggaagcacagggcggcgtcgcggtcgtcgcaccggagcttgcttgggtcgtcggcggcggtggcgtatgggggcgcggcgtgggagaaggaggtgaggaggagcgcggcgccgaggagggacgggggcttgtcggtgctggtgacgggcgccgccgggttcgtcggcgcgcactgctcgctggcgctccgggcgcgcggggacggcgtggtggggctcgacaacttcaactcctactacgacccgtccctgaagcgggcgcggcagcgactgctggcgtcgcgcggcgtcgccgtgctcgacgccgacatcaacgacgccgcgctgctggagcggctgttcgacgcggcgcgcttcacgcacgtgctccacctcgccgcgcaggccggggtgcgctacgcgatgcgcgcgccgcggacgtacgtcgcgtccaacgtcgccggcctcgtcagcgtcttcgaggtcgccgccaagcacgccgacccgcagccggcgatcgtgtgggcgtcctcgtcgtcggtgtacgggctcaacaccgacgcgcccttctccgaggagcaccgcaccgaccggccggcgtcgctgtacgcggcgaccaagaaggccggcgaggccatcgcccacgcgtacaaccacatctacggcctctccatcaccggcctccgcttcttcaccgtgtacgggccgtggggccgccccgacatggcctacttctccttcgcccgcagcatcgtcgctggcgagcccatcacgctgttccgcaccgccgacggcgccgacgcgcgccgcgacttcacctacatcgacgacgtcgtcaagggctgcctcggcgcgctcgacacggccggcgagagcaccggcaccaagtccggcaagaagcgcggcccggcgccgctccgcgtctacaacctcggcaacacctcgccggtgccggtcacccgcatggtcgccatcctcgagaagctcctcggcaggaaggcgaacaagcgcgtcgtcaccatgcccagcaatggcgacgtgccgttcacccacgccaacgtcagccacgccgcgcgcgacttcggctaccgcccggcgacccccctcgacgccggcctccgccgcttcgtcgactggttcgtccactactacaagctcgacacggccaagatcgccaagggcaagaggaaatccatggccatgtccgccgcgtcgtgacgtgtccacccaattgtccttggaggctagcactcgtcctgcaacttttttcagtgctaatttgtttaaaagattgctgctttgtttctccatgatggatgcaatcaaccatgctgaattttgcttatgctgcttaagcaaaatccatggctagtagagagaaaaagaaatggactggagtatagataagatgacagagcaaaaaaaggaaggagccagggcagaagaagaaagatgatgtcactggaatccttctggtttagaatattttcctctgaacttattcttttcagttaattaccatcttgttcttgttcatttggtctcatttggtgtgattcctgaatgatcatgccagcaacaagaacacaagatgctgtagtgggtgtaaatccaagcagcttcaggctgccataaaaaaatttatatatatactttaaattttggcggtgg

SEQ ID NO: 25524 - DNA, 1803 bp, Oryza sativa
  ref <308>: DATABASE ACCESSION NUMBER: AK100966
  ref <309>: DATABASE ENTRY DATE: 2002-08-28
gtctgtatctgaagataaatccataggaggaaatatgcatttcatacttttgcaaaatattcccagtgaaaataataactgattgtaagcaaaatgtgcactgatctataggtggcagttaagaaaatgaagaggaaatattattcttttgaggaatgcatgagtctacgtgaagtaaagtctttgcggcgcatgaatcaccctaacatcgtgaagctcaaggaggttataagggaaaatgacatattatacttcataatggaatacatggagtgcaatctctaccaacttatgaaggatagagtcaagcctttctcagaggcagaagtccggaattggtgctttcagatttttcaggctcttgcatacatgcaccagaggggttactttcatcgtgacctgaaacctgagaatctgttggttagcaaagatgtcataaagctggcggactttggtcttgcaagggaagttacatccgtgccaccatacacagaatatgtgtcaactcgctggtaccgagcacctgaagtattgctccagtcatctatctatgattctgcagttgatatgtgggctatgggtgccataatggccgagctgttgacacttcatcctctttttcctggcacaagtgaggctgatgagattctgaagatttgcaatgttatcggtagcccagatgaacaatcatggccacaaggattgtctcttgcagagaccatgaagtttcagttccctcaggtcagtggcaatcaactggcagaggtaatgacatcagtcagtagtgaggcagtcgacctgatttcatcactgtgctcatgggacccttgcaagagaccaaaggctgcagaagttctccagcatactttctttcagggctgtacatttgttccacctactgtccggtcaaaagctggagtgctccctaaaacgcctccatgtgttggagtaaaaggagtttcggagcacggcatgcctcgaagatactctacaggaactctatcaacaaccaaacctcatagtaatgcatctctgaaatcaagtggcttatctaagaccggtgtacaaagaaaacttcaaatggatcgtcaggcgccacagaagattaaaaaacctactgagagtaataataaactaaccactaatcgagtacctgcaaggaatagcccaggtcaccctgtattaaggcattcacgcagtttacctgaaactggccgggcaacaatgcacaaggtttcaacccttaccgagagattaactcatatgtctgttacctctcgaacgcgtactactcccaagcctgctgccccgttactgaaggctgggctcggcaagtctgacttactgggaaaaacagacgaaatacctcctgcaaagaggttgacaagaaaattagtaagctaacgtagcagcatccatacagtggaagctggttagctggtgcagagaggtgttataagctacagagcaaaatcccggtctgctgaaaatgatggcactgccggagtgtttgccaaatttgctgcatccaagtgccatagtagaataagtcgagcctgccgatccacgtggatctgcttttgccccaagtttgttccatgtttgaatagaacatgagtgtgctatatcgatttgaattgttgtcgaccagtgttcactcgcatatgcggtctgacaaatgatagacccgcgagcaggaggatgtttggcttttgcttgtacagtttatgagcttttgggtggcggtcaagtctttgtcgggtccttggcaaatgatacaatgcatagtctggttttgacttc

SEQ ID NO: 25525 - DNA, 3546 bp, Oryza sativa
  ref <308>: DATABASE ACCESSION NUMBER: AK100967
  ref <309>: DATABASE ENTRY DATE: 2002-08-28
gcccctccgcgtcgccgccgtcctctgccgccgccgtcgtccgtgtctcctgtattcctcctcccctttgtgtgggagattgtctgcccaatctctggaatcgacaaggttgggtggtggcaacccgctccggcggctgcctctcgtctctccaccaccccgtcccgccgattttccgcctcgacctggtggtgaagtgctcgattcggcagttcggggcttaccgagggcgcagggtgtcgatgtgcagcccgaggaatcgcatatccgaaggggagtcgaaattagggtttccctctactcgccgccgatgaaggggggccgcttgcaccgtctggagcggccgcccgccgcccacatcaccaccgccgcagccgccaccacgcccgctccggcgcccgccgatgattggggggatggctcgtggacggtggactgctcgtgcggcatcacgtacgacgacggggaggagatggtgagctgcgacgagtgcaacgtctgggtgcacacgcggtgcgcccgctacgtccgcggcgtgcacatctctttctcttgccacaactgcaagggccaagcgcgccccctcctccgccgacgaggctgaggtcgccgagctcctggccgagctgcccacccaccgcccacggccgttgtaccgccgatgggctgaagtccctctcccctcccgtgtccatgtccacgggcttccaggcggtacagacaccgccctattccgcagcgccgcaccctcccctgtattctcgtccgccctatggcgctgtgctgggtacgtacccaagagattcggcttccgctactgcgaattcccctactgggctgatgacaaggacggtgccaacgctctatttgcgctggctagagagaagcgcaaggaaaaggcagagactaggttccctctccgccttggagccatacacaaggacaagaattatgtcaggacgctgagcatttgcggcgataaggtggatggcgttgagcactctgtggacgatgacgcaaagaggacatctccaccaagtgatgcaaagaagagaggaacatccattagcattgtagagcctgatacttgggacaatggttgagagaagaaaagggattttgatgtgccagctagtgaggatcagcatgccaaaacaaacatggtaaattctgatttgcacgtgcttgttgaagctaagaagaagagggcttcatcctcagaacgaagtggggataagaagtgctctgcctcgaaggaaattactgggatgctaaagaaatatgaacctaaggagtccaagcgattggtgatatcctcaggagttgcaacaacggcagctgtagcagagcaagaagtgcactcacgatttgtgaagggtagcgtgtatgaaggactagacgggaatcaaaatgtaggtttacagactggagtaagatcgaatggagttgtgaaaagggatgatgccaaacgatcaagtggagatgtccagagcgatgctgctcctgagaaaatgaatgagggtctggatcttcagaagcaatcaaatcaaacttcaaatcttctggttgttggtggtgtaccggatttacagactaaccagtcagaatcattgactatcaagaaggaagcatctacagatgatcatgagagaaccgaggctatccagtttgtaagtgatgagcataaaagtggaaaacaagatactgcaatgttatcaacccttcagaggcattcgtccaagttagcatctgacttagtttatcaacatccaaagtctgaaacacaaaatccgatgcacacaataccagagcatccaaactcaagtttagaaccatcatcagaagaaactactgttcgtttggtaaagaaggatcagacaaggttggtctcatccgctgacagcgaaaatgattttgcaaaaaaatctgagagttcccaggatcgcacaagatcctctgataaagttcaattgaaaggctttgttccgtctgcgccaaaatcatctcaaggaagtagaacatatgtatcttctgccaaaaatagatttatagtgccaaaggagcagttgcaaaagacatcaactgaaggaaacgctccaccagggtcattacaaggtgaagtggcacccttacattctcgtaataaggcaatgcctttgagcttttaccaaagaaaggacaagatccaccaccgctctattcatatcacacaggacacttccaatagttcagcatcggctgagctgcaatctactgaaacaacagcttcattgagcgatgaacagcttgcattgttattacatcaacaattgaacagctcccccagagtaccaagggtgccacgttgtcatcaagcatctaccatgcagatgctacatccaactggagctagtgtgttctcaaaacggtcttcagcacatggaggaagggatcaagcactggtcttaaagaagaggaacaaagatgatgcatggagagataatgatgagaccaagaagacaggaaaggtgtctagtgttgaacggaggcatagagatagtagcacagaacgtgtccttgctgcaaaagactcatgcaaatttactgaaaatatagaatcagaacagagaaatcgtggcatttgttcaactggagccacctctggcgtaggaaatgatgctccaatagatagaggtgtttcacatgatttacctgggttgattgaggaaatcattagcaaaaatacaaacataacatatggtgaactgtgcaacgctattcgccagcattggggggatttaagtaaacccaacgtggaaaacaatgcataccccaactatttacatgctgttaacgattgtcttaggaacaggaatgactgggctcaccttgttgaccaggctgcaatgatgaatccaaacaagcgccggaaggtagaggaaagtgactctttgtcagcagatgtactggcaaccgagaagacaaataaagaggctaaaaggggtccagaagacacaaatgctgaatcacaccatgaaattctgccaaggggcaaacgcaaggctcggaaatgcaggcgtcttgaactgaaagggaggagagtcaacgatacgaggaagagatctagctttgattcggcctctgatgatgatgataccaccttgtcggattccagtagtgacagaaatgacacccctatggataagagcctagaagatagttttgttatagctaagaatgcagattcaagttcatagaggtggttcaatgcagtgctgctggcaatacattcgaatggagttggtgaagaaagacagatttagcgaccgcagatcggttcacttgtaagttgtaacagtagtgtaacatagttaatccttttctcgcctaactgtaatgcaggtagatttgttgaagtagcgtatcatgtaagcaatttgcaatttgtagcgtctgatgattgcgcccaaaataacaagcattatgtgtatcagcgtatctagttattttgtggcggattggttggtaacctaagcaaaaaatgtctacgaaactgcaattgaaccg

SEQ ID NO: 25526 - DNA, 2124 bp, Oryza sativa
  ref <308>: DATABASE ACCESSION NUMBER: AK100968
  ref <309>: DATABASE ENTRY DATE: 2002-08-28
ggctttgatggaaccaacattctgtgaaatgtacgctaatttttgtttccatttggctggtgcactgccagattttagtgaggataatgaaaaaattacattcaagagattgcttttgaacaaatgtcaggaggaatttgagaggggtgaaagagaagaagctgaagcagacaaaactgaggaggaaggtgagattaagcaaactaaagaggaaagggaagagaaaagaatccgtgctcgaaggcgcatgcttgggaacattaggttgattggggaattgtacaaaaagaggatgttgacagaacgcatcatgcatgaatgcattaaaaaattgctgggaaattatcagaaccctgatgaagagaacattgaagcactgtgcaaattgatgagcacaattggagagatgatagaccatgcaaaggctaaggagcatatggatgcgtactttgatataatgctgaagctttcaacaagtcagcaattatcttcccgtgttaggttcatgctgagagattcaattgatctcaggaaaaataaatggcagcaaaggcgtaaggtggaaggcccaaagaaaattgatgaggtgcacagggatgcagctcaggaacgacatgctcagtcgagtaggttagctcgtggctcagttgttggttctggtccaaggcgaggagctgcacctatggattatggtcctcgtggctcagcagcagcattggcttctccaagttctcagcaagttggccatagaggaatgccttcgcattcccgagggtttggtacccaagatatccggtttgaagaaaggagtcctttggaccatagaacaactgtccttcctccgcgtaaggatgaagccatcactcttgggccacaaggtggcctagcaaggggtatgtctataagagggcagccactgatatcaaatgctgagctttcttctgctgatagtcgcaggatggtatctggtcccaacgggtataattctgcttcaactgcaagagaggaacctggctcgagaattcctgatcgctctggaagaatagcaccaaatacacagtttgctggaccatcgaacaggcctgccagccaagagggccgttcagggaataaattatactctgaggatgatttaagagagaaatctatttccgccatccgggaatattacagtgcaaaagatgagaaagaggttgctttgtgtattgaggagttgaatgctccaagtttctatccctctgtcgtatcactgtgggtaaatgattcttttgagaggaaagatatggaaagagagttgttgacaaagcttttcgttagtctttgcaacagtcgaaataatttattgagcaagtctcatctcactgcaggacttgcgactgtccttggttcattggaagatgctctaagtgatgctccaagagctgcagagtatcttggacggcttcttgcaaggtttgtggtagaaagcatattgtccttgcaggaggtgggtacattgattgaaaaaggtggagaagaacctggagagcttgtacatcatggcattggagctgatgtccttggtgcagttctagagtcgatcaaagtagaaaagggggattcattcttgaatgaggccaaggcaagctccaacctcaagttggaggattttagaccacagcatctcaagagatcgaagttggatgccttcatgaaagcataaagaagctttgttactagcttaccgattcatgggtgttggcaccatggagtttttggcatcagaccagccttttttttattgacaactggaaaggcccatcagatgctgcccctacttggcatgcacccattaattcttccaggagctcatgctgtgtgaattttcttcatcctgttcagagttggttctgatggtaaattatggaattgtcctcgatgtttgttgccaatagttagtcccatttcgagtcggccgtagcgagtatcagggttatttttttgtgatcacaggggggagaagtctttctaaccaatgtttgttgggagtagggagaattctaggttcacagcttgatgcctcccgtggcttctgaccaatatttcattgtgataagactttgtagttgcttataacttatcggc

SEQ ID NO: 25527 - DNA, 2220 bp, Oryza sativa
  ref <308>: DATABASE ACCESSION NUMBER: AK100969
  ref <309>: DATABASE ENTRY DATE: 2002-08-28
gactccacccccccatccccgcaccgctcgcctcccactcccgcgcccaccgcctcatcccccacattccccgccccgatgaccaccccgtccgcgccgccgccgtgcccgcacctcgccgcgtaccgccacaccacgcgctccctccgcttcctccgccgctgcctccgcgtccgcccgctcggccgccccgagatccgccgcgagcctcgcgagctcccccgctgctccccctgctcctcccccacctcctcctcgtcccgcctctacgcctgcctctcctgcgccgccgtcttctgccccacccacgccgcctcccacgcctccgcctccacatccggcggccaccagatcgccgtcgacgtcgaccgcgccgagctcttctgcggggcgtgcggggatcaggtctacgatccggacttcgaccacgccgtcgtcctcgcccagtcctcctccctccctcccccatcggcatccgcctccccctccccttcccccgccgcgccccgcaagcgccgccgcgtcgagtaccgcgcctgggcaccagatccggccgaattcgcgctcatcagctccgccgatcccaccacctccgcatccgccgccgcgcccgcggggctccgcgggctcaacaacctaggcaacacgtgcttcatgaactccgtgctccaggctctgctacacgcgccgccgctccggaactacttcctcggcgatcggcacaaccgctacctctgcccgcgccagacgcccatgaggcgccgttccgccgaggcaaacgacaaggcggcgtgcctggcgtgcgatctcgacgagatctactccgccgccttttccggggagcgcacgccctacagccccgccaaattcctctatagctggtggcagcatgcatcaaatcttgcgagctacgagcaacaggatgcacatgaattttttatctccatccttgaccatatccatgaaaatataaaggatgatcaacacaaatcacttgcccaaggccatggagattgttgcattgcacacagggtattttctggcatcttgagatcagatgtcacctgcacacattgtgggttcacatcaacaacttttgaaccctgtatggacatctctctagacttggatgctggatataacaattctcttggtgttgcaaacccaaaggtacatgtgcggaatggagagcgaagctcaggtggcactaataccaaggtatcaacactcatgagatgtttggagcggtttacaagggctgagcggttggatgctgaacagaagttcttctgtgaacgttgcaaggagaggcaagagtccctgaagcaaatgtccattcggaggcttccattggtttcatgctttcatattaagaggtttgagcattcatcagttaagaaaatgtcaaggaaggttgatcactgtttacagtttcctttttctcttgacatggcgccatatctatcgtcctctatactcagaagcagatttgggaaccgtatatttccatcagaagctagtgatgcagattcagtttctgaattttcatcagaatttgaaatatttgcggtgatcatgcatagtggtaagctagaagctggccattatgtgacatatctcaggttaaacaatcactggtacaaatgtgatgatgcctgggtaaccagagttgaagagcatactgtcagaacctctcaggcatacatgctcttctatgtgcagaagacactttactacaaagcttgtgaaagagcaactgctgtctgatttggaacaaatatggctgacattattctgatcagccacaaaatatagtcatcagagagcgcaccatgtaattccatccagagaaaaagtgcctgtcatttggacagccacgaagtcggatgagattcaacttttttgcatgcaataacctttggattcggttgaccgagggtttttggcaattttctcaatagccaccacccaaaggaagaaggtcaattttatttgctcaatttatcttattacctgatttatgtgatcaattaagctggaagcattacactgttttacacaattggttgcgagggtgttctaaccccgataatgctggtgtttaagattatattgagcaaggaaataagtggaatgtgtagaagtgagagaaaagggaaccgaattttttgatgtgttcctttcagtagttgaatgccatctctactagctgatagcctg

SEQ ID NO: 25528 - DNA, 1416 bp, Oryza sativa
  ref <308>: DATABASE ACCESSION NUMBER: AK100970
  ref <309>: DATABASE ENTRY DATE: 2002-08-28
ggctggtctggacgccgcctccgccgccgccgccatggcgcggcagcaagtcgccgccgcggccgccgtcgccgccatcgccggcgctgccgccgttcttgcaagcgagctctacagtcggaggtgccgtcggttggcgacgagggtccgggagctggaggcctcgcttgccgccgccacggagaaggccgccgccgagcgccgcggtagggttcgggcgcagcagtcgctaaggaaggctctgagcgagcaagagctcagctcggatgagaagaagaagctgagccaatcccccaagtcgttccccatggcttcgatcggtgtcgtgcagtcatgcttctccactaggaatgggacgccgaggcagcctttggtggtgccacttgccagagcaaccgtgatgcttgatccagcccgtgtccctgcggaagcgcttgagggacttgccgattactcgcactgctggatcctttatgtgttccatctgaacactgaccttgataaaatgtggaatgaccctgctaggtccaagctaaaagcaaaagtgagagtacctaggttgaaagggggcaagatgggggttctggcaactagatctccacaccggcctaatccaattggactcagtgtagcgaaggttgaggcggtggatgggcattcaattttgctttctggagtagatttggttgatggcacgcccgtgcttgatatcaaaccgtatctgccatattctgatggtgttaaaggtgcagctattcctaattggttagaggttgacggtgcattagctgtggagtctatccacttttctgagcacttcatttcttcactttctgattgctggatgcatgtaaaaaagcaatcactctacgcttcagcagatgagtttcaggatcttgtcaaggaagtgctctcctgggacatcaggtcgctgtctcagcggatccgtccccatgatgtgaccataaaagatgtcactgataatggcggcagcaaaattgacaacggttgcagcaacgatgaggatcgccaatccgttgacccgtccactagcgtggtctaccaccttcatctagaaggcattgatgtgtcatacagaattgaccaagattccaacattgttgttgagaatgcagcccttctctccagtgctgtgaaccaacaccggtacagctacttaacatggagggaaaaggtaagcattttgtaggagcatatattagagctcattatctgaaaaacaaatagagctcatgcagtaaactgtatgcatgaaaaaaatatatattagagctaattaccatggagtaaagctgtatgcaatcttatgaaattctactctaaaatgtcatgaggtcaatggattctctagcttttctcatttaaagaaagaatttgagagtgtttctctttcag

SEQ ID NO: 25529 - DNA, 1588 bp, Oryza sativa
  ref <308>: DATABASE ACCESSION NUMBER: AK100971
  ref <309>: DATABASE ENTRY DATE: 2002-08-28
ggttccactcgtctcgccattaacaagaattctttttttccttcccccaaatccttctcgagcaacagctaggggggagtggttcgcttcgtaagaagccggctacctctgctcgatcccgcctttgcctgcggattcccaccctgattttcgccgtttgtttgtttagtttcttggggcaaattcgagacgaggggaggagagtttttttgggggggagttgttgcggccttgcgggcggggtatgcggctgcacggggaggtttccttcgatgaggacgaggaggaagtggtgatggttccggcggcggcgctgtcgtcgtcgccgctcaacggcggggccgttccggtgacgaggctcgtggtggggtacgccctcaccaagaagaaggtgaagagcttccttcagcccaatctgctgttgctggcgaggaagaagggaattaatcttgtagcaattgatgacactcgcccgcttgcagaacaaggcccatttgatgttatcttgcacaagattactagcaaggaatggcaacaggttctggaggattatcatgaggaacatccagaggttactgtccttgacccaccaaatgccatcaatcatctgaataatcggcaatctatgcttgcagaagtatctgatttgaacttatccagtttctatggagaagtttgcactccacgccaactggtcattatgagagatccatcctctataccaaccgcagttgccatggctggactaaccttgcccttggttgcgaagccattggttgttgatggaacatctaaatcccacgaactatctcttgcatatgatgaggcatccttatcaatgcttgatcctcctctggtcctccaggaatttgtgaaccatggtgggatcctctttaaggtgtacatcattggtgaaactatacaagttgtacggaggttttctcttcctgatgttaacacttatgacttattaaacaatgttggcgtctatcgatttccaagagtttcatgtgctgcagctagtgcagaccatgcagacctcgatcctcatatctcagaacttcctccaagaccactcctagagaaactgggaaaagagcttcgtggaagactgggtttaagattgttcaacatagatatgatcagagaacttggaaccaaagatcggtactatataattgacatcaactacttcccagggttcgggaaaatgccaggttatgagcacatattcaccgatttcttgctgaatcttgcgcaaagcaagtacaagaagtgcttaagcggcggctgaagtgcaaagagtcctgctgaacattaacaaaatggaatgtaacggtctagcagtcagtgtacatatctcggagaaataagtttaatcccaaggctttgaggaagagagatttagggtgtcttcccagaaaatggtggcacttacaggattagagaagagatgaaaaaatggatcgattttctaatgccgagtgcttgtataaatcactaacactgaatgttcccagcgtgccttcgtcaaggcttctgtctcaataatttcattatctttttcatgagcaatccttttagaatg

SEQ ID NO: 25530 - DNA, 1738 bp, Oryza sativa
  ref <308>: DATABASE ACCESSION NUMBER: AK100972
  ref <309>: DATABASE ENTRY DATE: 2002-08-28
tgaaggtaggatggcatcgttgatggaagtgcaggtgccgctgttgggaatgggcactacgatgggcgccctggctctggctctcgtcgtcgttgtggttgtgcacgttgccgtgaacgcctttgggcggcggcggcttcccccgagtccggcgagcctaccggtgatcgggcaccttcacctgctccggccgccggtgcaccgcaccttccacgagctggcggcgaggctgggccccctgatgcacgtccggctggggtcgacgcactgcgttgtggcgagctcggcggaggtggcggcggagctgatccgcagccacgaggcgaagatatcggagcggccgctgacggcggtggcccggcagttcgcgtacgagtcggcggggttcgcgttcgcgccctacagcccgcactggcgcttcatgaagcggctgtgcatgtcggagctgctgggcccgcgcacggtggagcagctgcgccccgtgcgccgagccgggctggtgtcgctgctgcgccacgtgttgtcgcagccggaggcggaggcggtggacctgacccgcgagctcatccgcatgtccaacacctccatcatccgcatggccgccagcacggtccccagcagcgtgacggaggaggcgcaggagctggtgaaggtggtggcggagctggtgggcgccttcaacgccgacgactacatcgccctgtgccgtggctgggacctgcagggcctcgggcgccgtgcggccgacgtgcacaagaggttcgacgcgctgctggaggagatgatcaggcacaaggaggaggctaggatgcggaagaagacagacacagacgtcggcagcaaggacctgcttgacatcctgctggacaaggcggaggacggcgcggcggaggtgaagctcaccagagacaacatcaaggccttcatcatcgacgttgttactgccgggtccgacacttcggccgccatggtggagtggatggtggcggagctgatgaaccacccggaggccctgcgcaaggtgcgggaggagatcgaggcggtggtggggcgggacaggatcgccggcgagggggacctgccgagactgccgtatctgcaggcggcgtacaaggagacgctgcggttgaggccggcggcgccgatcgcgcacaggcagtcgacggaggagatccagatccgagggttcagggtgccggcgcagacggcggtgttcatcaacgtgtgggccatcgggcgagacccggcgtactgggaggagccgctggagttcaggccggagcggttcctcgccggcggcggcggcgagggcgtggagccgcgcgggcagcacttccagttcatgccgttcgggagcggccggcgcgggtgccccgggatggggcttgcgctgcagtcggtgccggcggtggtggcggcgctgctgcagtgcttcgattggcagtgcatggacaataagttgatagacatggaggaggcagacggcctggtttgcgctcggaagcatcgcctcctcctccacgcccacccgcgcctccaccctttcccgccgctcctctagctacccctacctacctaccactcctactcctttcctgtccctgtaacgcaccgtaatacaaccattataaattaattaccactttactatattgtaataattaatgtgtatgtattccctacctagacctattgcatgtctctcaaatcaaatattccaagcaagcttgattgtgat

SEQ ID NO: 25531 - DNA, 1237 bp, Oryza sativa
  ref <308>: DATABASE ACCESSION NUMBER: AK100973
  ref <309>: DATABASE ENTRY DATE: 2002-08-28
gaccaccaagcaaatcacgtagtccctccacacacctcgtacctcgatctcgaagcttaattactagttaacattaacaatggctgctaataagctcaagttctcccctctccttgccctcttcctcctcgccggcatagccgtcacctcccgtgccggcgacatcgccgtgtactggggccagaacggcgacgagggcagcctggccgacgcctgcaactccggcctatacgcgtacgtcatggtcgccttcctcagcaccttcggcaacggccagacccctgtcctcaacctcgccgggcactgcgaaccaagctccggcggctgcaccggccagagctcggacatccagacgtgccagtcgctgggcgtcaaggtcatcctgtccatcggcggcggcgccggcagctacgggctgtcgtccacccaggacgcccaggacgtggccgactacctgtggaacaacttcctcggcggcagctcgggctcccggccgctcggcgacgccgtgctggacggcgtcgacttcgacatcgagaccggcaacccggcgcactacgacgagctcgccacgttcctgtcgcggtacagcgcgcaggggggcggcaagaaggtgatcctgacggcggcgccgcagtgcccctacccggacgcgtcgctggggccggcgctgcagacggggctgttcgacagcgtgtgggtgcaattctacaacaacccgccgtgccagtacgccaacggcgacgccagcaacctggtgagcgcgtggaacacgtggaccggcggcgtcagcgccgggagcttctacgtcggcgtgccggcggcggaggccgcggcggggagcgggtacgtggcacccggcgacctgacgtcggcggtgctccccgccgtgcagggcaacgccaagtacggcggcatcatggtgtggaaccggttctacgacgtgcagaacaacttcagcaaccaggtgaagagcagcgtctgagctatagcctcaacctcaagcccccaagcctgagtaattaacttacgtgacacgtatacttattacttgcacagtggttgagttggactataaataagaggagatccgttcatacgcatctgtaatatagtagtagtaataagcagttatgtatgcacaacccacatggtgtactttgtgtaactctgtgtttgatcatgggagtgtatttgccgatataaattaaataaggagaatgatttgcattaagcc

SEQ ID NO: 25532 - DNA, 4039 bp, Oryza sativa
  ref <308>: DATABASE ACCESSION NUMBER: AK100974
  ref <309>: DATABASE ENTRY DATE: 2002-08-28
gaccccacctacacactcttcttcctcctcttccttcttcttcttcctcttcttctcctccatttccatttctccacccaccaccaaacatctccggatccttcgctccatcctcctcctaagaagagcccaagaagccagcaagatccaaagatcaagagcagcatttgtagctgcaactgctggtgctggtgctgttgctgttagatcgaggaggattcaacaagtgtgttggtggtggtggaagttgttacagaattgcgggtgagagaagtttcttcaccgcacctcaccaaaatctccatccatccgtctgaatcccaactccacctgcaactgcaactgcacggcgagattgcagtacaacccaagaaaccatgatgaagtggcagcatcagtagcagtagcagcagcaggaggaggaggaggaagagggctcctctttaatccttgcttcactcatcttcatcagaatcctccttattggctccgcctcgcattctgtgctgcatcggctgttgtatggtcggtggcgaagatgacgatggagcacggcgaggattgctgcgtcaaggtggccgtccatgtccgcccgctcatcggcgacgagaagcttcagggctgtaaggactgcgtctccgtcgtctccggcaagccgcaggttcagatcgggagccattccttcaccttcgaccatgtgtacggcagctccggcacgccgtcggcggccatgttcgaggagtgcgtggcgccgctcgtcgacggcctcttccagggctacaacgccaccgtgctcgcatacggccagactgggtcagggaagacctacaccatggggacggcctgcaaggagggctcacacattgggattatcccgcgtgccatggccacgctgttcgacaagatcgacaagctcaagaaccaagtagagttccagctgcgcgtttcgtttattgagattctgaaagaagaggtgagggatttgcttgatcctgctactgctgctgttggcaaacttgagaatggaaatggacatgcaaccaagttgtcggttccagataaaccccctgttcagatccgggaggcgtcgaacggggtcataacgttagcaggatcgaccgaagtgcatgtcactacccagaaagaaatgacggcatgccttgagcaaggatctctgagtcgtgcaactggaagtaccaacatgaacagccaatcaagtcgttcccatgccatcttcacaatcacattggagcagatgcgcaaagcagatcccatcatgactttagatggaatgcctattgaagagatgaatgaagactatctctgtgccaaactccacttagtagatcttgctggatcagaacgtgctaaaagaactggttctgatggccttcggtttaaggaaggtgttcatatcaacagaggacttcttgctcttggcaatgtcatcagtgctctcggtgatgagaaaaagaggaaagaaggcgctcatgttccttaccgggacagcaaactcactcgccttctgcaggactctctaggtggaaacagcaagactgtaatgatagcctgtattagtccagcagatatcaatgctgaagaaacactgaacactttgaaatatgctgaccgcgctcgtaacatccagaataagccaattgtaaatagaaatcctgttgctgatgagatgaaaaggatgcgccagcaaattgaatacttgcaagcagaactcgtttcagctcgaggaggagttgtcttagatgatgttcagggtctcagggaaaggatctcaatgcttgaacagaaaaatgaagacctttgcagggaactgtatgaccttcgcaaccatggttacactgatccttgtgaacctgaactgcaaaaaattggaactggttacactaaaggtgaagggctcaaaagaagcttgcaaagtacagaaccatttgatgtccccatgactgactcagtaagagcaggcagccctaaagatattgatgatgaagtggccaaagaatgggaacacacaatgctgcaggatagcatgggcaaagagttgaatgaattaaacagacaactggagcaaaaggagtctgagatgaaaatgtatggatctgacactgttgcacttaaacaacactttggaaagaaacttttggagcttgaagaagagaaaagagctgtacagcaagaaagggacagattgttagctgaagttgaaagtctaaatgctgatggacaaacacacaagttgcgagatgcccagctgcaaaaattaaaaacccttgaagcacagattctagacctcaagaaaaagcaggagaaccaagttcaacttctgaaggaaaagcaaaagagtgatgaagctgctaagaagttgcaggaagaaattcattctataaaggcacagaaggttcaactacaacataaaatcaaacaagaagcggaacaattccggcaatggaaggctacccgtgaaaaggaactcctgcagttgaggaaagaggggcggcgaaatgagtatgaacgccacaaacttcaagcacttaatcagcggcagaagttggttttgcagaggaagactgaagaagctgcgatggctaccaaaaggctgaaagagttactagaggctcggaaatcatcaggacgtgacaactcaggcatgaatggtacttctcctggctctcatatgactgagaaatcattgcaaaaatggctagagcaagatttggaagtcatggtgcatgttcatgaagttcgaaacgaatatgaaaagcaaagtcaattgcgtgctgcacttggtgaggagcttgccattttaaaacaagaagatgtcatgtctggtgcagctagtccgcccagagggaagaatggaaactctagggcaaatactttgtcaccaaatgcaagacaagctaggatagcatcacttgaaagcatggtgacaatatcttcaaatactctcgttgctatggcttctcaactctcagaagctgaagaaagagagcgtgcattctctgggcgtggtcggtggaatcagttgcgttcaatggcagaggcaaagagtttactgcagtatatatttaacgttgctgcagatgcaagatgccaagtaagggagaaagagatggagatcaaggaaatgaggagcaaatgacagagcttgtgaccatccttcgacacagcgaatcacgtagaagggaaacggaaaagcagcttaagcaaagagagcaggcagctgtaactgccactacatctccaggaaacggaaatggttcagtgaagcactctgctgatgactccaacacaccattgtcaccagttgcggtgcctgcacagaagcagctgaagtactctgctggaattgtaaatagccccagcaaaggggttcctgcattcaacaaacaacatcttaagatggttcctatggcacagttgcctgttggcaagaaggtttcaatagcagggcaatcaggaaaactttggagatggaaaagaagccaccaccagtggctactgcagttcaagtggaagtggcaaaagccctggaaattgtccgagatgattcgacacagtgacgaaacgatgacaaggactcgacccagaccccagcttcttcctcatagacctcaaagagtgatgtgaaaaaggcttttcttttcttttttttcttcgtctccacatggactgacacggtttacacagctaactacctccacaagggtaacaatgcagctaaaagctccaggagatctccttcgtgcttcgattttacttagccacgggatcgaaaaaaaaaaagtatatgttcatagggtgactgtctttggatgtaaatttcttgtgcctatatagtgagtgtgaatgttagagatgaaaatttagcgagtgagcgagggagggagtggccgttcttcgcgaaagcactgactgagcacaatgcttcatgtttcagcactcatcaactggtgagatgtcatacttgttgtccttctgcatataaggaaaaatctgtcgaaggatggcgtcttgtaaagtc

SEQ ID NO: 25533 - DNA, 2772 bp, Oryza sativa
  ref <308>: DATABASE ACCESSION NUMBER: AK100975
  ref <309>: DATABASE ENTRY DATE: 2002-08-28
ggaggtggcagagaaggaaggaagccaaacggcatgggctctcgtggcgccgccgccgaccatctccacggcgtcctcgaactgacggtgtacgaggccgacgacctccacaacgccatccatggccggatcatcaaggcggcggagagcttgaaggagtcactgggcgtgcaccgtctggcacacaggatctacgtcgacgtcgatgtcggcgcggcgagggtggcgcgcacccgcgaggtggagttccacccgaccaaccccgtctggaaccagtcgttccgcctccactgcgcctacccggcggcggcccgtggcgttcaccgtcaagagccagcacctcgtcggcgccggcgtcctcggcgccgcgcgcgtgccagccgcgcgcgtcgccacgggtgagcccgtggagggctggctcgacctccgcggcggtgagcatggccacgcgacgcacacccagaagctccgcgtccggctgcggttcttgggcgtggagtccgacccgtggtgggacgccggcgttcgcctccccgggttcgccggcgtcacgccggcgttcttcccggagaggagcggctgccgcgtgacgctgtaccagaactcgcacctgtccggcgggttcgacccgggcgtccgcctcgccggcgggggggcgtaccggccggcgcgcctgtgggaggacatgtacgtcgccatccgcgacgcgcggcggttcgtgtacgtcgccgggtggtcggtgaacgcggatatcacgctggtgcgcgacgcgtcccggatggtccccggcgccgagggcgtcacgctgggcgagctgctgcggcggaaggccgacgagggggtggccgtgctggtgatgccgtggcaggacaagacgtccgtctccttcctcggcaacgggggcctcatgaggacacacgacgaggagacgcggcgcttcttcgagggcaccaacgtgcgctgcttcctctgcccgcgcaacgccgacgcgtcgctcaccatggtgcagagcatcgaggtcgcagcggagttcacgcaccaccagaagacggtcaccctcgacgccgccgccgcctcgccgggcgacgcggacggcagccgtcgccatatcgtcagcttcatcggcgggatagacctctgcgacggccggtacgacgacgagaaccacacgctgttccgggacctcgacaccacgtaccgccatgacttcatgcagaacaacttcaagcacgccggcctgcggcgcggcgggccgcgggagccgtggcacgacgtccactgcaggctcgagggccgcgcggcgtgggacgtgctcgccaacttcgagcagcggtggaggaagcaggcgccgccggagatggccggctgtctgctcgaccttagccaggcggagctccctgaccccggcagcttcggcgacgacgagccgtggaacgtgcaggtgttccggtccatcgacgacgcgtcggtcgtcgggttccccgccgagccggtggcggcggcggcgatgggcctgacgaacggcaaggacgtcacgatcgaccggagcatacaggccggctacgtcgaggccatccgccgggcgcggcggttcatctacgtcgagaaccagtacttcctcggcggctgcgcgtcgtgggccgaggaccgcgacgccggctgcctcaacctggtgcccgtcgagatcgcgctcaaggtcgccgccaagatccggcggggcgagcggttcgcggcgtacgtcgtgacgccgatgtggccggagggcgagccggccggcgactccgtccaggccatcctccggtggaaccggctcaccgtggagatgatgtacggcatcgtcacgaaggccatcgacgacgccgggctgcgcggccaggcgcacccctgcgactacctcaacttcttctgcctcgggaaccgggaggcgccgcgccccggcgagtactcgccgccggagacgccggacgttgacacggactactggcgcgcgcaggtgaaccgccggttccccatctacgtgcacgccaagctcatgatcgtggacgacgagtacgtcatggtcggctcggcgaacctcaacgagcggtcgctggccggcaaccgggacagcgagatcgcgcaggggagctaccagccggcgcacctgaacggcggcccgagcggccgcgcgcgcgggctcgtgcacgcgttccggatgtcgctgtggcacgagcacctcatgggccacgccggcggcggcggcggcgtgttcctggagccggagagcgcggagtgcgtgcgcgcggtgcggcgagcggcggaggcgacgtgggacgcgtacacgcgggacacgatggaggacctgctggggcacctgctgccgttcccgatcaccgtgtccgagttcggcgaggtggccgacctgacggccgacgggtgcttcccggacacgacggcgccggtgaaggggaggaggtcgttgaagcttcccgccattctgaccacgtgacgccctgagcttaccgtgccgtgccgcatgtacaaaactttgacgcaacgatcgtctcttcacgaagccgaacaagtgtacatgttggattggatgttgccgagtttatattgagtgaatccaagatacgtcactcgtgatagccactgagtgacaccaaaaaataatctagtttttctttgagtaaattgtagtggtggtacacaaacttattaggtgggtgcaatttaatatacaaacttataaaatgtttgtttcagtatacaaatttgtctagttcgtgc

SEQ ID NO: 25534 - DNA, 3608 bp, Oryza sativa
  ref <308>: DATABASE ACCESSION NUMBER: AK100976
  ref <309>: DATABASE ENTRY DATE: 2002-08-28
ggtcttgcgccgctgagtttctgaccccgccgcggcctccgccgtttcgtacgccttctcctctcccgcgcgcacccgcctccgcctccgccttccccggccgccgccgccgccgcaggagaggagacgcaggccgcggcggcgtcaaccgccgctctccctttgccaccatctccgctcccgacacacactccactccactccagtccacagcactaacccatcggtcccggcgatccccactagtgcccctcctcgcccgcttgccatggcggcttgcggcgccgcggcggcggagtattcagctctcctgtccctctcatgtgggcctatcactcgccgccgtttcgccgtctcctgccgcgctcgaccgcccggcaacctcagtgcacagcagaagaagaagcgagggaaaaacattgctccaaaacagcgctcttcaaatgccaaactcttgcttactactgaggaaaatggacagcttccaagtaccagtttgaggacttctatggaacgtcctcagaagagtacatccagtgaggacgataccaatggggctattagccagatagatgaaaaaattgcagccattgataatgaacagcaagagaggtcaaaggataaacatttcgaatcagactttcaacttgaagattttggggaaatgatacaaaacatggaaaagaatattctgctcctaaatcaagctcgtcttcaagcaattgaagatgttgacaaaattcttactgaaaaggaagctttgcagaaaaaggttgacactctagagatgaatttgtcaaaagcacttgccaaccaaagggaacataaatacagatatccctggtgatcatttagagaaatttacaaaagaaattttgatagaaagtgctctaagtggaggcaatccagcacatttgtgtgagtctccacttttcatggagctgactgttctaaaagaagagaatatgctacttaaggctgacgcacaatttcttaaagcaaagattgttgagtttgctgaaacagaggaattcctattcaaattggagaaagaaaggtcactgttagacgctacagttagggagctggaagctaggtttctagttgctcaaactgatatctggaaagatgtccctctgcaatatgatgtttggatggagaaagtagaaaatctgcaacacatgcttggatgtttgaaaaatcatgtagagaagtatgctgcattgttggatcagcatgatgatctgcatgacaagattgatgagctagaagcatcactaaaagaagggaaaacatctgagttttctccttatgttgttgaacttctgcaacagaagttgaaagcagcaaaaagccatcaccaagcaggccatcaagaaacaaacactcacattcaagtatatcagcagttaactgaggaatttcaagataacctaggtaaactaatagaagaaagtggcagactggagcattctgcaaatagtatgccatcagaattctggagtcacatcctgctcatgattgatggttggttccttgagcggaaaataccaaatactggtgcacgtatgctgagagaaatggcatggaagagagatgaccgtatctgtgaagcctactttgcttgcaagggtgcaaaagaaagtgatgttatggaaactttcctaaagctatcgttatcaggaaacagtcaatgcagttctggcttgcacattgtccatatagcagcagagatggctccagtggcaaaggttggcggtctggcagatgtagttgctggtcttggcaaggcacttcagactaagggacatttagtagagattgttcttcccaaatacgactgtatgcaacttgaccagattactaatcttaaggttttagatgttgtcatacaatcctattttgatggaaatctattcagcaacaacgtgtggacaggaactgttgaaggtcttccagtctattttattgagccacagcatccttcaaaattcttctggagggcccaatactatggagagcatgacgattttaaacgttattcatactttagccgtgcagcactggaattactttaccaatctgggaagaaaattgatataatccactgccatgactggcaaactgcatttgttgcacctctatattgggatatatatgcaactcgaggcttcagctcagctagaatttgtttcacttgccacaacttcgaataccaaggtacagcacctgctcctgatttatcatattgcggccttgatgttgagcagttggatagaccagacaggatgcaagacaatgcacatggaagaataaatgttgccaagggtggaattgcttattccaatattgtgacaactgtatcaccaacatatgctttagaagtgcgctcagagggtggtcgtggtctccaagatacacttaaaatgcattccaggaaatttgtggggatacttaatggaatcgacacaggaacatggaacccttccacagacagatttcttgctgtgcaatatagtgctactgatcttcaggggaaagcagcaaacaaagcatttctcaggaagcagctagggctgtattctgaggatgcctctcaaccactggtagcctgcattacgaggctagttcctcaaaagggtctacatcttatcaggcatgcaatatacaaaacagctgagttaggaggacagtttgtactcctgggttcaagtccagttccacatattcagagggaatttgagggtgttgcagaccaattccagaagaataacaatattaggttaattctgaaatatgatgaagctttgtctcatggtatttatgcggcatctgacatgtttatcattccatcaatgtttgagccttgtggccttactcagatgatagctatgagatatggttctgtgccaattgttcgacaaactggtggattgtgtgatagtgtttttgattttgatgatgaaactatacctgtggagctgcggaatggctttacatttgctaggactgatgagcaggatctaagcagttgcttggaaagggcattcagctactacagcagaaaacctatggtttggagacagttagtgcagaaggatatgcagattgatttcagctgggattctccagcttcacagtacgaaaacctttatcagagtgctgttgctcaggcaaggggagcggctcaaacataaaccttttcatgatgacattgtgagcttagattctcccaagcgcagagacaatcgtcagttttatcatatctgaaccaggcatatgctgaagaaatattgttcttctcacattcacagaattcacacatcgtgatccttgctgttgccattcccgaaagaactgagaaagagtagtcttacagttgatcaagatattgcattttgcagtcagtgcacggaactagttctgggtttaatggggatgagtaatcataatctatactggattgcccccctctaaattccccccacccgttagtttttgtgggaatgcaagaagtaaatatgtgcactgtagggtgacattcgcatacatgatactgtacggtttattcagatcaacgtttgggtaatgtgactacttttgagttt

SEQ ID NO: 25535 - DNA, 1853 bp, Oryza sativa
  ref <308>: DATABASE ACCESSION NUMBER: AK100977
  ref <309>: DATABASE ENTRY DATE: 2002-08-28
ggctggccaccagcgggccgagccgcggagaacgaggcgaggcggtggggaaggctccggcgagcctccgcgcgcgccgcgctggtgctctgctcgctgacgatgattccagtcgtcgtcgtcctccaccggtgtgcggtctcctcctcctggccggatcgggttttcgaagccaagcacatcgcgggagccggcgagcaagatatgcaagatgatctgcctgatgatctaactgcatctcagtacatcggctatgacaaatttctgggtggtcttctgcaagagggatttgatgaagtatcctgccgaagcaggtatcagtttgcacggtaccacaagaacttcacaagaataccttcttcatacctcttagaaaggttaaggagacaagaagcattgcagaagaagtgtggtccaggcactaaatcatacaagcaagctgtgaagctgctgaggtccagtcagggcgtcaacatgacgacagattgcaactatctgttcttgacagtacatgctgggttagggaacagaatgcttgagattgcttcagcatttctttatgcactccttacaaaccggattttgcttttggaccgttatcaggagatcggtgaccttttctgtgaacctttcccaggaacctcgtggttaatgccttcggatttccctctaaactatggtgaatttactcagagtagcccagagagctatggaaacatgctgcagaataaggttgtcggtgacaatacagatcagtctctggctggttctaggcctccctacgtgttcctctaccttgatggtaactatgaattccatgacaagcttttcttctgcgaagacgaccaacagttcctgcaagatgtgccgtggttgatcatgagaaccgacatgtactttataccatcactatttcttattccaagttaccaagatgagctcagcaggctatttcctgagaaagatgctgtttttcatcacttggcacgccatcttttccatccgacgaatagcatatggtattcagttaaagggtactacaggtcctaccttgccaaagctaataaaactgtgggaattcagatcaggatatttgagaaagagggcatcttgcaaaaaaacgggcgatttccatatgtcttagaacagatcctttcatgcgctcagaatgaaaagctgctgccagaaatcagtatgaaagatgaagcagaagcaccgaccgcgcccaagaataaccagacaattgctgttcttacaacttctctgagctcctggtacagtgatcagatccagaagaagtacagtgagcacccaacagtcgatggaaccagggtagaagtataccagccgagccatgaggagtaccagagatcaaagaacaagaagcacaacatgaaagcactggccgagatctacctactcagcatgacggacgtgctcatcaccagtggcttctccaccttcggctacgccgcgcagggcctctccggcctgacgccgtggatcatgttcaggtcggagaaccacgccatgccggacccgccgtgccaccgcgccatgtcgatcgagccgtgcttccatcaggctcccttctacgactgcaaggcgaagaggaacgctgacctgggcaagatggtgccgttcgtgaggcactgcgaggacgtcagttggggcctgaaggttgtaaatcaaactcagtggtagctgtaaatttgtcgtttgctcgttaactagggaagatttttttttctttgtccaaaaggactacacagattcattctttactccacatatatttgatccaaatgtagataactgaagaacaaaatagcagtaaagttgtgtgttacctg

SEQ ID NO: 25536 - DNA, 1634 bp, Oryza sativa
  ref <308>: DATABASE ACCESSION NUMBER: AK100978
  ref <309>: DATABASE ENTRY DATE: 2002-08-28
gactgaactgcaacggcattcccacatcggggatgcgtcgccgccgcttctaggtcttcttcttctcggtgaccggcgaggcagccggcggcccggcgcggctttgccggcgagggctgtaggttgccggcgcgtgcgacgtgctccgcggtgagcgcacgggggctgccgtgacctagcggccgcaccacgcggcaattaatgcttcgtgcctcccagtgagctgccttgatcggctgacaccctctccgcagcttcacccgagatggaggatctccccatggggcggcggaacccggcggccagcctcaccgacgacctcgtcgtcgagatcctccgccgcctccccgtccgctccgtgtgccgcttcaagcgcgtctgccggtcctggcgcaacctcatcgccgaccgtgagcaccgcaagaagctgccgcagacgctgtccggcttcttctacaaaagcagcagcggcgagcgctgcccttgctcggcgcaccacttcaccaacgtctccgggaaaggggtgcctctcatctacccgtcattctccttcctgccccagtgcgacacggtcgtccccttggactgctgcaatggcctcctcctctgccgctgcttccagcccgggcctaacaacagcgatgatgagattgagccgttccattatgccgtgtgcaatcctgcgaccaaggaatgggtgatgttgccggatgccgactgggctaatggcgagacccgcattgcctgcctgtgtttcgacccagcaatctcctcgcatttccatgttcttgagtatgtggaggctgaatatgaagatgtcacgggggttgagatctactcttccgaaactgggttgtggactcttcatgtgagtggatggggcgatgatgtgtttctaaggcattgggccaatccgagaagtgttttccttaatggttttctgcattctgctacgtgtgctgctgagattgcggtggttgacatggaggggaagaaatggaggaccattgctatgccggagcctgaaggtgatactggcataattcatcaaactcagggtcgcctatgtgcttttaatgttgatccagatgacatcttcaaactgtcaatttggattcttgaagattatgatacagataattggatattaaagcacaccgttagctccttgaggctgtttggagggatgaaatatcggtttggatttgactaccaaataattgcagttcatccggaatgtaatttgatcttctttgtttatggatgggacaaaacgttgatggcatatgaaatggatcgcaaggaagttcgtgctatacgcaatctcggacatgactcctttgagccatatctaccatatgttccactctttaatgagtcattagcagatgggtgctaacgtgcagagtgtcgcttcacttctatcactgcaaaaacatccttttgcaccaaggataaccaagctaagagtgagaaaagccaatctctgatatttaattaggaagttcagtttgtactagaatgatgtcttttcctttgtgttgttttgagaatgctgctaagtctgatggtacgtagtaagtaaattggcttttggaaagtttgtcattgttctgaagtgtatgacttgtttt

SEQ ID NO: 25537 - DNA, 3297 bp, Oryza sativa
  ref <308>: DATABASE ACCESSION NUMBER: AK100979
  ref <309>: DATABASE ENTRY DATE: 2002-08-28
ggcacgcggtgaagcgcccgctctctctccatccaccacctccaacctcccccaaaacctccacctccaccgccaaattcgcgaaggagttcaaacactcgaagggccatggctgccgccgcggggctccgccgctcaaccgtcacgccgcggggagccgcagccgcgtgcctgcgtttttccggagccggccgccgccttcgcccagcctcgatggtgtaggagaaaagagggataggagaaggggggagtgagcgggagagagatgggggcgattggaggcgacgagctggtgcagtgggacaagatgggtgcagctgaggcagtcaatggcggctgtggaggcgccgggaagatggataggatacaggtgttggtgaggctgaggccgctgagcgagaaggaggttgctaggagggagccagcggagtgggagtgcatcaatgacagcactgtcatgttccggagcaccttccctgaccgacccacggcgccaacagcatacacgttcgatagggtatttcactctgattgcagtaccaaagaagtctacgaggaaggggtgaaggaagttgccctctctgtagttagtggcattaactcaagtatttttgcatatggacaaaccagcagtggaaagacatacactatgactggagtaacagaatatacagtagcagatatatatgattatattaacaagcatgaagagagagcctttgtgttgaagttctctgcgattgaaatatataatgaagttatacgggatcttcttagtgcggaaaatacccctcttagactctgggatgatgcagagaagggcacctatgtagagaatcttacagaggttgtattaagggattggaaccatctcaagggacttatttctgtgtgtgaagctcaaaggaggacaggggagaccttcttaaacgaaaaaagttctagatcccatcagatacttcgattgacagttgaaagctctgctcgcgagttcttaggaaaggacaagtcaactacacttgtggctagtgcaaactttgttgatctggctggaagtgagcgtgcatctcaggcattgtcagctggcacaagactgaaagaaggttgtcacattaataggagtttgcttgcccttggcactgtcattagaaaactgagcatgggaagtaatgcacacataccgtatagagattcaaagcttacacgcatactacagccatctttgggaggtaatgcaagaactgcaattatttgtacactgagccctgccactagccacattgagcaatcaagaaatactctgctatttgggagttgtgcaaaggaagtagttacaaatgctcaggttaatgtggtcatgtctgataaagcactggttaagcacttgcaaaaggaacttgctagattggagagcgagttgcggcatccagttcagagttccagtctcgaaacattattgaaggaaaaggacaaccaaatcagaaagatggagaaagaaataaaagagctgaagtcacaacgtgatttggctcaatccaggttgcaggatttgctgcaatctgtcggtgatcatgacctgaaccgtcaagttcaaggaaagcattcagtcagaagccctccatctgttggaatgcccccaagcgtcagcagagatgatagttctcaggtctctcatgatgattcagatctttacaaggaagtgcgatgtattgaaagcaatcggacaggaggaaatgaccagttggacttatcagctggtgaaagtagtagcccacaagattcaaatatgaattctggtttgcatggaaatgattcaaatgcatcagtgaattctaggcattcaaggccctctggcgaagctcctattactttggaggaacacttggagaatattagaaggccttttgtcagtctagccaaagatctaggatcttcaacacgtaactcatcaaacttaagagtaattggtagaagcaggagctgtagatcactgacaggttctactatgtttgacgatatggagatggatgattgcactccactaaatagaagtttggtggagttcccaggaagacctgtggaatctcatagaagaggatctgcactgcactatgatgcagagaccgacacactttcaagggcaggatccatgagttctgagatcagcacttttaaggatgcaaagacaaatgggtctgttgcatgcgatacagaattcactggtattggtgaatttgttgctgaactcaaagagatggcccaggttcattatcagaagcagttaggtgaccagaatgcaaatggaaagagcatcggattggacccgatcgagggtgtttctcagtcaccttctcgatggcctttggaattcgagaagaagcagcaagagatcatcgagctttggcaagcttgcagcatttccttggtccacaggacttactttttcttgctattcaagggagaagcagctgactcgatctacatggaagtggagcttcgaaggctatcattcctgagagatacatactcaagggggagcacccctagcaatgcgatagtaggcagcctgagcacttcccctgttgcgagcgcaaagaagctgcagcgggagagggagatgcttgccaggcagatgcagaagcggctgtccacggaggagagggagcacacgtacacaaaatggggtgtctcgctggactccaagaggaggaaactgcaggtcgctcgccgcctctggaccgagacgaaagacctggagcatgtcagggagagcgcgtccctggtcgccaagctgatcgggctccaggagccaggccaagttctcaaggagatgttcgggctcagcttcgcgccgcagcagcagccgacccggcggcgatcctccaacggctggagatacgggatcccttcgttcgcctgatttggatcgaccacacacgaaacgaggctgacacgacgatgcgactgaccaaaggatcttttgttttttctccttttattttttccccttttcgatcttggtgtatctgcatgttctgattgtccataggattttaggaagcacaaaattgatggtggcgtccgtttgcgccctttgtgttgccggcctcgtgcatgtttctgcccagccgccgccggtctttgattgctgctgacattatatcgccgcagagccaatcggtgttgtgttgtataacgtgtgctagtttctcgtattttgcttgtagatccgcttgatataactgtgcttactagaaatgccgaagagaatgccgcatgtgactggagtgtattttt

SEQ ID NO: 25538 - DNA, 2012 bp, Oryza sativa
  ref <308>: DATABASE ACCESSION NUMBER: AK100980
  ref <309>: DATABASE ENTRY DATE: 2002-08-28
gtactgctcgtttccatctttgccctcattcctcaactcggccgccgccgccgcgagggatgccggcctcgcttgcgcgatatccactgaggccagcgccgtgccggcctagcagcctccgccacccgcgcgccgcagccgacgacgcctcggcggaccacccattcgtctcctccctcaaggctgcgccgcctcatcttctcccccgccgccgctgccgccacgcccgcggcggcgctcccctccgccgtgctgcggcccttcctcaacgcggtccgctccgaggacgccggcgccgcggtcacctcggcgtcgctggccgcgctccacgaggtgatggcgctcatgggtccgtccctcacgagcgccgcgctgcgtgaatgggtctgtcgccagctgccggttcgaggccggggccgaggtcgccgccgaggaggccgtgctgatgcggatgctgcagtcactgctcaccatcctgcgcgcacccgccgccaccgcgtaacatttctgatttcatatgctcaggattgttacaggaggtggatttggtactaaatgaacttctgagtgacctaacattgggcaagggtctttttttctttgcatattccaaaggaatcaaggcataaggaagaaatttggatcgaaaatagacatcatatggagtacatgattacataactgaaatttcatgggaacagaaggccaaaatccgcggggggggggggggggggggacttcacatgccaattagtactcgaaataaatcatcagaataaatccaaaatagcagagagaactcaaatttgctgcattttttaccttcctcctggtacagaatgaacaaccaaataaacatggtaaaaagtgcccaagaaacacatggtaaacaacaaccgatcaattcaaagaaactacccaagaaaaccataaacctatcttcactactttgaaaatgtcatttgcttacaacgttcatccttctactcaaatttctatatgctttgtttttgtgaaactcttatcggatacagctgctccttttcaacagcattgagatcaaagtctatgctatgaatcgtaacaagcttgaaatgtctgaatatactatcaggttaggatgctatcaaaaattccagcatgttcagagaagagacagctgaaacaacaaaaacagtaggatattagcaactgaaatctgcaatataactacataagtaagtccttcagacttcagtgcacatagcttctgtagtagtacaatcaaaattgtataacagccaaaacagagtaaaaccatcagaaaagaacataacttgaaaaaagtttggacagaacacttcagttggactgatattctttgaacagtgatcccactgaaatcttacatcaaagattaccaagagttcatcaacagaagtaagcttcaattgccagctacaattcggctacaaatttgcagcagataacatgaaaagacaggagcactaatctgaagacttgattcgctataacatgaagaggcatgagtttgtgcatacgtgtgtgctcgcctacagggagaagcagggtgctggcgccgctgcacgcggggtggatggggacggcgcgctgctcagcggcggtggtgggggcgggctcgcgaagagacaggagggaggccagagaaggtgtaggaagaggggaatgagaagggagtatgtgcatacgtgtgagcgctcaccggcggggggaaacaggacgccggcgccgctgcccgtgggaaggggaagccgcggctggggaggtggggaagagcgctgccgcggcgctcggagaagcaggatggggcgctgctgccgtcacgcgtagaagaggaagggcaaaagcgtcagttcacagcttccttaatttctacgaagctgtcggaaacgtcaaataaaactaaacgaagggagtactttattacttttaattaatatctttgctgtaaaatgtatagaatagcatagaatatattagaactatttgcg

SEQ ID NO: 25539 - DNA, 1922 bp, Oryza sativa
  ref <308>: DATABASE ACCESSION NUMBER: AK100981
  ref <309>: DATABASE ENTRY DATE: 2002-08-28
gctcctcccctttcctctcttcctcatccgctctctctctctctcgtcgtcgaccgccgccgtctgtcgccggagtgggggccatggcccctgtgaaggctgaggagctggtggcgttcgtccccaaggagcagtacgacggcgtcgactactgcatcaccagcccgccgccatggctgacggcggtgctgttggcgttccagcactacctcgtcatgctcggcaccaccgtcatcgtcgccaccatcctcgtgcccctcatgggcggcggccatgtggagaaggcgatcgtggtgcagaccatcctgttcctcgccgggatcaacacgctgctgcaggtgcacctcgggacgcggctccccgccgtcatgggcgcctcctacgcctacatctacccggccgtcgccatcatcctaagccctcgcttcgccatcgtcgtcgaccccttcgagaggttcgtgtacacgatgaggtcgctgcagggcgcgctgatcatcgccggcgtcgtccaggccatcatcgggttcttcggaatctggaggatcttcataaggttcctgagcccactcgcggcggttccgttcgtgacgctgtccgcgctcggcctcttctacttcgccttccccggagtcgccaagtgcatcgaggtcggcctcccggcgctcatcctgctcctgctcttcaccgagtacgcggcgcatttcttcgcgagggggagcttcctgttcgggcggtgcgccgtgctggcgacggtgctcgtcgtgtggatctacgccgagatcctcacggcggccggcgcctacaacgagaggtccctcgtgacgcagttcagctgccgcgccgaccgatcggggctcatccatggcgcaccctgggtcaggttcccttacccgttccagtgggggtaccccatcttcttcgccgacgattgcttcgtcatgatcgctgcctctttcgtctcactgatcgagtctacgggcacgttgatggcggtgacgagatatgcaggggcaacgttctgcccgccttcagttttcgctcgtggagttggctggcagggcatatctaccattctggacgggatgtgtggtacattgacagggtcagtagcttcagttgagaatgcaggtctgttggccttgacgcgagtcggaagcagaagggttataaagatctcagccttgttcatgatcttcttctcgctgttcgggaaatttggggcaatcattgcatcaatcccattgccaatcttctctgcactgtactgcgttctcttcgcttattcagctgctgcagggctctgcttcctccagtactgcaacctcaacacactgagaaccaagttcatcctcagcatctccctgttcttgggcctgtccatcccacagtacttcagggagtacgaggtgttctacgtcttcgggccagttcacacccactcacccgctttcaatgtcatcgtcaacgtgatcttctcctcgcctgcgacggtggccgccatcctcgcctacctcctggactgcacgcacacctactgggacggcccggtgtggaaggacaggggcttccattggtgggagaagttcaagtcttacaggcatgacccgaggagcgaggagttctactctctgccgtatggcctcagcaagtacttcccttcgttctaggccaaaggatggcgagaggtagaagacgatgcaatcatctggagcctttagcttcactgctgtggctgttgcatgcaaagcattttggatatgagatgttgtggatctaatgaaatgaaacttagaattttggatggtattacctctgtcaacttggggggggggattcaggggcctggatgatcctgccattgattttgatttggtttttgatctctgatccaatttgaacagcagaagaatagtaaacctgcc

SEQ ID NO: 25540 - DNA, 1657 bp, Oryza sativa
  ref <308>: DATABASE ACCESSION NUMBER: AK100982
  ref <309>: DATABASE ENTRY DATE: 2002-08-28
ggtcgtcgacccttcgtcgagccgccgccgccgccgccgatccttctcctcccacctcgcccgcgccgatggagcagctcaacgccaagctctacgacaagtacaccgccctcaagaagcggaagctgctcgacgaggggctggaccagaagcgggctgccgacatcaaggagctccagcaagccatgaaagattgggtcgccgacctccagggcgagaacgagcgcctcattgccaagctgacccaaaaggagcagcagcttgtggaggtccagacacttttgctcgatgagactaggaagacaaaggagctcaatagtgaaatattgaagcttcagtgtctcctggctgagaagaatgatgcaaaccatatagctacagggtctcctgacacaaccgctgaaatgattatagaaaatcaaactccaattccacctgcaaagaagacaccaaagtcaaagagcagggagagaaatatccacttcattgaaaaagcgactgttccttgtaatggctttcaggaggaaggaagagatcttgattcctgtagaaggcatatgagcatctcaggttagtggtaatatacacacatgcagtagtgaattgtttgaacttaaaagtatgttgtttgcagggagtgcgacagaagaaagctccagtacctgtatgtttcatatgctggctgaatcagtagttgggatgaaattttcagtgaagaaccaaacagaaggattttcactttcagtctcccatgaagctagtggtatttggaacatcaaattttatgctattattttagccacagcatagtactggaatatctcatcatagttattattcatcatgttttacttgtgttcatttctctttcacattcatttgattttgcatatagccacctccatgtttgccaagctagctgagtattcaagcaaacagttatgcaaagaacaatcttcaacctgaaaaatgtcctttaaaccaccagaagagttgtgtgaatacatattttaatgctttaatatctttgtcaagcatgtacacatctctttggagcttagccgtttgtagcagaacttgtataccagcatacagtgtagttacatgttgggtgcagaacctgaggatcatgtcaccaatgttagaacatttgatttgtaaagatcataatcaagtgtaaggaacgaattacatttctaactgaattttttaaactgttgtaggctacagtttcaccctgacatgggtagaccaacctggtggcggtgaatggtcatatcagtactcgtcgttgggcaccctggacaggattgctatgggctggatgaaggaggacataaaattcagcagggccatgtgtcctgtattctttcagcagatatcgcgcatcctcagacaaggctaagctcaactgggaagcttagtttggattttagaggtcctgacttttgctagacagtggactgaaactgacttgttttaggagtgacacgaggctttatgtatcctttcgtttggcctttgttgttcctgttgtgaacataacaattagcaagtgattcgagatgttggtcgcctggttgccgtatgtctttatgtatagcccctgatttgaactctgatggttctgaaaataagagcttcgacattgctgtcc

SEQ ID NO: 25541 - DNA, 1539 bp, Oryza sativa
  ref <308>: DATABASE ACCESSION NUMBER: AK100983
  ref <309>: DATABASE ENTRY DATE: 2002-08-28
gaagctttccttcttcttttttccccctctcgacgatctctctctcatcaggaccccggccttaagttgtttcttccctatcagctcaggtctctctcgatctctcctagctagatagatagcttaattagcagctagagatgtgtctctagctaagctaactagctagtaggcttcttcttttaatccggcattgttcttggctgctggtcttagtttttggctgtcatgtatggagttagtggtaaaatactaggttaattaataatataaggcgtgtgtatatattggtgtggaggaggaggagaaagggggttggccggagagatcgatgacgtggtgcaacagcttcagcgacgtccgcaccgccgtggacagcagcttgtcgccggccgccgccgtggccgccgccgcggggaagaaggcggcggcgtcgctcgccgtcctcgtcaagatgtgcccctcctgcggccaccgcgcgcggtatgaacaggagacgacgacgatccaggacctgccggggctgccggccggagtgaagttcgatccgacggaccaggagcttcttgagcatttggaagggaaggcgaggccggactcgaggaagctccaccctctcgtcgacgagttcatccccaccatcgagggcgagaatggcatctgctacacccatcccgagaggcttcccggtgtgagcaaggacgggctggtgaggcacttcttccaccggccgtcgaaggcgtacacgacggggacgaggaagcggcggaaggtgcacagcgacgaggtcgacggcggcgagacgcggtggcacaagaccggcaagacgagaccggtgatggccaacggccggcccaggggctacaagaagatcctcgtcctctacaccaactacggcaagcagcgcaagccggagaagaccaactgggtgatgcaccagtaccacctcggctccgacgaggaggagcgggacggcgagctcgtcgtctccaaggtcttcttccagacgcagcccaggcagtgcggctccaccgccgccgccgccgccgccaaggaggcctccgccgccgtcgccgccgccgtggtgaacagcaactactccatcgtccatggccatcaaggtggtggtggtggtagctttctcaaggaggcaaacgttgtgcacgagttctacgacccggcagcaacgatgggttaccggccacctgctcctgctgcgcacttcgcgccaaacttcgcggtgcacgcggcaaggaacagctttggtggcccttgaaggaaaaaccaaaattacacaaaatctaaacattaccgtttataccgatatgattcacataggtgccattatattacattcttaaccttacattcatccatcagttatttgcagttttgttcaaagttgttatatcgtttccgatgctatactgtgcaaagattattactacacgccgttctaactcgaaaatgtcaattaatgtatcagtttgtacatgtatacatgcacacggaagaggtcctgatgatgcatcacttcat

SEQ ID NO: 25542 - DNA, 1910 bp, Oryza sativa
  ref <308>: DATABASE ACCESSION NUMBER: AK100984
  ref <309>: DATABASE ENTRY DATE: 2002-08-28
gcggccccagaagccaacaataacgggagaaaagaaaaaaaattgagccgcggaaggccggaaggggactccccgtcgcctcctctcctccaaatcccaacccacctcaccgatcccatctcaattctcaccgcctcaccgcgcccgcgccagcgcctcgcccatgtgatgtgagtgagccactcacactccccctctctatcgccgcgcccccgattcgcgagccgccccgatccctcccgcgcggctgataaatccgaggcggctagggttgggggtggaatggggcaggaagggatggggtacaacaacggcaaggggggaggaggcggtggcggcgggctgccgatgacggcgccgcggccgcgtggggcgtcgccgctgagcagccacggccaccaccaccgctcgcgcaagatccaccgcaccttcaacaacgtcaagatcaccgtgctctgcggcctcgtcaccatcctcgtcctccgcggcaccatcggcctcaacctctccctccccaaccagcccaccgacgccgacgcgctcgccggcgccaaggccgtcgaggacatcgaccgcatcctccgcgagatccgctccgacggcggcgccgacgacgacgccgccgccgccggggacctcgccggctccttcaacgccaccgcgctcaacgccacggaggcggcggcggcctacgcctccgctgtcgaacgctacgcgctcggccccaagatctccgactgggacggtcagcgccgccgctggctcaggcagaaccctgggttcccgtccaccgtcgccggcggcaagcccaggatcctgctcgtcacgggctcgcagccggggccctgcgacaacccgctcggcgaccactacctgctcaagaccaccaagaacaagatcgactactgccgcctccacggcatcgagatcgtccacaacctcgcccacctcgacaccgagctcgccgggtactgggccaagctgcctctgctccgccgcctcatgctctcccacccggaggtcgagtggatctggtggatggacagcgacgcgctcttcaccgacatggctttcgagctgcccctctcgcgctaccaagaccgcaacctcatcatccatggataccaggatctcctctttgagaagcactcatggatcgcgctcaacaccggcagcttcctcttccggaattgccagtggtcgcttgatcttcttgatgcgtgggcgcctatgggtcccaagggattcatccgagatgaagccgggaagatacttactgccaacctcaagggacgcccggcatttgaggctgatgatcagtctgctttgatttacctcttgctctcgcaaaaggagaagtggatgaacaaggtgttcatagagaattcgtactacttacatggcttctgggctggtctagtagataagtacgaggagatgatggagaaccaccatccggggctcggggatgagcggtggccattcgtgactcattttgtcgggtgcaagccatgtggaagctatggggattatcctgtggagcggtgtctcaggagtatggagcgagcatttaattttgccgataaccaggtgctgcggctctatgggtttgctcacaaggggctcgaaagccccaagatcaagagggtcaggaatcagaccacaaagcctattgatgacaaggagaatcttgatgtgaaggccaagatatcgaccacttcttgaaaagtcctgatgagagttggtatggcaatagcatacttgctttggctctcttcaaggtcagagcattttgtgacttggggatggtgttgttttattttccactctttttttctattctttttgttcatggaattgttattgttatgtaacagttagaggttgcaatctaatgtttatcatggagt

SEQ ID NO: 25543 - DNA, 1824 bp, Oryza sativa
  ref <308>: DATABASE ACCESSION NUMBER: AK100985
  ref <309>: DATABASE ENTRY DATE: 2002-08-28
gctttgctcttctcttcttctcttcccccgcacgcatcgcacccgacctcgtcgccgtcgccgacgccgccagccatgccggaggacgtcgagatgaacgactcccagccccagcccgccgccgcgccaccgcccgcggcctccaccttgcagcatctgaaggagatcgcgtcggtgatcgaggccgggtcgctgaccaaggaggttcgccggatctcccgcgccgtgcgcctcaccgtcgcgctccgccgccgcctcgccgcccgtgacgtcgccgccttcctcgccttcgcgctgccgcattcctcggaagccttcgcccgcctttcctccctcctgcccaaggaagatgggagtgaaatggatgttgatttggcagctccagcggctcaagtgtcaattaagcatggtctcccagagattgaaatatactgttacttgcttgtgctgattttccttattgataataagaaatatgatgaggctaaagcatgtgcttctgcaagcattactcgtttgaagaatcttaacaggagaacagtcgatgttttagcttctagggttttcacctattactcttatgtccacgaactcaccagcagccttgctgaaattcgtggaactcttctggcattgcacagaatggcaactttacatcgtgatgagcttggtcaggaaactctactcaacctgcttcttcgcaactacctgcactacaacttgtatgaccaagcagaaaagcttaggtccaaggcaccgcgttttgaagcacattctaatcagcagttctgcaggtatctgttctacttgggaaaaattaggacaattcagttggagtacactgatgcaaaggaaagcctactgcaagctgctcgaaaggcacccactacagctcgtgggttccgagttcagtgcaacaagtgggctatcatagtgagattacttttaggagaaataccagagagaactgtttttatgcagaaaggaatgaaggctgctttggcaccatattttgagcttacaaatgctgttcgagttggggaccttgaattgttcagagcagtggcagaaaaatttgctagcactttcagcgcggataggacgcgcaatttgatagtgaggctgcgccacaatgtcattcggactggattgcgcaacataagcatttcatactcacggatctcccttgctgacattgccaagaagctgaggttggactcagagaaccctgttgctgatgctgaaagtattgtagccaaagcaatcagggatggggcaattgatgccaccattgatcatgccaatggttggatggtgtcaaaagagactggtgatgtctactcaacgaatgagccacagattgctttcaattcaaggattgcattttgcttgaacatgcacaacgaagcggtcaaagcactgaggttccctccgaattctcacaaggaaaaggagagtgctgagaagaggcgcgagaggctccaacaggaggaagaactagcaaaacacatggctgaggaggacgatgacgacttttagattggtgatttcttttcatgctttcagttgctgcctcaagggtttcattttgaagcatgggcatccattcagttttaagagacggaagatctcgaaatgccaaccctgcttttctgggatagttgaaaccatggaaccgttgacatttaattcagtgtgttttatgtttttaacaatttttttatcactcaaaccgcttagaaggcaatgtattctttcctgaaatactgtaccgttcaatccttggggcacaatgttttgaacatgacaagttcagttcgctct

SEQ ID NO: 25544 - DNA, 1173 bp, Oryza sativa
  ref <308>: DATABASE ACCESSION NUMBER: AK100986
  ref <309>: DATABASE ENTRY DATE: 2002-08-28
gactccctcctcctcctcccatggcgatctccggggaggacaggtacgcggcggccggcggtggcggcgactccggcggggggaagctctggaacctctgccgcatgcccttctggcagcccggcggcgcgccggcgacggcgtcggcgccgccgccgccgtcgtcgtcctcgtcgtcggccgggatccaccaccactccgccgggcggtacggccacgagggcggtggtggtggtgccgtggcaggggacggcgcgccggccgggtcgatctcgtcggtggccaagtcgctgctgccggcccgccgccgcctccggctcgatccgcccaacaagctctacttcccatatcaaccaggacaacaggtgaggagcgcaatcaggataaagaacacaagcaagtctcatgtagcatttaagttccaaacaactgcacccaagagctgcttcatgcgtcctcctggagccatacttgcccctggggagaccatcatagcaactgttttcaagtttgtcgagcacccagagaacaatgagaatgttctacagaagtgcaaggttaaattcaagattttgagcttgaaggtcaaaggacccatggattacgcaccagaaatgtttgatgagcagagagatcaagccgtagttgagaagatcctgagggttgtttttttgaatgttgaaaatccaggcccacaactggaaaagctaaataatcagttggctgaggctgaggctgcacttgaggcaagaaagaaacctcctgaagagaatggcccaaagattgttggcgaagggcttgtcatcgatgaatggaaagaacgaagggaaagatatcttgcacaacaacaggttgaagtggttgactcagtgtaaattgtgcctttcttctgcttctaccgaagctatgcctataatatggcttcagaaatgtgctgtggcattcttgtaaactgctagattttgtggttggtagtctagagtgtggtagtctagtgtgtgcttgcagaatcagtcgccaaagaacaatctaactcccgtattttcagtgcttgatgtgtaactaatagcacatatgttctattttttgtgttagtgctaaaatctgcttgtcaaaacaataaagttcacaagcacaccttcctctgtattgttggggaaggcacattctatc

SEQ ID NO: 25545 - DNA, 1897 bp, Oryza sativa
  ref <308>: DATABASE ACCESSION NUMBER: AK100987
  ref <309>: DATABASE ENTRY DATE: 2002-08-28
gatacccattaacagcaatcaccaataagtaatggaactacaatcatcatgggctactttctttgccgtcgtgcttgccaccgtcgtcttcctcctccgggccgttctgctccgccgccgccgagcttacaagctgccaccaggaccaaagccatggccgatcatcggcaacctgaacctcatcagctcgctgccgcaccgctccatccacgagatatccaagcgccatggccccatcgtgcagctctggttcggctcctgccccgtcgtcgtcggctcctccgtcgagatggccaagctcttcctccagaccaacgacgcggtgttcgccgaccgccccaggaccgccgccggcaagtacaccgcctacgactgcaccgacatcacctggtcgccctacggcgcctactggcgccaggcgcgcaagatgtgcgccgccgagctcttcagcgccaggcggctcgagtcgctcgagcacatccgccacgaggaggtgcgcgcgctgctgcgcgagctgcacggctccggcgcggcggggaacgccgtgcagctcagagaccacctgtcaatggcggcgctcggcgtgatctcgcgcatggtgctcggaaagaagtacgtcgagaagcagccggcaggaggcggagcggcgatgacgacgccggaggagttcaagtggatgctggaggagctgttcctgatgaacggcgtgctcaacatcggcgacttcatcccatggctggattggctggacctgcaggggtacatcaggaggatgaagaatgtgaacaggttgatacaccggttcctggaccgtgtcctcgacgagcacgacgagcgacggcggctacagggggatggctttgtggccagggacatggtggacattctcttgcagctcgccgatgaccctaacctcgacgttcagcttaccaggaatggtatcaagggtattacccaggaccttgtcactggtggtgcggacaccagtacggtgaccgtggaatgggccatgtcggaggtcctgaagaatccggcgatcctcgccaaggccaccgaggagctagacaccatcgtcggcgtcggccgcttggtgacggagggtgacataccacacctcccctacatccacgccatcatgaaggagacgatgcgtatgcacccggtggtgccgctgctggtaccccggatgtcccgtgaggatgcctccgtcgccggctacgacgtccccgctggcacgcgcgtgctcgtcaacacgtggaccatcggccgcgacccgtcggtgtgggactcgcctgagcagttccggccggagcggttcgtggggagcggtatcgacgtcaaggggcgcgacttcgagctgttgccgttcagctcaggccggaggatgtgccccgggtacaacctcggtctcaaggtcatccagctcaccctcgccaacctgctgcacgccttctcctggtgcctccccgacggcgtcaccgccggcgagctgagcatggaggagatcttcgggctcaccatgccacggaagatccctctcctcgccgtcgtcaagcccaggctgccagaccatctctatgccgagccttaatgacgcgccatgcgttgcatgcatggatgtacgtctgttggtgtctagtttgatcgaggtcattgcgtcttctgcattaattcctggaagctataggctccatttcaaggatatatataactccctagtgcatagttgcgatgatttacgaataatagcactagaatggtttcgtattgtagtactgcaagatgcaagcttaaaatgttgtcaccagcgctatggatgtatgatagtatgtcctatgttgggacggacatatccagtccctccaccctgctaaataaaagggattctatgtttgcc

SEQ ID NO: 25546 - DNA, 3310 bp, Oryza sativa
  ref <308>: DATABASE ACCESSION NUMBER: AK100988
  ref <309>: DATABASE ENTRY DATE: 2002-08-28
gaccaaatataaatcaaatcccaacgtgacctcccccgcggccgcggcctgcttcacgcctccctcctcctcgccgcctcgccgcctcgcctcgcctcgcctcgcctccaccgcctctactaaaccctccgccgccgccgccgccgcggtgatcaccggcggccgagggatggagcagaatggagagaaccatctcaaagatccacttcttcaggcagatggaggcggctccggtgcttctcccgccggggcgtcgccgcggaaggagaggaagacgaggaaggtcatgttcaatgtccgggggatctcgtgtgcttcgtgcgccgtgtcgatagagacggtggtggctggcctcaagggagtcgagagcgtctcggtttcgccgcttcagggccaagctgttgtccagtacagaccagaggaagccgatgcaagaaccataaaagaagctatcgaaggcctcaatttcgaggtcgatgaacttcaagaacaggaaattgctgtatgcagactccagataaaaggaatggcatgtacaagctgctcggaatctgtggagcgagcacttcagatggtacctggagtgaagaaagctgcagtgggacttgccctagaggaagctaaagtccatttgatccaaatatcacaagtcgtgatcttataattgaggctattgaagatgctggatttggagctgatctcattagttccggggatgatgtgaacaaagtccacctaaaactagagggtgtgggttccccagaagacatcaaactcattcagtcaagactggaatctgtcgaaggtgtgaataacgtggaatgtgacacagcgggacagacaataatagttgcatatgatcctgatgtcactggcccacgattacttattcagtgcattcaggatgctgcacagccccctaaatacttcaatgctagcttgtattcaccaccaaagcaaagagaggcagagcgccatcatgaaattaggaattacaggaatcaatttctttggagttgcctgttttctgtgcctgtattcatgttctccatggttctgccaatgatttctccttttggggattggctgttttacaaagtatgcaataacatgacgataggtatgctattacggtggttgctgtgttctccagttcagttcattattggttggagattttatgttggagcttatcatgcgctaaaacgaggatactcgaacatggacgtgcttgttgctttggggacaaatgctgcatacttctattctgtgtatatagttctgaaggcactaacatcagagtcatttgaaggacaggatttcttcgaaactagtgctatgttgatatcttttatattgctggggaaatatctggaggtggtggccaaaggaaagacatcagatgctttgtcgaagttgactgaacttgcaccagaaacagcttgtcttcttactttggacaaagatggaaatgccatttcagaaacggagatcagcactcagttacttcagagaaatgatgtcattaagattgtccctggggaaaaagtccctgttgatggtgttgtcatcaaaggccaaagtcatgtgaatgaaagtatgataactggtgaagcaaggcccattgcaaagaaaccaggagacaaggttattggtggtactgtaaatgacaatggttgtataattgttaaggtcactcatgttgggtcagaaacagctttgtcacagatagttcagttagttgaagctgctcaacttgcaagggctccagttcagaagttggcagataggatttcacggttttttgtcccaacggttgtggtggctgcatttcttacatggcttggctggttcgtagctgggcaattcgacatataccctcgagaatggattccaaaggcaatggatagctttgagcttgctctgcagtttggaatatctgttcttgttgttgcatgcccgtgtgctcttggactggctaccccgactgctgttatggttgccactggaaaaggtgcttctcaaggtgttcttattaagggtggcaatgcacttgagaaagctcacaaggttaaagctatcatatttgataaaactggaacgctgactgtcggtaaaccttctgttgttcaaacaaaggtgttctccaagataccgctactagagctgtgtgatttggctgctggtgcagaggcgaacagtgagcatcctctatcaaaggctattgtagagtacacaaagaagctcagggaacaatatggatctcacagtgaccatataatggagtccaaggactttgaggtgcatccaggggcaggggtgagtgccaatgttgaaggcaagctggtgctggttggaaacaaaaggcttatgcaagaatttgaagttccaataagttctgaagtagagggacacatgtctgaaacagaagagcttgctaggacctgtgtgcttgttgctatcgacagaaccatctgcggagctctttctgtgtcagatcctctgaaacctgaggcaggccgtgccatttcatacctcagctcaatgggtatctcgagtatcatggtgacgggcgacaattgggctacagctaaatccatagctaaagaggtcgggatcggcacagtatttgccgagatcgatccagttggtaaagccgaaaagatcaaggacttgcagatgaaagggttgacggtggccatggtcggcgacgggataaacgactcgccggctctagccgctgcagacgtaggcctggcgattggggctggaaccgacgtcgccatcgaagctgccgacattgtcctgatgaggagcagcctcgaggatgtgatcactgccatcgatctctccaggaagaccctctcaagaatccggctcaactacgtctgggctctgggctacaacgtcctgggcatgccggtcgccgcgggcgtcctgttcccgttcaccggcatccggctgccgccatggctcgccggagcttgcatggcggcctcgtcggtgagcgtcgtctgctcgtcgctgctgctccagctctacaagaagccattgcacgtcgaggaggtggctgctggacccaagaatgacccggatttggtgtgaagactgaagaagcgtcggtcttgctgtgctgactgaaactgagcatgaagcaaacgccttgtttgcagtggccctcctgactgatttctgtacagtagtcatgttttgggattctctgtttttttttgggtacttctgattgattcaataataatttggggagcttaattgctatccagtgatatatagatgtgaaattgtgttt

SEQ ID NO: 25547 - DNA, 1700 bp, Oryza sativa
  ref <308>: DATABASE ACCESSION NUMBER: AK100989
  ref <309>: DATABASE ENTRY DATE: 2002-08-28
gatccttgaagccagccagctcgctcgctctagactctacctttttcgctttttgctagagatctagccactttctttgatcgacatatatatccatcgagataaaaggagatagtgacaagtaattaacttagtttttttccaataacgaaataaaatagtttctacgtcttttccacctctgccagcagaggcgcagccaagtaacttttaattatagttataaattaatacacagagaatgggtagccaagaatacattaagcagggcgggcagcagctggtggcggcgatcctgggcatcggcacggctgttccaccctacgttctgccccaatcctccttccccgactactactttgacatttccaactccaatcacctccttgacctcaaggccaagtttgcagatatctgtgagaagacaatgatcgacaagcgtcacgtgcacatgtcggacgagttcctgaggagcaacccttccgtggcggcgtacaactccccctctatcaacgtccgccagaatctcaccgatgtcactgtgccccagctgggcgctgccgccgcccggctcgccatcgccgactggggccggccggcgtgcgagatcacccacctggtgatgtgcaccaccgtcagcggatgcatgcccggcgccgacttcgaggtggtgaagctgctcggtctcccgctcaccaccaagcgctgcatgatgtaccacatcggctgccatggcggcggcaccgcgctgcgcctcgccaaggacctcgccgagaacaatccaggcggccgtgtgctggtggtctgctccgaggtcgtctccatggtgttccgcgggccttgtgaatcgcacatgggcaacctggtagggcaggcgctgttcggggatgccgccggtgcggtggtggtcggcgcggatccggtggaggctaacagtgagcgcacgctgttcgagatggtgtcggcgtggcaggacatcatcccggagacggaggagatggtggtggcgaagctgcgggaggaggggctggtgtacaacctgcaccgcgacgtggcggcgcgcgtggcggccagcatggagtcgctggtgaagaaggcgatggtggagaaggactggaacgaggaggtgttctggctggtgcatcccggcgggagggacatcctggaccgggtggttctcacgctcggcctccgcgacgacaaggtggccgtgtgccgcgaggtgatgaggcagcacggcaacacgctgagctcctgcgtcatcatggccatggaggagatgcggcggaggtcggcggagcgggggctgagcacggccggcgagggcctcgagtgggggctgctcttcggcttcgggccaggcctcaccgtggagaccatcctcctacgcgcgccaccatgcaaccaagcccaagccgtctgatgtgattctctcatccatccatcctccttccgttcgtccgtccctccaatatttggaaaatatatttttctcctaaactatttatccgatcacaccgttatattcgttataattaaacttttacaacaaaatatcatatgattatattccaataaaataaaaatatttgtttcaaaccattaaaacacaatgtttcatgtttcatatgtaatagttatatctttcaatgtgtatcatcattgtgttcctcaaaattcacagaactacatgccactac

SEQ ID NO: 25548 - DNA, 1745 bp, Oryza sativa
  ref <308>: DATABASE ACCESSION NUMBER: AK100990
  ref <309>: DATABASE ENTRY DATE: 2002-08-28
ggcgtgactcgcgcgcatcatccaaatcccactaccgctcccttccaaaaaccaaactccgcagtctctaccaaacccacgccggcgccgcatcgtcttcgtctcgtctcctccagtcaagtgctagctagggcctaggctgccgctcccgctctctcgccttcttcacccccgagcctgatcgatggggaagcaggagcaggagaagatgctcctccaggccgcctacgatgacaacctccgcctcctcaggaagatggcgcgagggctggacaccgggcagggcgaggctgccgtcgtggcggcggtggcgggcagggccgacgggaaccgcgctctccacctggcggccgcccgaggaagcatggatgtcctcaggtacctcgtggaggacctccacctcagcgtcaaccagttcaatgccaaaggtgaaacaccactgtgcctttcttcaattcatgggagagctgctgctacaagatatcttctcgatcacggttctgatcctacgattgataaatcagtgttaccttttcatgctgctgcaacgaaaggacactgcgaaatagtagagttgtttctttcaagaggagttgatgtggatttagattctatcactgggaccccattgctgacagctgcgatgaatggccaatatagcacgatgaagattttattggagcatcacgctgatcctaacagggttgtcaatcataatggtaccccattgattatgtccatagtttctggatcattggaatgcgtgaagctattaatcaaagttggtgctgatgtgaattttagagatcccaatggtgttacttgtgtgatggtcgcagcaaatcatggctctcctgtcatcatgaagtgcttactagatgctggtgctaattcaaatattccagatgaatttaataggactccaattgaagttgccgctaatcgaggcagaagggacattgttaaaatgttgtttcctttaacttcaccaatttcaacactgcctgattggagtatcgatggagttatttctcatgtgcaaacttttggtttgaagccaagggataatgatctgtctaaaaggaaaagtgctgaactgaaattacaagctagagaggctttcgagagagaggaatatatgcttgcaggacaacactacactaatgcaatagaacttaccactaatgctcatgataaggcaaccctgctagcaaacaggagcctgtgctggttgcgtttgtcaaccggcaatggggctcttgctgatgctaacatgtgcagaatgttgcggcccagttggcccaaagcatgctatcgacaaggggcagctttcatgtttctaaaggactatggaaaagcttgtgaagcttttgcagatggcttgaagttggaccctgcaaatgaagatatagcgaaagctttaagggatgcccaggaggccatgaaggaccaaatggagcacagaggttgattcagccttaccttgcgcctctattttgttgctagctactccctccgttctataaaaagtataaatctaagacatgcgacatattctaatgctatgaatttaatataaattaggatatgtcacatctgttacggtttgtattttatggtaaagagggagtaagtcccaaagacattttggctgccaacggacaagcttttgcgttttgttaacctgagacctgagagtttagtgttaaatgtgaactatgtgggaactatttcatggtttgtgg

SEQ ID NO: 25549 - DNA, 1921 bp, Oryza sativa
  ref <308>: DATABASE ACCESSION NUMBER: AK100991
  ref <309>: DATABASE ENTRY DATE: 2002-08-28
ggccacagaccccaaaggtctgataagtctttgatttgctagtaccggcatcgcctgcttcgctttcgtcacgttcttgatttgggcgggcgcggagatttagaacggtgctgaatttacaatcttgggaccaagaggagaactactctcaatgatggaaatggtattgccagtcgcgaatgctacggctgcggcacttgcacgggtttctgctgtgttcaatgccccacttgcccgtgctgttgtctttgggattcatattgatggacatttggttgtggaagggcttctcattgctgccatactgtttcagctctccaggaagagctacaaacctccaaagaagccactcactgagagggaggttgatgagctctgtgatgactggcaaccggagcctctatgcccacccatcaaggaaggagcacggatcgacacgcctacattagaaagtgctgctggacctcatacaactgttgatggaaaagaagttgtaaactttgcatcagcaaactaccttggtttgattggcaatgaaaagataattgattcctgtgttggctcagtggagaaatatggtgttggatcatgtggaccacgaagcttttatggaactattaatgtgcaccttgactgcgagagtaaaatagcaaatttcctgggaacccaagattcaatcttgtactcctatgggatatcaaccatcttcagtgtaattcctgccttttgcaagaagggagatatcattgtagctgatgagggtgttcactgggctgtgcaaaatggtttacagctttcaagaagcactgttgtatatttcaagcataatgacatggcttcacttgcgagcattttggaaaaactaactcatggaaacaaacatacagaaaagattaggcgctatattgttgtggaagctatttaccagaattctggccaaattgctcccttggatgagatagttcggttgaaggagaaataccggtttcgtgttatattggaggagagccattcttttggtgttcttggcaagtctggacgtggccttgctgaacactatggagttcctgtggaaaaaatagacattattactgctggaatgggaaatgcgttagctaccgatggtggtttttgtacaggaagtgtcagagttgttgatcatcagcgtctaagcagctctggttatgttttttctgcctcgttgccaccataccttgctagtgcagcaatgtctgctgtgaaccacctggaggagaacccatcagttctcgccaatctaagatcaaacatcgcccttctgcataaagagttgtcagatatacccgggctcgaaattgctagcaatatcttgtcacctattgtctttctcaaattgaagacaccaaccggttctgctgttgctgacctggaactccttgagattattgcagagaaggtcttgatggaagattcagtcttcattgcagcaacaaagaggtcgagtttggacaagtgtcggctcccggttggaatccgcttattcgtgtcagctggtcacactgaatctgacatcttcaaagtatctgcatccctgaagagggttgcagcatcagttgtctagtgagtttatacggctgttgagcgactgttgatctcagcttcttacatgatgtgtcctacatttaggtacataatttgtatgttcatcgatctggcgcaattcattgtcatatttaccaagaatacaaataagattttgtagcatagtttgaattaaggatctgatagcttcgctcttgtgtagtatatgtgtgcattggctgatttcttcaaccgtctagcactactacattgcttacatagtgatatagttttctcattttctctcctctgtcaagaactcttgaaagtagtagtgaaaaaatggataaattgtattgtg

SEQ ID NO: 25550 - DNA, 1581 bp, Oryza sativa
  ref <308>: DATABASE ACCESSION NUMBER: AK100992
  ref <309>: DATABASE ENTRY DATE: 2002-08-28
gaggtccaggctgctcgatctttgcttagctatcatctcggttaatttgtctcatccagctagtcgagatcgtgcgtaagcaaagcagctattaccagctagtgtccagccaccacttgcacgcgtacgtgatcgatcgagctaggcaacaatatggcagctagtagcggcgtcgtcgttgcggtggtggcagtagtagcagtgatgatggcggtggcggtggctgccggagaaatcagcgacgacggcggagaccagccgtcgccgtcgccgtcgccgtcggcgtcgtgcgcgcggcggccggtggtgttcgcgttcggcgactcgaacacggacacgggcggcatcgcggccgggatggggtactacttcccgctccccgaggggcgcgccttcttccgccgcgccacgggccgcctctgcgacggccgcctcgtcatcgaccacctatgtgagagcctgaacatgagctacctgagcccgtacctggagcccctgggcaccgacttcaccaatggcgccaacttcgccatctccggcgccgccacggcgccccgcaacgccgcattctccctgcacatccaggtgcagcagttcatccacttcaagcagcgctccctcgagctcgctagccgcggcgaggccgtccccgtcgacgccgacggcttccgcaacgcgctctacctcatcgacatcggccagaacgacctctccgccgccttctccgccggcggcctcccctacgacgacgtcgtccgccagaggtttccggccatcctctccgagatcaaggatgccatccagagtttgtattacaatggagccaagaacctgtggatccatggaacggggcctctcggctgcctgccccagaagctcgccgtgccgagggccgacgacggcgacctcgaccccagcggctgcctgaaaacgctcaacgccggggcctacgagttcaacagccagctctcctccatctgcgaccagctcagctcgcagctcaggggcgcaacgatcgtcttcaccgacatcctcgccatcaagtacgacctcatcgccaaccactccagctacgatgcaaacgtttttttttgtagggttcgaggagccgctaatggcgtgctgcggccatggcgggccgccgtacaactacgacttcaacgtgagctgcctcggggcggggtaccgggtgtgcgaggacggcagcaagttcgtgagctgggacggcgtgcactacaccgacgccgccaacgccgtcgtcgccggcaagatcctctccgccgactactcgaggcccaagctgcccttcagctacttctgcagtgcatagctaggctgcaccagaagctgcatatacgcatgtggctcctgatcatccattggaggatcatccatgaaccagactagctagagttgttttggcttcctaagtttgctcttttgttagaactagaaaggttgcccgcgcacatgtgcgggacaccttatttaatgttgcttgaattttaattatgaatacttatgtgtggatgagtatttcttaaaatatttttttaatctattctgaacatgttttttatc

SEQ ID NO: 25551 - DNA, 1613 bp, Oryza sativa
  ref <308>: DATABASE ACCESSION NUMBER: AK100993
  ref <309>: DATABASE ENTRY DATE: 2002-08-28
gagaacacttatcttctctcttgaaaaagctctaagggtaccaacatgatggcagagacgatgaccacgaagacgaagccagggatggcggagcggttactgctcccattgagcatggtactggtccagctattcaccataggtgccctcctcctcgcgaagctatcattcaatagtgggatggcacctttcgtcctcctcgcataccgcaacctcattggcaccgtcaccatgttacccttcgccttctggttcgagaggcaaatgatgaaaaaggttaactacaaggtactgggctggatatttttcaacgctttgttcggaattgttttggctatggggctacactactacggcctacgcgctaccaatgctggatacaccgtcaatttcctaaatttggtccccgtcgttaccttcatcattgcagcgatcttccgattggagaagctgaagctgaagacgcggtctggcatgataaaggtgattggcacggtgatctgtgttgtgggcaccatggtggtgagcctgtacaggggcaagctgctgcatttgtggcctacccacctgctgaagccggcgcagctgcgggcgatcggcggcagcgacgactccaccttccctacccaccacaacatgctcatcgggacgctcttcctttgcggcagttgcctcagctacgccttctggttcatcgttcaggccaaagtgaacaaggagttcccatctaagtacttctcgacgatgctcgcatgcttgatggggacaatccaggcggtggtgatcgggatcgccgtcgaccgggaccggtcggcatgggcactccactgggatctgcagctgatcaccatcatctattcgggggttttcaacacggctgccaccttctgcttgatcacgtgggcggtgtcacggcgagggccaacctacccctccatgttcaactcgcttgcgctgatcatcaccgtcgtccttgactcgatgctgcttggaagcgacatctctgtcgggaggtgagaattaatactgcgacagcatgtctgtatattcagtcttagggtcgtactgtcttatatatgtacggtatcaagtccggcaaaagcatggactagctaccacatgagaggcactatatatactactccatccgtttcatattataagactttataacattgcccacatttatatagatgttaatgaatctatacacatatatgtctagattcatttacatctatatgaatatggataatactatagaaagtcttataatatataacatgctttgcttgcagcttgctaggggcatttatgataatcattggcctctattccttcctctggggaaaagggaaggagataaaagagcagcagcagcaagttcccacgaatacagaggcagatcagagcaaaatcacttatcctaaaagtaatggtgaggtgcgaattatgttggatacatagacaatgtagattgtagagatcgctagatataacaaaggattgtatttggattactatagactagaattaagtcgcttgtttattgatgaggtatatgttgattcttctatcgtcaatagagaaagataggaaggtgagtgtagttt

SEQ ID NO: 25552 - DNA, 4611 bp, Oryza sativa
  ref <308>: DATABASE ACCESSION NUMBER: AK100994
  ref <309>: DATABASE ENTRY DATE: 2002-08-28
ggggggacggcagattgacatatattggagcaagcggcaagtggtgctccggatatgatttttctggacatcatatctgcagcaagcgtttggcgaggaagtgctttgtctttttaaaatgtgtcacgggttaacgtaggatgctattactcgcactagctaattattttgtttatctgaaaacgaacgccaccgttgaaatacgagtagatgcagtacatctccaaaaaaaataaaaaatcttgaggtcagggttagtgacatcttgcaacaggtgttatgaatatttttaagtgcagaatatgctaccgtggtggtcttgagcactagcaagaggtaaagctatatgccacagcattgccatgtaagtgctttcatcatatattttccagttctgtgaaaagctagcttgtgtatgtagtgtggacatgcttagaaacaaatgcccaagccagtaacttcattaactttggatatactaatatactttgaaatgcataccgaggtagaaagtataggtggactttaaatagcttagcggcggccaattcggtgctaggcttctcctggttccgtgtgttggagctgtcgacgtgtgggtggtggtatacttttttttcttttcctggttacgatcttacggggttgtaatcttgtaatttttcttctgctctatcaatagaacttcgcaccatcttgtgcgagttgttcaaaaaaaaactttaaatagctggtatttgttgtgttgtctttgtagaagacttgtccaaacttggccattagcacatcgtcttgtaattgacaggtggagaggatgactcattatgcacatctctatcttgcatttctcatgtgtcggtttacaaccaaaatgctttgctcttgcagtatccaaccttatttttttttctaatgggggcaacagagggtggtttggaaaatgctttggtcacagctgaacttgagatcttgaaagaagagaaacttcagctgctatctggcagtcggtactgagcaccatgcatcgccatctgctttgctttcagcatcttcttactcacccaacttaaggatgtaacaaacccaccatggatgcctgtggagcaattctctcccttctttttacctgccaaagcttccttccatgatgcctcctttttccttcatttttcctctttccatttagcctctcttggtggcatcatgctcaccaaaggaatggacttggcatccatttggtgctaatctctaagctgctggctgtattgcataagtattctttaaggatcatagatagtatttgtgggtgtcctgactataatggaggaggtaccatccccactttcctactggttgtgtataacccctgaaaccaatgagctttgcttgtggctttcctcgtctgtactccagctttattcccattctcttatcgtgcacctgttcctctcttcatgtttctcggtggcatctaacaatgctgatggatatatctgcaggcgtcttgatgcatcctatgcttcttccttaagataagaagagcaatggtgtttattacattaccatattagcatgacgaaggtggctcattagtatatcaatatatgaatctctgaatttgtttatgacccatttctttgagctgcgtatacgtatacttaatacatgttattttgaaatatctacttaatacatgtaaagaaaatggaaggaaaagtagaagagatccataaagtggatatctatcataaggttgcagagttggattaagcgtgtacggacattagtgggccttgcggcatgactttgttagtacttctgcatacctgtggtagtaccataatgcagcattagattcatcttaaacatatatatttatttctttgtccatgcttacctgcaaagtctacaaggccattagtccttgtgattgagcaaagcatccccttcgcggcagtcttataatgggcttctagccttgtgccttatatattcttgccattcaactaggcttcattacttttaggacccatgaagccatgtacctgcattcaactaactgccatcaaatgtgttaggtttctcttcttagcgtctaaactaggctgaagcaaactgatctgatccttctttccctgacgcaagatgctggttcgattaggttgtatcttgtgctaagggggcaagtacatgaaagatgcagtcaacacgataagttgcaaaataattgtctagctggctccttatggagctttctaatgggtggacagcactaacaaaaataaaatcatcctttctgcaatggacgaaatgtgattatggtgctaacatttgaccaactagaagctacggtatcggatcatccaaactttctttcatcctatttcaaactagctgcggtattggagttcatcggtgtgcgggatttcagcggtatgtaggagctgttgtactcaaagtcgtcgatgcgcttgagaagagagtcgaggtagtccaaagtgtaattctttgtatgcctggtgaaaataaaaacagaaaacatttgtttcaaaagataagaaaagaattgaaaaacataatttatatttaaaaaagagcatgtgactgtcatcaagaagtggggtggagaggactgaagaggttggccttgctgcagcccgtgcctcgcaaaatccaaacaaattaaactcctgcctacaatggcgacccgttcatgcaatcctttttctctcttttttcctctccagagtccagtccaggctagaaccagcagcagtgtggccagcagcgtccctattgctgcatgtttttgcatcagccggtgactgatgagtgagtaaggttgctgggctggccggcctcggtatcctggctcccattagggtgggcatcaaaagacagtgccaacgctgccgtggactagatgggccaaagcagcaagcacagggccgaccctttggaagggcaagccagccaggggggcacacgttagttgacaataatatcagtccatcacaattttaggtatctgactcgtctctttccctctcacttcacacagatggggagtaatggtgtgggagctgccgctgccgctgcactgcgtggtagaaacaaatctggggtcagagctggcctagcgagagagagagagagagagagagacccaatgcatgatgggggaaggaaccttgtgatatggagatgcagcatagcatagggaagggccgatgcacatgccaatgccactgccgatcaggtacagatgctctctctacagatccctctagcttggttggttaatgctgttaggcatggaggtttgttgcttgctttactttgctcaatggctatagtaaaagtggtgatcaagataagacagcaatgctgcctggaacagtgaaaatctgaattattatcagggtttatggagcaaagaagtaaagcaatcaaggcatgcatgcctcgcaggataaatatatacacatctctgtcggaaccttttcagggtcatgtctataatgccactttgctaagccacgggtttgcatttagcttagttgaggcaacatgagcttgggacccgcagagagtgtagctgtgaatctctgattcatcagctttgttgcagtgtgcagtcactcacttatgatgttttcacccacacatacagagagatacactcctatttcttaaagattgcacacatacaagaggagtcagtctcagtcactgcgtcctgctgcgtgaagagggaataggaagcaaatattggagagacaagtgcagctgttgagaccagagaagggaggagtggtggcctttgcactgctcacatgagaaggatcagaagagtgtaataatataaaggcagtgcatgtgatggcgattggtgtggtttggtgctcctccaggaaacactcatcagtctcccgtagcatcacttactataataattaaagtccaaaacacattagctagctgcacgttagcatgtttatccaaccaagaaggtgaggactgagcaggatatgaaagaaagaaaagaagaaaaggatggaaaaaaagaaaacggagacaagaattgctaatggaggcaacaggactacagaagagtaggtgggctaaacaatggggaggaggagcagcatcagagcatggcatggagaagtgtgagcttggggccaaaggaaaggagctctcctctgacgacgcccatatgctttggttctagcacagcattaagtagcgagaaagacggtgttggtgatggccatgattcatgagaagttgcgaaagtctctcattagtgcctggaaatgaaggttgtttatgcactttacctgccttgtgcccaaatcccttaatcaagctgttggaatcttttgttaaaattaaagggttcctgtactgctgttaaagtgtcatgtatgcagttcaagtagatgcatcatgccacctgcatatgttggcagttgttggagtatattactgacattatctctgctgttttcccattattatacctgaatgtattcggtacttcaattgacatttttgtgtaaaattctcatggcagatgcaataatgcttgcttgtttggttgggtgg

SEQ ID NO: 25553 - DNA, 1371 bp, Oryza sativa
  ref <308>: DATABASE ACCESSION NUMBER: AK100995
  ref <309>: DATABASE ENTRY DATE: 2002-08-28
caacgggagtcgtcgaattcggatacaaatctgatcagttcgatttcgatcgaatttcacccaaagtccacacaaactttcgattcgatttctccgatctcgcagcggcggcggccatggcgcagaggacgctggagctgacgctgatctcggccaaggatctcaaggacgtgaacctcctctccaagatggaggtctacgccgtcgtctcgctctccggcgaccgccgctcgcggcagcggatcgccaccgaccgcgccggtggccgcaacccggcgtggaacgccgccccgctccggttcaccgtcccggcctccggcgcgggttccctccacgtcctcctccgcgccgagcgcgccctcggcgaccgcgacgtcggcgaggtccacatccccctctcggagctcctctccggcgcccccgacggcgccgtccccgccaagttcgtctcctaccaggtccgcaagatctcctccgggaagccacagggcgtcctcaatttctcctacaagatcggcgaggtaacccaatccggctcctaccctggtgcctctcctccggtcgcgtacggccaagctccaccggcgccagcttacccgccctccgccgccgccgccgcggcctacccgccccaatccacctacccaccaccgaccgcctacccaacggcagcgaaggccgatgggtcagccgccgcggcctacccaccccagtccgcctacccaccaccgggcaagggaaacgagccatcgacggcttacccacctcccgccggctacccgccggcgaccggaagtagtaagccggcgaaggcgggtgagccggtgacggcgtacccagccgccgcggggccgagcaccgccgcgccatacggcacggcgccaccgccgcagtacggctacgggtacccggcccagccgccgccgccgcaagccggctacggctacccacccccgccgccgcaagccggctacggcggcggctacggctacccgccgcaggctgggtacggcggctaccagcagcaggccgtgaagccggcgaagaagaacaacttcgggatgggactcggagccgggctgctcggcggcgcgctcggcggcctcctcatcggagacgccatctccgacgcgtcggcgtatgacgccggctacgacgcagggttcgacgacggcggtggcttcgatttctagatgacacagatcgatgcaatgggtgatcttcgtataatctcgtattggtttttgttttgaattttgtttactgccaggaccaaattatggatgatgtaaataggagtttaattgacaccatatatatgtggtgaagctatgtgatggagtacaaatatgagtcaactgttgttttttt

SEQ ID NO: 25554 - DNA, 1871 bp, Oryza sativa
  ref <308>: DATABASE ACCESSION NUMBER: AK100996
  ref <309>: DATABASE ENTRY DATE: 2002-08-28
tggtgcgagaaagaaagaaaggcgagttctttttggcaagggagggagggggggcactcgttgagggtgggtttcagaggtgtgggaggtcgcctccatggcggaggacaagggaggcctcgatgccgtcctcaaggagtcggtcgacttggagaacatcccgatcgaagaagtattccagaatttgaaatgctgccgacaggggctcacttccgaagaggcgcagctgcgcctgcaactttttggtccgaacaagctcgaggagaaggaggagagcaaattcctcaagttcttggggttcatgtggaatccgctgtcatgggtcatggaggctgcagctatcatggccattgcattagccaatggtggggggaagccaccagattggcaggactttgttggtatcatcacactgctacttatcaactcaactatcagtttcattgaggaaaacaatgctggcaatgctgctgctgcgctcatggcgcgtcttgcgccaaaagccaaggtgctccgaaatggtagttggactgaggaagaggcagccatccttgtgcctggggacatcatcagtattaagctgggagatatcattcccgcagatgctcgcctcctggaaggagatcctttgaagattgatcagtctgcgctgactggagagtcattgccagccaccaaaggtcctggtgacggtgtttactctggttcaacggttaagcagggtgagattgaggctgttgtgattgcaactggtgtgcacactttctttggaaaggctgcacatcttgttgattccaccaatcaagttggccatttccaaaaggttttaacagctatcgggaatttttgcatttgctcaattgctgtggggatgtttgttgagatcattgtcatgtaccctatccagcacaggccataccgccctgggattgacaacctattggtgcttctcattggaggcattcctatagcaatgcccacagtcttatctgtaaccatggcaatagggtctcatcgcttgtctcagcagggagctataacaaagagaatgactgcaattgaagagatggctggcatggatgttctttgcagtgataaaacaggaactctgactttaaataagctcacagtggacaagaatctcattgagatttttgaaagaggagtcactcaggaccaagtaattctgatggctgctagagcatcccgaacagaaaatcaagatgctattgatactgcaatagtcgggatgctcgctgatccaaaagaggcacgtgctggtattcaagaggttcacttcctgccattcaatccgactgacaagagaactgcattgacatacattgatagtgatggaaagatgtaccgtgttagtaaaggcgcaccagagcagattctcaacctggcacacaacaagacacagatagaacgacgagtccatgctgtaattgataagtttgcagaacgtggacttcgatcacttgctgtagcatatcaggaagttccagatggaaggaaagagagtcctggtgggccatggcgctttgttgctctccttccactctttgatcctccaaggcatgatagtgcagaaacaattcgaagggcacttaaccttggtgtaaatgttaagatgatcacaggtgaccaactagcgattgggaaagaaacagggcgtcgtctaggaatgggtacaaacatgtacccttcatctgctttgttgggacagaacaaggatgagtctgttgctgctttaccagttgacgatctaatcgagaaagctgatggttttgctggtgtattcccagagcacaagtatgagattgtaaaacgtctgcaagcacggaagcacatctgtggaatgactggtg

SEQ ID NO: 25555 - DNA, 3201 bp, Oryza sativa
  ref <308>: DATABASE ACCESSION NUMBER: AK100997
  ref <309>: DATABASE ENTRY DATE: 2002-08-28
ggtcgagatcgttctccccctcccctccttcgctgctctctcctctccccttccaccgtgtgtgctgcatccgccacactagtcccagatctccaaaccctaacccccccaccccgcatgccattctactagccgccgctcgtcatggcgccgccccgcacatcgggtctcctcctcctcctcgccgcggtcgtcgcggccgccgccgtcgtcctcgtcccgccggcggaggcggcggtggcgagcatcgacctggggtcggagtggctcaaggtggccgccgtgcacctcgcccccggacgcgtcccgatcgcggtggccatcaacgagatgtcgaagcgcaagtccccggcgctcgccgcgctcgccgacggcaaccggctcgccggcgaggaggcgtccggcatcaccgcgcgccacccgtccaaggtgttcgcccgcgcgcgggacctcctcgcgaagcccttcccctacgtgcggtccgtcgcggaggcgctcttcctcccctacgacctcgtccccgacgcgcgcggcgccgccgcggtccgcgcggacgacgggcaggtctacaccgtcgaggagatcgtcgcgatggtgctccactacgccgctgggctcgcggatgcgcacgtcggcgctcctgtgcgtgacgccgtcgtcgccgttccgccctactttgggcaggccgaacgccgggccttgacgcaggcggcgcagcttgccggagttaacgtcctcgcgctcatcaatgagcacgccggggcagcgttgcagtacgggatcgacaaggatttctcgaacgagtcgaggcatgttatcttctatgacatgggcgcaggtagtacctacgccgcgctggtgtactactcagcttacaaggccaaggagtttgggaagacggtatcggtgaaccagttccaggttaaggatgttagatgggactccaaacttggaggccttgaaatggaaatgcgcctggtaaactattttgctgatcaatttaataaacaactcggtaatggagttgatatccgccagtctcccaaggcgatggctaagttgaagaagcaggttaagcgtaccaaagaaattctgagtgcaaatactgctgctccaatttcagttgaatcactatataatgatctcgatttcaggagtaccattacacgtgaaaaatttgaagaactttgtgaagaattatgggagcaggctctaactccagttaaagaagtgcttgcacattctggaatgaagattgatgatatctatgctgtagaattaataggaggagctactcgagtaccaaaattgcaggctaagctgcaggaattcctgggaagaagtgacctggataagcatcttgatgcagatgaagcaattgttctgggtgcctcactgcatgcagctaacttaagtgatggaattaagttgaaccgtaagttagggatgattgatggttctacttatggttttgtgtttgaaataaatggcccagattatgtcaaagatgaaagcactgatcaattactggtgccaaggatgaaaaaattgggaattaagatgttcaggtccattagacatactaaagacttcgatgtttctatcagctatgaaaaagcttctgaactgcctccaggtgttacatcacacaaatttgtggagtattctgtatcaggcctgacagatgcaagcgaaaagtacagtagccgcaatttatctgcacccatcaaggcaaatctacatttttctttgagtaggagcggaattatttctcttgatagggcagaagcagtgattgagataactgaatgggttgaagttccaaagaagaatttaactctagagagtaattccaccagtcagactttgtcttcggaaggaggagcagctaatgacacatctgacagtaaggagaatgtgagttctgatggggatgcaaataagtccagtgctccaatagatgagagtaatgcacaagatattgttacagagaaggtgctcaagaaaagaacattcagggtcccgttaaaggttgtggaaaagatggctggtgctggatcaattctttcgaaggagttgtattctgaagcaaaaactaggttagaggcgcttgataagaaggatgctgaaaggaggagaactgctgaactgaaaaataacctggagtcttacatatactctatgaaggagaagctggaagagaacacagaaattttgaccgtctcaactgaacaggagagggaatcttttgcagagaaacttaatgaggtacaagattggttgtatatggatggtgaagatgctcaagcaaatgaattcaaggaacgccttgaccaacttaaggccatcggtgacccaattcttttcagattgagtgagctaaaagcccggccaacggcttgtgaaaatgctagattgtatcttgctgagttgcaaaagattgttaagaactgggactcgaacaaaccgtggcttccaaaaaagagggtagatgaggttgtaagtgaagcagagaaagtaaaaacttggttggaggagaaggaagccatacagaaaagcacccctgtctacagtccacctgctttcacatctgaagaagtctacgaaagagttctggacctacaagataaggtttctagtgtcaataggatacctaaaccaaaacccaagatagaaaagaaacctcccaaggaagaagagtctgctaacaaagagaaaactgactcttcggaatctgaatccaaagaagctgaatccacggaaacatcgtcggaatcagctgcccctgaagagagtcagtctgaaccacaaaagactgacgatttagaacctgaagctcatgatgagttgtgattattagcgtgaaccttggcaccccgtaggatttgttgggatgatactgatactccaagaaggcactttgtcagaggcaaaattttggttgctcaaattttctcatttgtttgacggccaaaagatgaggtgtaggatttccgtatggactagatgctataggaccagcagaaaggtgatccatagcttctaatcgcagcttctaatcgctgtatagcagtattatggtctctatggcatgctgtcaaagttaatgcctcaaaggcttcgacttcacgactttgtagttgcattgtttgtatcgaactaatttgttttgatattgctgagctatagaaattttacatc

SEQ ID NO: 25556 - DNA, 2804 bp, Oryza sativa
  ref <308>: DATABASE ACCESSION NUMBER: AK100998
  ref <309>: DATABASE ENTRY DATE: 2002-08-28
gtcttctacttccgcttccgctcgcggttccagatctctccctgcacatctgcatccactcacactcgagggagagggagagggggagagatgagggagaggggagagatgagggaggcgaaggcgcctctgatcgcggaggcggcggagcacatatcccattcccacggctccgggtcgtccggcaccggcagccacaccagcggcggcggcggcgggtggaggggctcgaggcagtaccagcgccgctcggacgcccctcgcctacggcaaccggtaccagaaggcggccgccctcgtcgacctcgcagaagatggtgtgggtatccctgaggatgtcttgaatgacacaaggtttgagagggctatgagattctattttgtgtatctccggttggattggctgtggtcacttaacctatttgctttgattcttttgaattttctcgagaagcctctctggtgccggggatattctcaacatgcttgtgatcaaagggatctttactttctggggcagttgccatacttgagcaaaactgaatctctcatatatgaggggctcacacttgttattcttgtaatggatatcttctatccactgtcctatgaaggtttaaacctattctggaagaacacaataaataaactgaaggttcttcttctcttcatcttagcatgtgacatactggtgtttgcatttagtccccaacctttcagagtagctccttacatccgtgttgcgtttctaataatgaatatcagggaactgcgaatgtgtgctgttacactggttggtatggttgggacataccttaatgttttggccctttcactattgttcctcttattcgcaagctggctagcttatgtaacatttgaggatacaccacaaggaaagactgttttctcgtcatatggtaccacgttatatcagatgtttattctcttcaccacctccaataatcctgatgtatgggttcctgcttataagagctctcgttggtcctcactattttttattgtctacgtacttttgggagtttacttcctaacaaatttaattcttgctgtcatttatgatagctttaaggagcagctagcaaagcaagtttctcaggcagactgtacaaggaaaagtatactagagaaggcatttggtatcattgatgctactggtcagggttatctcaacaaagaacagtgcctatcattactagatgagctcaacaaatacagatcgttacctaaaacctcaagggaagattttgaattaatttttgccgagcttgatcagagtggtgattttaaggttacctctgaagaatttgctacactgtgcaataccattgcaataaaattccagaaagaaccacctccatcctatctcgagaagtatccatctttctatcattcagcactgtgtgaatggttgaaatcttttgtgcggagcccactgtttgagtatattgttatttttgttcttctgatgaatctagtcgctgtcattattgaaacaacgctggatatagaaaacagctcctcgcagaaagtgtggcaagaagttgagtttgtctttggatggatttacgttatagagatggcactcaaaatattttcattaggatttggtggctactggatggaaggtcaaaacaagtttgattttgtgcttacttggactatatttattggagagactctaacatttgccttcccatcgaagctttcttttctttcaaatggagaatggattcggtaccttcttcttggaaggatgttacgcttgacaagaattctgttgcaagttcggcgtttcagagcatttgttgcaacattctttactctgatgtctagcttgatgccatatttggggattgtactctgcaccctttgcatttactgctcccttggtttgcagatatttgggggcattgtgtatgcaggaaatccaacactagaagaaaccgatctcttcagtaacgactatcttctttttaacttcaatgactatccaagtggtatggtaactctgttcaatttgttagtgatgggcaattggcaagcttggatggagagctacaggcaattgactggaagttattggagcctgatttattttgtcagcttttacctcatttcagtattactgctgcttaatctgattgtagcatttgtgttggaggcattttttgctgagatggaactggagaaagatggcgaagctgatatccaggatcctactttggaaggaagaaacaggcggcgatctgtgcgtgtgaggacaaaggggaccatggttgatattcttcttcaccatatgttgagcaatgaacttgatggatctcaaaaccgtgaccaatagcttatcttcatggtcttttttttttttaaaaaaaaggccctgcaggaagaaagcaagaacagaaaaaaaaaaggaaatgattagagccggttctcgagcatggagttatgttttgttatgtcaggtactcaggtgcaaaggaatcttggtgaggtgatggaaaggactctgcttgtcatactttagttgtcaaggagaacagcagatgtgttctctttctgctccaaaggagaccttaaaggagcttttttttaaaagtaaatattgtaggagattctcctacagtgcatatatatttatacaaaggagctctttctgtataggattaaaatgtgctaatggttctggtgattttcttttttgaaaactttacaggttattatagccataatactccacatttccttattgttatactatatacacgttataagttttg

SEQ ID NO: 25557 - DNA, 1999 bp, Oryza sativa
  ref <308>: DATABASE ACCESSION NUMBER: AK100999
  ref <309>: DATABASE ENTRY DATE: 2002-08-28
ggcagctgcacttgtacgaccaaaagacggaccgcctctcccactccctcctcatcttcatcatcttcttcttcttgtgaattgtcaagaagagaaggggaagaagttgcggtctccgttgctgaccgagagacccgcgtgaaacctgaaaagaggggaggggcggagcttcctaagaaattgagaagaagcccactgcccggccatatgtataggaacaaaccatccctcccttgtagtagtagtagtagaagtagtaggagtagtacatattggaagcagctgctgaggcctgagggtaggataggctgcccttgagcctggttttccctcgatttcttcgtcctctgcggcagcgtcttcttcttcttcttcttcttgggttgctacctagctcgtactggagtattaaggaaggaatagccggccggcaagaaaagaagctcaacatcatctagctcgtcgctactagtaagtaggagtagttggcaaaatccatccatatatatgatggcaactggcggcggcgatggtcgtcggaggggccggcggaggagcaagatgaggctgagcaggctgtacagtttcgcgtgcgggcggaggccgacggcagtcgacgacgaaagctccagcaggatcggcgggccggggttcacgcgcgtcgtcaacgccaacggcggcggcggcatcccggagtacgggtaccgctccaactcggtgtcgacgaccaagtacaacgtggtcaccttcgtgcccaagtccctgttggagcagttccgcagagtggccaacatctacttcctcatctccgcctgcctcacctacaccaacctcgccccctacacctccgccagcgctgtcgcccccctcgtcctcgtcctcctcgccaccatggtcaaggaggccatcgaagactggaggaggaagcagcaggataccgaggtaaacaacagaaagacaaaagtgctccaggacggtgctttccattctaccaaatggatgaacctccaagttggtgatattgtcaaggttgaaaaagatgagtttttccctgctgacctaatcctcctctcatctagctacgaagacgccatttgctatgttgagaccatgaacctggatggggagacaaatctcaagctcaagcaatctctagaggcatcatccggcttgcaggaggatgacagcttcaatagcttcagggctgtaataaggtgtgaggacccaaatccacacctctattcctttgttggcaacatcgaaatcgaagaacagtatcctctgtcaccccagcagatccttctcagagactcaaagcttcgcaacaccgagtatgtgtacggtgtggtcatcttcacaggccatgatacaaaggtcatgcagaatgctatgaaagccccatccaagagaagtaagattgaaaggaagatggaccggatcatctacttgcttttgtctgcacttgtcctgatttcagtcatcggatcggttttctttggcatcacaaccagagatgacctacaagatggcaggccgaaaagatggtaccttaggccggacgactctaccatctacttcaagccaaccaaagcagccatatcagcaatacttcatttcttcacagccatgattctatatgggaacttcataccaatctctctgtacatctctattgagattgtcaagcttctgcaggctctgttcatcaaccaagacattcatatgtatcatgaggagaccgacacaccggctcatgctagaacatccaacttgaacgaggagttgggtcaagtggacacgatccttacggataaaactgggactctgacttgcaattccatggagttcatcaaatgctcaattgccggaactgcgtatggccgtggtatcactgaggtggagagagcaatggcgaaaagaaaaggttctcccttgatcgccgacatggccagcaacacccaaggctctcaagctgcaatcaaaggatttaatttcacgg

SEQ ID NO: 25558 - DNA, 3206 bp, Oryza sativa
  ref <308>: DATABASE ACCESSION NUMBER: AK101000
  ref <309>: DATABASE ENTRY DATE: 2002-08-28
gagttccacctcctcccaggaagaaggcgagttgacacctcgcaaaccctaaaccatctccccgccgccgccgccgccgccgccgtcgacgtcgctctcttctctctcgcgccgagagtttaaagcgagcagaaggaaaaagccaaagcagcagccatggcatcccgtttttggggacagggagacagcgactccgaggaggaggagcaggagattgagtcagaagcaggaagtgaaagcgaagatgaaggtggtgatgccggggggcgttcaaaccagaaccgctatttgaggaccaccaacgcaagcgacagtgacgagtctgattctggtcagcgtgtggtccgctccttgaaggataagcgcaatgaggagttgaaaattacggttgatcagatgcgcaatgcaatgaagatcaatgactgggtgaatttacaagagagtttcgagaagctcaacaagcagcttgagaaggtggttcgtgtcaatgaatccaccacagttccaaatatgtacgtcaaggctcttgtattactggaggacttccttgctgaggccctagcaaacaaagaggccaagaagaagatgagcagcagcaatgcaaaggcactcaatgcaatgaaacagaaactaaagaagaacaacaagcagtatgagaacctgatccaagagtgcagagagcatccagagcgctttgaagatgacgatgtggaagacaaggatgacgatgatgagacagatgatgatgctagtgatgcagacattgaggatcctgaaaagatggttatgtctgaatcagaggaggaaggagatgatgatgaggagggtgaccaggatggtggagcctgggaaaagaagataagcaagaaagataagcttatggacaagcagtttttgaaagatcccagtgagattacttgggatattgttgataaaaagctcaaggagattgtggcgtcaaggggtaaaaaaggcacagggaggattgagcgtgttgagcagctaacctttttgacccgtgtggcgaaaacacctgctcagaagcttgaaattctctttcatgtgatttctgcccaatttgatgtcaaccctagcttacttggtcacatgccagtcaacatgtggaagaagtgtgttaataacatgcttcttgtgcttgatatactgcaacagtatcccaatattgtagtagacacctccgtggagcctgatgagaaggaaactcagaagggtgctgactatgatggacaaatccatgtgacgggtgacctggttgcattcctggagagattggattctgagtttttcaaaagtttgcagtgcactgatccatacacgaaagattatgttcagaggctcagggatgaacctttgtttttggttgttgcacagaatgtccaagattacctggaacgtgtcggtaactttaaggctgaagctaaggttgcactgcgtcgtgttgaattggtctactacaaacctcaggaggtatatgatgcaatgagaaagcttgcagagcaggatgaagatagtagggaggatgatgatgcagacgctgacgaggagcgtcaagtagttgatgacaataggggccctccaccatttgttgtgatccctgaggtcgtgcctaggaagcctactttcccagagagtggcagagctttgatggatgcgctgatgtctgtgatttacaaatatggtgatgaaaggaccaaagcccgggcaatgctgtgtgacatttatcaccatgctatctctgataaattttctgtggcacgtgacttgcttttaatgagccatttacaagacggggttcaactcatggacatatcatcacagattctgttcaacagagtcatggcccagttggggctgtgtgcttttagggctggtttgataattgaagctcatggttgcttgtctgagttatattcaactgggagagtgaaggagttgcttgcacaaggtgtgcaacaaagtcgataccatgaaaaaactcctgaacaggaaaggcttgagaggagaaggcaaatgccttaccatatgcatataaaccttgaacttttggaagccactcacttgatttgtgccatgctgattgaggtccccaatatggctgccagtacttatgacaggaggaagtctatgaacagaacattccgtaggcttcttgagatcagtgagaggcagacttttgtcgggccaccagaaaatgtgagggaccatgtaatggctgcaacaagagccctccgcaagggtgactaccagaaggctttcgatgtcattaattcgctggagatctggaagcttttgaggaacaaggagcatgttcttgagatgctgaaacttaagatcaaagaagaagctcttagaacctatctcttgtcatactcttcttgctacgagtccctgagccttgaccagctcactacaatgtttgaccttagtgagcaacaagctcatagcattgttagcaagatgatgatgcatgaagagcttcatgccagctgggatcaaccaaccaagtgcattattttccacaatgttgatcaaactaggcttcagggactactcttccagatgtctgataagctctctgtccttgtggagagcaatgagagggcatatgaggccaaaactggtggtacccttgagggagcaccacccaggcgtaggggtggtgatggtcaggactcatccaacttgggcaagtggcaggagaacttcgtatcatcacaagggcggcaaggcggcgggaggtctggatactcaggcagagttggaggccctggaagaggtggtggtggctaccagagggacaggggtagtcagggttcccgtggaggctatggtggtggttcgcgcttccaagatgggggaaggtctcgcaaccagtctggttctatggcaagaggaggtgatggtggtgcacgcatggtgagcctgaacaggtctggtagaggttagagtagttctccaggatagttctcagcgcaaagttttgcaagttctgagtcactgatcaagtttctggcattttggaagtcacatctgttctgaagctattcttgatctcttaatttcgttacagcttacagtttaaatttgtcggacacttgacaaagagctctctggtttgtaccatgggagtgaggacagtattcactcctacatttgatataatgctggcactattttctactctc

SEQ ID NO: 25559 - DNA, 1851 bp, Oryza sativa
  ref <308>: DATABASE ACCESSION NUMBER: AK101001
  ref <309>: DATABASE ENTRY DATE: 2002-08-28
ggtacaatgaacatgccacctttagcagaatgaaacaagacagaaacgttacaaggaaatgagcatcgatggagtcacaggggattaccaaacccaaattgacatcaatcttctcgccgaccaactagaggcaaaactatgcgacgttcctttggacgacggcggccggcgacacggctcgccggagtgccacatttccatcgtgaagccgcaagtccgcctcgtcgacgtatcgcagtacgctccgcaggtgctgctcgtcggcgcctaccaccacaggtcgctggaccggtgtgagctggacaagctggcggcgctccggcgtgccctccccgacggcgacgacgagcgggcgtccacgctgaggcgctacctggcggccatcgccggcctcgaaagcgaggcgcggagctactaccgcgatgacacggatgacatgggcgcggaggagtttgcgttgatgctgctgctcgacgggtggtacatactccactacttcggcgtcggcgtcggcggcggcgggagagcggtggacatcttcgccgtgcgcgacgtgttctacctgctcgagaaccagatacccttcttcatcctcgagaaggtctacgagctgatccactctccccctccttctccgggagctacagccatcgccggcggcgggtcgtcgtcttcctccgtcgtggttgtcgatgggttcgtgcgccatctccggtcactcctccgagaccagggctactcgaatctggaggtggacatcaccagcacacgcccctgtcacctcgtccacttactccacatgcacttcacacccatggcgatggcgccggccgccgacgacgctgccgctgtccccatccccaccaggcgcgcgcgcgccaccgtgtaccgctggcgcggggcgacgcagtaccacgccgccggcgtgaggttcaagagacgggccctcggcctcggcgacgcacggtgcgtcctcgacgtggagctccggcggctgacgctgcacgtcccgacgctgacggtggacaacaacacgtggcgggtcctgcgcaacctgatggcgctggagcagaacaacccaaacctgggcagccacgtcacggcctactgcctcttcatgtcgcatctcgccggcacggcgaacgacgtcgcgctcctggcgagcaaaggcgtcgtcgtgcacttcatggggtgcgacgaggacgtcgctaagggattcgccggcctgtgcaggggcgtggcgctcagcgtcgacgacgcgcgccagaactacctgcagccgacgtgggagaagatggagcggcggtacagcagccggccagtcaactggatggcgctgctgcggcggcggcatttgagcaacccgctggtggcgaccgcgctgctcgccgccattgttggcctagtctgtgaagttcttcaggctgtgtatgccgtcaagagctacaagactagaagctaagccactgagacgtatgcccctgtatgcctaccgattttacgttcattatcgaagtaccaatcattctccgctgcgttggattctactccactatgtatagatggccaaaatgagtcgcccgacacggcctggccgggacacgactaaggcacggtccaagatcagtcggaccggctcggcctgagattaaccatgtcgcgccgtgcccatccacggcgggcgcctacacctatatcccaggcatggcccaataagactcggatcatgccatgctggctcgaaggcacgactagcataccgtattgatccttggaataagtttattttgcctccctcatttttttaaggccgtgccttatatggctagaataagtatattttaccccctc

SEQ ID NO: 25560 - DNA, 1933 bp, Oryza sativa
  ref <308>: DATABASE ACCESSION NUMBER: AK101002
  ref <309>: DATABASE ENTRY DATE: 2002-08-28
gactcccccccgcacccacactcgcggctacgtacgaacgtacgtacacagtagtagtagcagtagtgcgtacacgatgctgctcctcaaggccgtgtaccgcgtggtggtgaacaacttcctcgccctcgccgcggcggccgtcgcggccgtgctgctccggcgccccgacgagctcgccgcgcggctgcgcgcggtgtcgtccccgctgcacgccgccacggcggcggtgctcgcggcgggcgtggcgaggctggtgcgcgcgcggcgggcgcggggcgtgtacctggtggagtacgggtgcttccgccccaggccgtgctaccgggccccgttcgcgacgtgcctggagcacgcccacctgatgccgtacctggtggacgaggagagcgtcgcgttcgccatccggctgctggagcggtcggggctcggcgacgagacgtgcgtccccgacgcgtaccactacatgccgcccgaccggagcctcagggcgtcgcgcgacgagtcggagctggtcatcttctccgccgtcgacgacgtgttcgccaggtcggccctgacgcccgccgacatcgacgtgctcatcgtcaactgcagcatcttcaccccgacgcccgtgttcgccgacatggtcgtcaacaggtacaagctccgcgccgaggtgcagaacgtgaacctgtccgggatggggtgcagcgcggggctcgtgtccgtcggcctcgccaagaacctcctgcaggtgtcgcccccgggcaccaacgtgctcatcgtctccacagagatcctgtcgtcgcagtactacgtcggcacggagcgcgccatgctgctgcccaactgcctcttccgcatgggcgccgccgccatgatcctctccaactcgcccgaccacgcgcggttccgcctcggccgcgtggtgcgcaccgtcaccgcggcgcgggacagcgactaccggtgcgtgttccaggaggaggacgagcagggcaacacggggatccgcctctccaaggacctcgccaccaccgccggccacgcgctcaagagcaacatcgccgcgttcggcccgctcgtccttccggcgtccgagcagctgctggtagccatctccttcctcaagcggaagctcaagcagttgagcggccacgcgggcaaggtgaggctgtaccggcccgacttccgcacggcgttcgagcacttctgcatccacgcggggggccgcggggtgatcgacgaggtgcagcacgggctcggtctctccgacgacgacgtgggggcgtcgcggatgacgctgcaccggttcgggaacacgagctccagctcggtgctgtacgagctggcgtacctggaggccaaggggaggatgaagagaggggatcgggtgtggatgatctccttcggcgccggcttcgactgcaacagcgtggcgtgggagtgcgtcaagccggcgcccgacgccgacgggccctgggtcgactgcatccaccgctaccccgtccagctccccgaaatcgcctaagacgtctaaaaatgatcgataaacgacgtacaacgaccctacatactatctcgcagcgatcattaattaaattgggatttaattgcatgcatgcacgtaattaagcgcgtacatatatatgcacgtatatatgtatatgtaccttaattcggcgaagtatatgtggcatacatatatactcggtattttgttactacatgggatatattgtgattcgcataggggacatacagtacactttcttcttcaaagatatagtagaacgaataattgagaactttgataccgcagttaagctagtatacagaccttgattagtggtttgaattatattgataagtgttgttagaggttgggaacaatgtttgattgttgtattgtgccctcagatgggcaaaagtattaaattaaagtcgttgc

SEQ ID NO: 25561 - DNA, 1642 bp, Oryza sativa
  ref <308>: DATABASE ACCESSION NUMBER: AK101003
  ref <309>: DATABASE ENTRY DATE: 2002-08-28
gggcaaccaagaacgtacaccagccagcaggaaattaaatagtcatcgaccaatggagaagctgaagagcgagctatggatgacagcggtggccacctgcatgtcgctcttgttgtacctcaccatcctgagacggcgccacgcgagcggcggcagatcactagcattgccgccggggccaacgccactcccgctcatcggcaacctactctgccttggcggcatcttccaccaaaccctcgcgaaactggcgcgcgtccatggccctgtcatgacgctgaagctaggcctcaccacggccgtggtcgtgtcgtcggccgaggccgcgagggaggcctacacgaagcacgaccagcggctcgccgcgcggccggtcccggacgccttccgcgcgaacggcttctccgagcggtccatcgtgttctcgccgagctccgatccgcagtggaagaacctgcggggcatccacgcgacgcacatcttctcccctagagccctcgcggcgctgcgcggcatccgcgagcgcaaggtgcgggatatcgtcggctacatccgcacggtcgccggggaggagatgtgtgtccgcgaggtcgtgcacaacggcgtgctcaacctcatatccacctccttcttctccatggacatggctgacgtgcgctcggagtcggcgcgcgggctacgcgggctgatagaggacatcatcgcaaccgtcgcgggccccaacgtgtccgactttttccctttcctccggcagctcgacctgcagggcttgcgtcgacaaacgggcagccatcttggcatcgttttcgggttgttggacgacataatcgatcgccgcatggccgaaacccgtgaccaccctgacaagcagcggcacggcgacttcctggacgcgctcatcagcctcgcctccgccggcaagatcccacgctaccacatcacgtaccttctgttcgacgtctttgcggctggcgccgacacgatgacgaccaccgtggagtgggcgatggccgagctgcttcgcaatccccgcgtgatggccaaggtgcgggcggaggtgacggacgcgctcggcggcagggagagcttcgacgagggcgacgcggcgagcctcacgtacctccagtgcgtgttcaaggaggcgatgcggctgcaccccgtgggctcgatactggtccctcacctggcggtgcaggacggcgtcgagatcggtggctacgccgtgcccaagggcaccacggtgatcttcaacgcgtgggcgatcatgcgcgacccggcggcgtgggagagccccgaccaattcctaccggagcgcttcttgcacaaggaggagtcctcatcacctccgctggaattgcgagggaaagactacgagtacatcccgttcgggtccggcaggaggttgtgccccggcctgccactggcagagcgcgccgtgcccttcatactggcgtccctgctgcacgcgttcgagtggcggcttccggacggcatgtcgcctgatgacatggacatgactgagaagtttgccactgctaacgtgcttgctacccctttgaaggctgtgccagtcgcgtcacacactagttagggtgtggaggaaagtttggttgaaattggaacgatatgatgaaaaagttgg

SEQ ID NO: 25562 - DNA, 1802 bp, Oryza sativa
  ref <308>: DATABASE ACCESSION NUMBER: AK101004
  ref <309>: DATABASE ENTRY DATE: 2002-08-28
gcgcgaactgatccccgccgctcgcttcctctctctcacactcgactccggcgagagcacgggggccaaagccggcagagcgcggctagggcttcggctgctccggccatgcgggtgctccccctcgcgctcgccgccgccatcttctccggcgtcaccgccatcctcgtctacctctccggcctctcctcatatggcggcgctagggtttccgatgcggacctggcggcgctgggcgcgctgcagagcggcttcagcaagtgtgtggatgcaaatggtctagggctgaaagcaattccaggagaggattactgtcgagttgtaatacagtatccaagcgacacagattctaagtggaaagatccaaaaactggagaacctgaaggtttatcatttgagttcaatctctgtgaagctgtggcttcatgggagcaggttcgcaatagcacaacaatacttacaaaggagtacatcgatgcgttgccaaatggttgggaggagtatgcatggcgcaggatcaataaaggaatccatctgaacaagtgccagaacaggactctttgcatggaaaaactttcattagttcttcctgagacaccaccatatgtacctcggcaatttggtagatgtgctgtagttggaaactctggggatcttcttaaaaccaaatttggggatgaaattgattcttatgatgtcgttattagagagaacggtgcacccatccagaattatacagaatatgttgggacaaagagtacatttcgacttcttaacagaggatctgcaaaggctctagataaagttgttgagttagatgaaacaaaaaaggaagcccttatcgttaagacaacaatacatgatatcatgaaccaaatgatccgggaaattccaataaccaatccagtatacctcatgctaggcacatcgtttggttcctctgctaaaggaactgggcttaaggctcttgaattcgctctgtctatgtgtgacagtgtcgacatgtatggatttacagttgacccaggatacaaggaatggaccaggtacttttcggagtccagaaagggacacactccattacatgggagagcatattatcaaatgatggaatgtcttggtcttgtaaaaatccactcacctatgcgaggtgatcctggcagagtagtaaagtgggctccaaccaaggacaccattgaagctgctagggttgcttctgagaaactgttgaagagacctggggctggaagcgagggccctttgagctcttgcaccatgataaagaagcgcgagaaagggaagacaccaaaaagatctgttgtccgccatgctgccttgaagcatctggagtacatgagaggtgccaccaggtaccctctggagcggaatgctgggggtggttacctctgcatgatcaacgaaagatagacatatagctgcccatattctaggagtggctgaattcatggtaccatgaagcagaacactgtaccccgatgaatgaatcctacacggataaactattttgagggaacattggtgctcatttttgtacagagccggcagttgagatgattttacgcatgagtagtcacaatgtgttgtaacttacattgaaactacacaagtgttgtgtgatggaatgaacaggtagcggggcagtttgctgcgcaatgcatcgggtcgccaaatttgtcacctgtaactagaagaaatcttaactatgtacatggagcctgtaattcgtttggcagtagacatgcactatttgattggcatgatggcatcacattctggaactt

SEQ ID NO: 25563 - DNA, 2183 bp, Oryza sativa
  ref <308>: DATABASE ACCESSION NUMBER: AK101005
  ref <309>: DATABASE ENTRY DATE: 2002-08-28
gtctctcctctccccctcgcatttgcagttgcagagcaagaagcagagagagaagaagaggaagcagaggaggaggagtccaagaattgaagcaggagaagaggaggtggtggtttgattcaagaagaaggagaagagcaagagcaaggatgttgcgaggagggacgagcttgctggggatcgtcaacttcgtgacgttcctgatctcgatcccgatcctggggggaggaatctggctggcgtcgagggccaactccaccgactgcatccgcttcctgcagtggccgatcatcgccatcgggctcgccgtcatggtggtgtccctcatggggttcgcgggggcgtgctaccgccagacgtggctgatccgcctctacctcttcgccatgttcttcatcgtcgtcgccctcctcttcttcatcgtcttcgccttcgccgtcaccgaccgcggcgacggccaggtggtgatgaaccggcggttcctcgagtaccagctctccgactacaacggatggctccgcgaccgcgtcgccgaccccgcctactgggccaccatcagcgcctgcctccgcgacggccgcgcctgcgccgccatgcgccgcttcgcccgcgaccccaacaccggcatgctcgtccccgagaccccctccatgttctacgcccgcgacctctcccccatccaggtcaccaccacaatctctctccctctctctctctctctctctctctcctctctctctctctcttgattcgtcagttcttgaggagattgactgctgctgcttctgatgcgattcggattttggaagttggcgtagttgtgacgcgctcagagaggggggaaaggaaactgacttcttttttgatttgttcctgtttggtccaaatgaactgaattaataaggagctaaaaatagcggagaatcgatgtgtttttaggcgttctggagttgaaaggttggattcttggtgagttttggatggattagatgggcattagcagtttatccattgccaactacaggtcagtgtagaaaaggctgggattttgtggcacaaaaataagagaggattagggaaagatttgcatttttatggagctctattcatcaattaggggaaagatttgcatttttggggtcggtcttgattggattattgattcaatttgaaggaagggaacaaccacctatactgttttctgatttcttgttgtaaagtttggttaggatattcccagttatcactgcatggtacccatgtggatctcaagatgtgctgctttgcttaccactttcatcagcagccccccttttgcttagcaagtcatatggccctttaaaatatttttgttcctgcatcagcttgcaccttcgagaaattgttaatcctgcaaccttttgcttgcccatgatttggccaaagcagcaagaaaatcacaaacctttagccgcacccgtccttcgattccgccggatacctttcttcaaaagcaatcttttttcttgctttaatagtttattgaactgcttcaaattgcaaggaattttgtctaaattccatgcggcgcgccctaagtacatcctatttagggtgattcagacttcaaatcttgaatgattaactccctcaaagcaatctttgaagtgtgtacaactccctcaaagcagtgtccttttttatggagcaagttggtacctccaactccaggctatgcaccaaaagaaacctatgtgacaagaattgactgcctggtcgatttgagtctttgtctatgtcgtttatttttttccccttaggtgaccttgctggtgcaattgctaagaccaaataatactaagacgtttcagagttgccactattgcagtggtaagaagtagaatctgcaatatgctgtgatgctgaggacaaggtcattttcctagctttttctctcttcttttctggataccaaaagacaaggtggaccacagcattagcatgattgaagggatcggcctctcgcttcttacccaacacaacaaaatgcgatcaggacagctaaaagccggttgctaggtgcctcatttgagagttggaattggaccatggaagccttgccttgtttgtcctttatattctcgttgctgtcttctgtaactgccagtcttttttttttttgctacaatttcacagatcacatg

SEQ ID NO: 25564 - DNA, 1966 bp, Oryza sativa
  ref <308>: DATABASE ACCESSION NUMBER: AK101006
  ref <309>: DATABASE ENTRY DATE: 2002-08-28
ggagtgaaaaatcaaacccgcatatagagagagaggaacagcgaaagaccacgcgtgccatccctccacgcttgtagggtttccggatcggaggagagagccccccacgccgccgcagccatggttcgcggatcgctcgggaagctggcctcgcgcgccctctccgtcgccgggaaatggcagcaccagcagctccgccgcctcaacatccacgagtaccagggcgcggagctgatggggaagtacgggatcaacgtgcccaggggcgcggcggcgggatcggtggaggaggtcaaaaacaccttgaagaacgtcttccctagtgagaaagagatagttgttaagagtcaaatcctggctggtggccgtggattgggaacattcaaaagtggactgcagggtggtgttcatattgttaaggcagaggaagctgaaagcctcgcagcaaaaatgcttggccagattctggtaacaaaacaaactggtccacaggggaagattgtgagcaaggtctacttatgtgagaaactgtcacttgttaatgagatgtacttcgccatcacccttgacaggaatactgctggtccgctcattatagcgtgcagcaagggaggaaccagtattgaagatcttgcagagaagtaccctgatatgatcatcaaggttcctattgatgtattcaagggaatcacagatgatgatgcagctaaagttgttgatggtctggcaccaaagacagctgacagacagtcttccatagaacagattaagaagctctatgaactgttctgcaagtctgattgcacactgctcgagattaatcctcttgctgagacagctgacaacaagctggtcgctgctgatgcaaagttgaactttgatgacaatgctgcctttaggcagaaagagatatttgccatgcgtgacacaacacaggaagatcccagagaggtggctgctgccaaagctgacttgaactacattgggcttgatggagaaattggctgcatggtgaacggtgcaggattggcaatggctacaatggacatcattaagttgcatgggggtacgcctgccaattttcttgatgttggtggaagtgcatcagagggacaggttgtggaagcatttaagattttgacttccgatgatagagtgaaggctattctagtgaacatttttggtggtatcatgaaatgtgatgtgatagcaagtggaatagtgaatgcagcaaaacaggttgacctgaaggtgcctgttgttgttcggttggaaggcaccaatgttgaccaagggaagaggattctaaaggaaagtggaatgaccttaatcactgcagaggatcttgatgatgcggctgagaaagctgtaaaagcatctgtcaaataattaactatttgtagtataccaacatcaagtttattttttgctggcacaagatgagcggtgctcatgacatatttcaggggtctgaagttgggaaccccaaatccttttgaagtggaattattttggcttgatttcccctagaaacattttggtctactgttaataaacctctgtcggcaccaaactgagcaaccacttctttttgccaaagttaaagtggagtttatctgtttttgccttgagcaagagagtacggctttacactttgcatatgcgcgataactgattgtaaagtctgtaacatcttggctataggttatgatgacgtgttatgatcatattgttctgttctaatactgaaatggtattggacgctagctaatgctatgatgccaactaacccttcttttgatgctgaactgtgcactacattgtgccggaaatcaagctgaaggtgtagtcactttgtattacatatgtcacagagcacctgtgtggcttgtgcccgtagtttggcatactttgatttattacgccttcctctcgcgatcgtgaacaaaattgatcagttatctgg

SEQ ID NO: 25565 - DNA, 1606 bp, Oryza sativa
  ref <308>: DATABASE ACCESSION NUMBER: AK101007
  ref <309>: DATABASE ENTRY DATE: 2002-08-28
gggccgtctccgtgccagcactgaagccgccgccgtgcgacggcggcggcggcgccgcctgcccgcgcgcgtcggcgctgcagctgggcgtctacttcggcgggctgtacaccatcgcgctcggccacggcggcacgaagccgaacatctccaccatcggcgccgaccagttcgacgacttccacccgccggagaagctgcataagctctccttcttcaactggtggatgttcaccatcttcctcggcatcctcttctccaccaccgtcctcgtctacctccaggacaacgtcagctggaccgtcggctacggcatccccaccctgggcctcatggtctccgtcgccgtcttcctctccggtacgccgctgtaccgccacaaggtgccccagggtagccccctcgccacgatggggagggtcgtcgccgccgccgtgtggaagtggcgcgtcccgctccccgccgactccaaggagctccacgagctcgagctcgagcactacaccacccgccgcgggttccgcatggacgcgacggtgtccatggcgttcctgaacaaggcggcggtgaagccgggcgaaggaggaggaggatcggtggcgcggctgcccgggtggacgctgtgcacggtgacgcaggtggaggagacgaagcagatcgtgaagctggtgccgctgctcgccacaatggtggtgccgtgcacgctggtggcgcaggcgggcacgctgttcgtcaagcagggcgtgacgctggaccgccgcatcgggaagttccacgtgccgccggcgagcctcggcgcgttcgtgacggcgacgatgctcatctgcatcgtgctctacgaccggttcctcgtccccgccgtgcgccggcggaccaagaacccgagggggatcacgctgctgcagcggatcagcctggggatgctgctccagatcgtgacgatggtggtgacgtcggtggtggagagccagaggctggggtacgcgaggaggcacgggctggtcgccaccggcgggcagctgccggtgacgatcttcatcctgctgccgcagttcgtgctgctgggcgtcgccgacgcgttcctggtggtggggcagatcgagttcttctacgaccaggcgccggagagcatgaagagcctcgggacggcgatgtcgctgacggcgtacggcgccgggaacctgctgagcagcgccatcctcgcggccgtcgagcgggtcaccggcggcggcaaggggaggacgccgtgggtgaccaacaacctcaacgcctcgcgcctcgactactactacgcgttcctcgccaccctcgccgccgcgaacctgctggcgttcgtcgtgctcagctgcaagtactcgtaccgcgtcgagtccacggagaccatcgacgtcgacgtcgccatggacaacgtcgcgcagggcggcggcgtggtgacggtcaaatcagaggcagccccaatggcatgacagcacttccggaattgtatcctgtctattcccgtctggattctgaagttgcaatgtaatgaagaaacggtgatgatacatattagcactttaaaaatgttaaatgaaaattttatttactcgttctgtaaaggaacggt

SEQ ID NO: 25566 - DNA, 1674 bp, Oryza sativa
  ref <308>: DATABASE ACCESSION NUMBER: AK101008
  ref <309>: DATABASE ENTRY DATE: 2002-08-28
gagtgcgatgcacacacgcagccgtcggcttggtttcccccccctgaatccaagtcacctcctcctcacacctcaccttccccctctctcctccgatcgcgcgcgcatggcgatgtcacgagccgccgccgctgccgcggggactcccgtggcgcggcggcgattgatgggggccgtggcggcgaggtcgatggcgtcgtggttcggccacgtggaaccggccgccaaggaccccatcctcggcgtcaccgaggcgttcctcgccgacccctccccggacaaagtcaacgtcggcgtcggcgcgtaccgggacgacagcgggaagcccgtggtgctggagtgcgtgcgcgaggcggagcggcggatcgccgggagcatgaacatggagtaccttccaatgggtggaagcataaagatgattgaagaatcacttaaactggcctatggggagaactgtgagttcatcaaggacaagaggatcgcagcagtgcaggctctttcaggaactggtgcatgtcgcctctttgcagatttccagaagcgtttcttgccagattcacagatttatatacccacacctacatgggccaaccatcacaatatttggagggatgcccaagtaccacaaaagacatttacctattaccatccagagtcaagaggacttgactttgcaggcctaatggatgatatcaagaatgctccagatggttcattctttttgcttcatgcttgtgcgcataatcccactggagtagatccttcagaagaacaatggagggagatatctcatcagttcaaggtgaagaaacattttccattcttcgacatggcataccaaggatttgctagtggtgatccagagagagatgccaaggcaattcgaatatttcttgaagatggacatcaaattggatgtgcacagtcatatgcgaaaaacatgggactttatggacaaagagcaggatgccttagtattctatgtgatgatgagatgcaagcagttgctgttaagagccagttacaacagattgctagacctttgtacagcaacccacccgttcatggtgcattaattgtttcaactattcttggtgatccggagttgaaaagtttatggctgaaagaggtcaagggtatggctgatcgtatcattggaatgcgaacagcactcaaagagaaccttgaaaagttgggttcaccaatgtcatgggaacatatcactaatcagattggaatgttctgctacagtggtatgacacctgaacaagtcgatcgcttgacaaaagagttccatatctacatgactcgtaacgggcggataagcatggctggagtaacaacaggaaatgttgcctatctggctaatgctattcatgaggttaccaagacaaagtgagagtgttggagacattcctatcatcattttcagtacctttttaccgaccgcaaaatgggtcaaatggtgaaataaaattgtagtccgatatgatgtgaaataaaatggctggtaagctagaaaagggcaagtttattttttgaggacaagacttttgctgtaccagtgaaaacattttttaggacaagactttacagttagaacgaacgttctaactgtgacagtgtcatgctttgtaaaggaagtgtacctttccaccgatgggcatttttgat

SEQ ID NO: 25567 - DNA, 1825 bp, Oryza sativa
  ref <308>: DATABASE ACCESSION NUMBER: AK101009
  ref <309>: DATABASE ENTRY DATE: 2002-08-28
ggcacgttagcaatagggttctttcattttccccaaaaaaaaatccaaccctattaagtttttttttatttaaacaatcaagaaaagaaaaaaagagaaacaaagtttcatgacaaatagtatatagttatagacaaagagaataatatataggaagatatatatccatggatgaccagaggctccagtggaggaagcccggctccttcctcctcgtcgccggcgtgttcctggcggcggcggccgctgtgtcgaacgccggcataggcgagttcgacgagcattgggagaagcgcagggcggcggcggaggcggcggcggaggaggtgtacaaaccggaccccttcaatgtcaccaacgagttcaaccacgctgtcatcagatcgacggagcgcggcgttctccggcgagagttgagtgggaagaacagcaagtacaaggggccgtgcctggcgacgaacccgatcgaccggtgctggcgctgccgcaaggactgggccaccgaccggaagcggctcgcccggtgcgccatgggcttcggccgcggcgccaccggcggcgtccgcggcaagatctacgtcgtcaccgaccccggcgacggcgacgccgccaacccgcgctacggcacgctccggtggggcgccatgcaggcggcgccgctgtggatcaccttcgccaagtccatggtgatccgcctcacgcaggagctcctcgtcgccagcgacaagaccatcgacggccgcggcgcgcaggtgcacatcgcgcgcggcggcgccgggatcaccgtccagttcgcccgcaacgtgatcatcaccagcctccacgtccacgacgtgaagcacagcgacggcggcgcggtccgcgactcgccgacgcacatcggcccccgcacgcgggccgacggcgacggcatctcgctcttcgccgccaccgacgtgtgggtggaccacgtctccatgtccatgtgcgaggacgggctcatcgacgtcgtgcagggctcgacgggggtgaccatctccaacagccacttcaccaaccacaacgacgtcatgctgttcggcgccagcgactcgtacccgcaggataaggtgatgcagatcaccgtggcgttcaaccacttcggccgtgggctcgtgcagcggatgccgcgatgccggtgggggttcttccacgtcgtcaacaacgactacacgcactggctcatgtacgccatcggcggcggcatgagccctaccatcctcagccagggcaaccgatacatcgcccctcccaacatcgccgccaaactgatcacgaggcactatgcgccggagtgggagtggaagaactgggcgtggcgctcggacggagacctgttcatgaacggcgcctacttccaggcgtccaacggcgccatcaacaggaaggtgaagggctccgacatggttaagcccaagccaggctcctacgtcaggaggctcacacgcttcgccggcgcgctctcctgccggcccggcgagccgtgctgatccgccggcgagatgacgtcacgtaggcatgcagcatgagcgaccacggagatcatcatcatcaagaaaaaaaatataatggggaaagaaaattaaacatttggacgacatagaagggtgacaaatggaagggtagccaggttaaatttcctgtccattttgtcttgaaattgagtgaattttggtatgttcgtattttcaagaggggccagggattatccacaacatgtactatctctatgtatagtgtaatacagcatggatgtaacgattgctctttgcgatcaccaatgaccaaaaaaatgtaaaatattgtt

SEQ ID NO: 25568 - DNA, 4137 bp, Oryza sativa
  ref <308>: DATABASE ACCESSION NUMBER: AK101010
  ref <309>: DATABASE ENTRY DATE: 2002-08-28
ggtcctccttcttccccaccgccgcgccccgctcttccccacctccttcttcccagatcgtgcttctcccactcggatcagccgccgccggagccgactttggccccttctccgccgccggaaccaacatcgacctcagcccgcggccgtccttcttcttccccaccgccgcggctgtcctcctcacgggcttctcctctgccccgctgccggcgctacgccgcgtcctcgccggagccgccgccgtatcgttcttctcccactcggacccgtacgaatctccgtcctccaccttcgccgctcgcccctctctctctctcttcgcccgcgactccatcccctccctagccgctgccctcacggcctcgccatcgccaatccctccatgccttctcgggctcatggtggaggggcaggggctgccttcggtggagagttacagccgatcccccatcaacagcgcccgcgagtgaggatcaagccgccgttatcgagccaaatcaggcggacaagctgagctgacggtgtatacgggaggtagagatggacaccagcgacggcggtgcgttcgataagtgaccttgatagcatgtggcgggagaggatcggcggtggcgcctgagatgtcgacagggaacatgcttgcagatctcttttccatcaatggctaccacgagggtcttcccatggtgcttgcccacattgccacctacgccgcgcttgctcttcccccaactgtcgacgcccggcaccatagccgccgaggccaagaagatctggaccatctggtcatctttggcgccatgaatccggccacttccgccaacggggctgctgccatcatcgacccgccgtctagcacggttcaatgggcatcatcacacgcctatgcttcatgtccttctttactagcaggtcatcaggtggagaagccatccatatgctaaataggtctcaagataggagtgagcagcaagttcggttttcattgggccatactcctcatctgaacaaacagccatcatggcccagggagtataaagttgaatagagccaatggatgctgtggcggttgcgatgacggtagctcaacaatggcactgggcgtgcactgggaggtctgctccccagtttggcactccttgtggtaagggaaacgaggagaaagaaatgacgaccaacaggttgtgaaagacaccaacgacctgcatcacgcaaataaacaggtatttattattttggttagtttagtttgttgtgcagacattaattaaggctaggggtaggggttgaagacttatggatgaatccggtaccgtaaccttcacatttgaccgttcattagtagctaaatggacggctaccatgcatctgatacatcaatctgtaggctaatgacatatcttgagttatagcgatactttctttaaacaattgctatctttttatgtactgaaatttgcataatccttatgatgtgtttttctttaatcatctttatgtaattaatacatgtagaggataagaagagagatgattagcttctgcatttctgagatgtgaatatctaattaggtatccagatcctaagaaaaaatatcttcagagaatagtatcaagcaaatattaagagaaagcagtgagcccatttttttttgggtatttcataccattaatcgtagcattcggcagttctgcagttatgtatactttgcacttctattgtgcaaatgttatgttacaatatatatgctgttctgaaggtccatgacgaaattcttgctgcaatcagggaaaaagaggagggacctctccatttgaaatgctctaggctacataaaaaactgacctattcatatgaaaccttaagatagtacatattattattagacaatatgttggtcttttcttgctaaacctgaattgttctattggtgcatagtggaattagtaagattggtgtgactaagtagatatatttgaagtgtatacatttttattaagtcaatagacaatgtttcagcctgcagtgatcgacatattcaggtgtcagtaaagaggcacaacatttatttgcttactggattacttctagacaaggtttgcttcttgcttttctatgactgacatgttgtagctccgctaaatgaagtattattacaattttaatggagcattatgatattagttatgctgatttaaaatgcggtaatctattgctttagacatggtaacatacatgatgaattgacctcttgttatagttttagtttcatcatgattttttagaaatatatataatatatgaatattcacaatgcaacatcctctgccttttcttctttggatatatcacacggagataaaagggaattattaatatgttagattgtgctatcagtgttgatgtgaaacaaagttatcactggtattttttatcatggatttctattttctaatatccgtttcctatctaaccaaaggagggaacaacaatcggtgcatgatctctctacctgatttagacagataacactatcaaacacaacttgcatgggatttctatttttctgttggtcatgtgggttagtaatgaggcatgagcaaaatttttcaaatttgattactataaattactgttactctaacatccctactcatgttagatgatgttctgaaaaagattctagcatgtatagctttatgtgcaatgcctcttgaggatgctgcaggttgtgtattttctgaattatttgtagtaaataaccatacacacatggattcttctttatgtttcttcatgcaccattgaaactttgatgtactagcagccagggagttgccattttcctttctacattctgatggaggtaaactcaacatatatgtctatgtgaaaccatgtcattaatatattttggcgtatttctgatataatacttaaaacaagtgcttatcagttttatttcgagggattaactgaatctggaaaatggaggacctagattttctaaagggtcatctgataatatatgttattgaacaagtgtgatctttctttatttttgctaattgattgataccttgccattttttaagttctatttcctgtaccaatttcctataatcaatgtagttttttttttatttacataagtctctcaaaggtattgtcaagcttctgaccatgttaacattgaggctgccttgtaacagtgtacctctcctcaaatatcagaaacatggttgcaagagtccattctaaaatgcatgatggccacaaagtttgtttgctccaaggccacaaacagtgtctcaaaatgtagtataaatttgtatgatcttccctctaaattctaaacacggtttttgacaactgacaagtatggataaaaaattcgatgcctaaaaatatgcaggagcctcaagtgatatctttagaagggatgagtttattgtaataaacatgaatatatgatgtaggcttagacattatttctagattgacattttaatttctatataatacatgattcatgagtttgaaatgtatatgtagttatttatattttgtttttgtctcatgtgacatcgatttcatgcataggcatattttttgattctccttatgctattacaaagtaccgtgcattcggattacatatttgtggagacgtgcattgcacgtgcatgattactagtaggagaatctaatcctaaactaatcttttgctctattacttttcaggccatatatacatatcttggggagtaatagatgttccatgtgtcaatgcatcaactaaaatacctgatgaacatgtataagattcttaggaaattacatatgcaacagccaactttaattttttttctcagcatctcagggcattattttcatcaagatttttggcctacgctaatgactgatgacaaggatttcgattccaacaaggacctttgttgattgcggaaatgctgaagatacattgaaactatttgcttgaataaacatagatggctgtgtggggtaactttcatctttacataattcagctttcctagaattattcgatgtcttagtacatgaccttgcaataccttatggttactgaaaaatatatgtcgtacttttgc

SEQ ID NO: 25569 - DNA, 2169 bp, Oryza sativa
  ref <308>: DATABASE ACCESSION NUMBER: AK101011
  ref <309>: DATABASE ENTRY DATE: 2002-08-28
gctttaccccctcccatggcgtccctcttcagggctcgccgccggcgatcgccggaggacgacggcgagggggaggacggatccgcgtccgggcgggtcacccgccgccgcctgtcgccggaggagggcgcgctgtcgctggccgaggcgtcggcgtcggtggccgcggtgggggcgggggcggagagtagccccgggtggctctccagcatcgtgtccggagcgaggagggtgatctcctcggtgttgttctcctctcccgaggaggccgcctcaggggaggaggaggaggacgacgacgaggaagatgaaacagaagacaatcatggagcaatagtttcatacaatgagtcaaagcttgccattgaggaaatggttatgaaggagacattctcaagggatgaatgtgataaaatggtaaagctcatacagtcacgagttacagatgctgcacttcctgaagcacctgagtatggaacgccgaaagaaattccaaccaggaatactgttgttggaaatgatttcacgggagcttggcgttccttgagtcgccacagaaatggcactgaaccagttccattctctagtattggatctggtagcttttctcctggttctcctctccatgcatcgcccgagctattaagcgcagcagttatggaagcaaagaaatggttagaagagaaaaggcagggattaggttcaaagcctgaagaccatggaccttgcacattaaacactgatatgcttaactctgggtttgaatctgacatgggttctccagttgatttagcaaaatcatacatgcagtcattgcctccttggcaatctccattcttaggtagccagaagtttaaaacaccaccctctgctgggttacatatgtatgattatgaagggaagtccaaatattctctcccctcatcaaaggtcaccaccaaggaagaatatctttccaatttttgggaaaatttggaggaatctcgtaggtctcgcctgggatcatctggaagttctccagatgcttctaaagtcaggcagtatggttctacttccagattgtttgagaatgatacatctatattctcatcgggtactgataagaaagttgacaaacctgagcaaaataataaaggttctgataaggttgcaggagcagaaccggctaatgggcactcctcacctatcactgataaaaatcatgtgtttgttgatcctgtggaccctgcaaatgacatagggaatgttgtcaaagaatgcaatgctgcatccaaagttcatatagaggagatatcacaggggaaccaaatatcttccacaagtgttacaaaggatgctgaccgtgatggggatgttaaagctcctgttgcagaaccggaaattcacatggagtcagatataaactcagcgtcagagttgagaacaaaggatacaggtccccacatccatgcgagcttaaatgggtcgaccaaaaaaacttctgccaatggccttcgggatcaatcaaatgccaactcgggggtagaatcttcgggcaatgataatcccagttgcaccaactcgagcaccggtgtgcctcccaccaataacgaggttaatgatcctaaagctgatgccgcagatggtgattctgtggagaatggcacacgattgaattcagaagaacctgcgcaggtagacccaaaaccagcctacgttcggcgaggacggaaaagggtggtccgaggcacgagaggaagagcaaagtagaagagcatctactgcacccacaattgtttgtataccactaatattaacggcccaaatgggtggtatgataatgatacctaggttaactagagttagcattgatcggtggattttatcgtgcacccactctttgtacccatgttgtattattgtaggcgtcatactgactacgtttcacgatttggatgtgattactaggactggtagatgcctccttttttcttctcagtgtaaaacttatgagtagtttgtgcagatggaagaacaaatggtttgtttgtagtattgttgtagcagtaaatggctagccatctaggtgactagagatgtactacttcagtatcatgcagcgctggacgctgaggattctcgacatgtaaccagtatttcgtactacggatattctattcattgtgtggt

SEQ ID NO: 25570 - DNA, 3252 bp, Oryza sativa
  ref <308>: DATABASE ACCESSION NUMBER: AK101012
  ref <309>: DATABASE ENTRY DATE: 2002-08-28
ggcgcgcgggtgcgggcggccggcgtggggtgggagggggactggtgagtgacgcggcgccggaggaaacgacgcgacaaaagtggagccgccgcaaacggacaaagctaccttacccggcgccggctccagcgatcagcaccgccgcagacgcccgcatccgccccatcgccttctccaccgtgccgtagcccggccgcacaagtcgccaccaccaccaccgcaccctcgccaccgcatcccatatccctccgccgcgcgcggcatgctgatcccactcgctcacctcccacgcccaccaccactcaccgcctccgctatatttcgcccccgcgcccctcgcctcctcgcctcgctctcgctcgccacccctcctcctcctctacttgcagcttcagctttcgcttcgctgccgctgcgggcgctgctctccgagtcccagcgggaggtggagatggtgggcgaatcggaggggaggccgctccgggttggcctcgtctgcggcgggccctccccggagaggggcatctccctcaactccgcgcgatccgtcctcgatcacattcagggggaggacttgctggtcacctgctactacatcgactgcggcatgaacgcctacgccatatcacctgcgcagctatattccaacaccccttcagattttgatttcaaacttgaaagtctagcccaaggattccaatccctatttgactttgcacaacatcttgccgcaaatgttgacattgtcttcccggtgatccatggcaaatttggtgaagatggtggtattcaggagcttttggagaaagcaaatgttccatttgttgggacaccctctaaaaattgcctccttgcttttgacaagtataatgcatcgcttgagctcaatgcacaaggctttttaacagtaccaaactttcttgtagagaaggacaaattagctaagtcgaaactggaggaatggtttcaaagcatcaatttggataaagaaaatggcaaagtagtggtcaaacctacaagtgctggatcgagtattggtgtagttgttgcttatggtgctaatgatgcagctgagaaagccgagggaataatttcagagggaattgacgacaaggttatcatagaagtttttcttgaagggggcactgagtttacagccattgttgttgatgttgggacagctaataacagtgagcctgttgttctccttcccacggaagttgagcttcaatcctccagtaatattgatattcaggaggatacaatatttaactaccgtcggaaataccttccaactcgacaggttgcttatcatacacctccacgatttccgtcagaggtgattgattgcatcagacaaggagtgtctattttatttcgttgtcttggcctgcgtgatttcgcgaggatagatggttggtttttacctactcccgttacctctctaccttcagctgaaaatactggtaaatttggaaataccaaatacggtgctgtcctttttactgacattaatttgatgactgggatggagcaaaccagctttttattccaacaatcttctaaggttggattctctcactctcgaatccttcgtacagttgttcagcatgcttgctcgcggtatccgtctcttgtaccatgcagtaatgcatggactgctttgtccagaaaaatacaagcagcaaaacaagcagaagcaatccaaaaaggtacatccaaaaaaaaggtctttgtgatctttggtggtgacacttctgagcggcaagtctctcttatgagtggcacaaatgtctggcttaatttgcaaggttttgatgatcttgacgtgacaccttgtttgcttacatctggaaatggttattcttccttccacaaccaaaatatgaatggaatttcacgtgatgtatggacattgccatattcgttagtgctacgacataccattgaagaagttaatgccgcatgtattgaggcaattgatccagaacggatggaattaacatcccgtttacgtgaccaagtaatgaatgaacttggacagtcattaagcaaatatgattggtttgcgggctttgacattgccgataagcaacctatcaaatactctcttcaacaatggatcaatcatgttaaggaaactcaagccgtagtgtttatagcagtgcatggtggtattggagaagatggtactattcaatcgctgttgggatctgcaggagttccttacacagggcctggacaaatagcttctaggacatgcatggacaaagttgcaacttcacttgccgttagccatctggctagctatggagttcacaccataccaaaggatctgagagcaacagaagagatactaaagtcgtctcctgacgatatctggaatgacctgaaagcaaaactacaaactgaaacggtttgtgtgaaacctgctcgtgatggatgctcaactggtgtggcaagattgtgttgtccgaaggacttggaggtatatgcaaacgcattggagagaaaattacagcgcatgcctgctaactgtttatctagggcacatggtgtcattgagatgccagtctctcctccagagtcactgatatttgaaccttttattgaaaccgatgaaattatcatttcaaccaaatcagtggatgatagcacccgacatctggtatggaagggggaaaataaatggcttgaagtgactgttggtgtagttggcaaacgtggagaaatgctgtcactaaatccaagtatcacagtcaaagaaagtggtgacattttatctcttgaggagaaatttcaaggtggaactggaatcaacttgacaccacctccttcaacaattatgagcgaggaagccctgcagaagtgcaaaagttgtatcgaaactttggcaaacactctcggattggaaggcttttcaagaatagacgcatttgttaatgtccagaatggggagatactgctgatagaggtaaacactgttcctgggatgactccatccactgtactgattcaccaggcactgacggagaaaccacccatctatccccacaagtttttccggacgcttcttgatctggcgtttgcaagggcgaactagctaagctactactgtaactatgtttgtgatgtattttcatttcagtgcaaataaggtgcctaccatgcatgtatcgatctgtattactgtatgcaatatgcaactgccgatgtgatgtgatcagtactgtaccgtgttgaaggatt

SEQ ID NO: 25571 - DNA, 1875 bp, Oryza sativa
  ref <308>: DATABASE ACCESSION NUMBER: AK101013
  ref <309>: DATABASE ENTRY DATE: 2002-08-28
gagagtggtgaagcgttggaagggatgctgatgtcgcggcggctcgtgcccgccgccgccgcggcgaggatggcgtcgtcgtcgtcgtcggcggcggcggcggcggtgtctggtggtgcggaaggtggaggtggggaggggaggggaggggacacgctggggaggaggctgctgaagctgatctacccgaagcggagcgcggcggtggtgctgcgccggtgggcggaggaggggcgcaccgtgcagaagtaccagctcaaccgcgtcgtccgcgagctccgcaagtaccgccgcttcaagcacgccctcgagatatgcgagtggatgaggacgcagccggagatgaggctgcttcccggggaccacgccgtgcacctcgacctcgtggccaaggtccgggggctccccagcgccgagaagttcttcgaggacatgccggagcgcgccaaggggccgtccacctgcaacgcgctgctccacgcctacgtgcagcacggccggcgtgacaaggcggaggcaatgctggaggagatggccaaggctgggtacctcacctgcgcgctgccgttcaaccacatgatgtcgctctacatgtcgagcggcgagcttgagaaggtcccggagatgatcaaggagctcaggaggtacaccatccctgacctggtcacctacaacatatggctgacatactgctcgaagaagaacagcgtgaaagccgcggagaaggtctacgatctgatgaaggatgagagggtggttcctgactggatgacattcagcttgctgggaagcatttacatcaatgccgggcttcatgtcaaaggccgggacgcgctggtggagatggagaagagggcctctcggaaggagagagccgcgtactcctcattgctcaccctgtatgcaagcttgtcggatagaggtaacttggacagggtgtggaggaagatgagagaaaccttcagaaagttcagtgacaccgagtacaagtgcatgctcacttcgctcacaaggtttggcgatatcgcagaagcagagagcttttacagcgaatgggagtccgcctcaggaacacgcgattcgaggatcccgaacacgatcctcgcattttacatcaagaacggcatgatggaaaaggctgagggtttcctcgatcacattgtgcagaagggtgtcaagccaagctatagcacttgggaactgtttgtctggggctatctcagcgatggcagaatggacaaagttcttgagtgcctgaagaaagccctgtcatgtctggagaaatgggatccaaaccctcaactcgcgacggcgatatactctcagattgaggagaaaggcgacatcgaagctgcagagaagctcctggtcatgttcagagaagcaggatatgtcacgaccgagatctataactcggtcttgcgcacttatgcgaaggctgagctgatgccgctgatagttgatgaacgcatggatcaggataaggtctcaatggacgatgaaacaaggagtttgctgagattgacaagcaaatacccgattggtgaagtttcgacattgatgtcttgagatgttgcaagttcgggcaatgaattttcagtcctacaggatgcaatgtgctgttaattgatttccaatcacaagttattgctcccctgtatttgcagttttgaactcgaaagcaaagtagcgaggatagactgatacaaggttagtgggctggaatttgtgaatattagcaagttcggtcatgagtctgtataagcactacctgctcccttgccttctgactatctggcgcggctagatagcacaattcgcaacaagttactgctctttgtttttgaaaacagatacagataacaaatcgtgcgc

SEQ ID NO: 25572 - DNA, 1877 bp, Oryza sativa
  ref <308>: DATABASE ACCESSION NUMBER: AK101014
  ref <309>: DATABASE ENTRY DATE: 2002-08-28
gggatccgccgctcgccgacgcctccgacgcagggggaggagctactggcggcgtcgccggccgggccgcgcggcgggaggaagggacgggcggtggtgctgccgctgtcagccgcggcgctcgtggcgtgcgcggtcgtcctgctcctgctcgccgggggctccgcggcgcggaggggacagttcgtcggcgctgatcctaccgtcctcccatcacggggcggtggcgttggcgacttgcacctgtcccagtcgaaatcgaacgatggagaaaatgtcactatagcatcttcggaagttgtcaacgacaaactactgggtggtttgttaactactggatttgatgaacaatcatgtctaagcagatatcaatctgtactataccgtaaagcatcatcccattttccatctgcatatcttctggagagactaagggaacatgaggcacttcaaaagaagtgtggtccacatactgaatcatacaagaaagctattgagcagctaaaggctggacagggggctaaggttatggagtgcaactatttggtatgggtagcttacagtggtctggggaacaggatcttgacaatggcttcagcattcctgtatgctatcctcactagaagagttttacttgtcgacagtgataaaggcactgcagatcttttctgtgaaccattccctgaaacatcatggttactaccgccaaaattccctattaagcagttcaagaatttcagtaatggttctcctgagagttatggaaacatgctgaaaaacaaagctattcgttctaaccctgcttttctttatcttcatatggctcatgattacagtgactatgataagctatttttctgtgaagataatcagcaatatcttcgaaatatcccatggctgatcctaaaatcagataattactttgtaccatcacttttcctgattccagcatatcaagaggaactcacaaggcttttccctcagagagattccgttttccatcacttgggacgttacttgtttcaccctagcaatgttgtgtggggcatggtcacaaggtattatgattcttgtctagccagagctgatgaaaggctgggtatccagatcagagtctttgatcctgaaccaggaccatttcagcacgtcttggatcaggttcttgcatgcacgctaaaggaaaacctattgccagcaatcaacagtaaacagccaattgtctcaacaaggcattctagattaaaatctgtcctaatcacttctctgaattcaggatactatgagaagatcagaagcatgtactgggaacatccaaccacgaacggtgagatgatcagcttccaccagccaagccatgaggaacatcagaactcagacaagaaaatgcataacatgaaagcatgggctgagatttatctgttaagcttatctgatgttatggtcaccagtgcttggtcaacctttgggtatgttgctcagggtctcagtggtttgaggccatggctattattcaagcccgaaaaccgcatcgcacctgatccaccttgccgtcaagttttgtccatggaaccttgctttcatgctccacctttctatgattgcaaagcaaagaggggagctgatactggaaagtttgtcccatatgtaagtcattgcgaagatatgagctgggggcttaagctagtcgatcagagtgagtggtagatgtagtgtcctttattttgttcagttcatatatgtacagtatgtgccattttttttatgatataggttaccttgtatctaagttataggaaagccatttttgacatggttaacacaaatgcagtggtttgaaccactgcatttgtatacataatcccagtgatgttcttgtg

SEQ ID NO: 25573 - DNA, 1679 bp, Oryza sativa
  ref <308>: DATABASE ACCESSION NUMBER: AK101015
  ref <309>: DATABASE ENTRY DATE: 2002-08-28
gagtataactcgacgcccccactcgctctctcccccaacccaatgacagcatcagtattccagtagcagcggagagagagagggagcggccaaccaaaagcccaagccaagccaacgccgcgtcgcgtctcagccagccagcgaactgcctccccgccgccgcgctcgccggcgaactccccccacctccggcggcccggcccggcccggccccgcctcgctccccggcatcaggtgtgaatatgtcggacagtgcgttgaaagatctgaatctagctcagtcagcagagctggagaaaaccaaggacagttctgccaagtcttgcatcaccaagcctgtcttgaatggcaacaaatgcaacaatacggaagaaaatgctccacctgtactccctgatgctgtgactaatgggtgtgaagctggaaatgcagatgttgagtatattgattctgagagtctgacagatcttgaagatgctggtgcaacccttagtactttagttgcaaggttggattcaaaagactgggttatgacatgtgaagctctaaataatgttcgtcagttggcaatatttcacaaggatagattgcaggaacttctgtttattctcttcgattgcttgtatctcaaaacactcaagaatccaaggagtgctgcctgtaaagctgcactcatgacctgttctaatcttaatttttggatttgaattacagagagcctctagttcctcttattgtgaaatctgtcaagaatccaaggagtgctgtctgtaaaaccgcactcatgacctgcgctgatattttcaaggcatacggtgacctaatggttgactcaattgatccactgttagtgcagctatttctgaaatcttcacaagataagcgttttgtctgtgaagctgctgaggcagccctcatatcgatgacaagctggatcgccccttctgctctgttgccaaaaatgcaaccttaccttaagaacaggaatccacgaattcgagcaaaagcatcaatgtgcttcagcaagagcgtcccaagcttgggtgtggagggaattaaagaatatggaatggataagcttgttcagatcgcagcaactcagcttagtgaccagcttcctgaatccagggaggctgctcgcaagctggctttggagctacaagcattctatgagaaatcccaagcttcgagttctggtgaagttgacgacgcacctgctacctcacctgatgctgatgctgatgctggtgctgaatcatgggaagctttctgccaatcaaagctttccccattaagtgcacaggcaatccttcgtgtcacctctacgacgaaagagggtgtggctgtgggtgtcacctctacccctccgaaagaaggcgtcactgttggttgctagcatcaggaggtagtagatgcaatgaggttgtggtttttccatccgattcaccttttgctgtacatggttatggttgttctttctctacatccaatctgggattcgttcgttaagcatcggttcgagagttgaggtgtgacctgtgggtgttaatattggtgcgagatatacctgttatagttgaccgtatgatcttccttttctcccactgcttggtattgattggtcaggcgaattgtagaatttcttccactattcaatattactacacagtaatttttcc

SEQ ID NO: 25574 - DNA, 1759 bp, Oryza sativa
  ref <308>: DATABASE ACCESSION NUMBER: AK101016
  ref <309>: DATABASE ENTRY DATE: 2002-08-28
gatactcgattcgatagtgacaagaggaaaagcgcggctctctccgtctccggcggcggtgacgcgaggaggaggaggaggaggagcccgcgccgccgggccaagccatcatggacgaggagcagctgcgcgcgctgctccgcgacctggacgcgctcaagcagcgccccgaccccgccgccatcgatcggatgcgagagcgcgtggcgggaatggtgacctcggccgccgctgcacggtccaagatcaaggatatgagctcggaggtggtggacagcaatccctacagcaggctcatggcgctgcagcgtatggggatcgtggacaactacgagcgcatccgtgattactccatcgccatcgttggtataggtggcgttggtagtgttgctgctgagatgctcactagatgtggcattggtcgccttttgttgtatgactatgatacagttgaactggccaacatgaataggttgttctttcgcccagaccaggttggaatgaccaagacagatgctgctgtgcagacactatctggaataaatcctgatgttacgttggagagctattcattaaatattactacagtgaaaggatttgaaacatttttaggaagtctcaaagccagaagctctgatgggcgtaacactggagttgatcttgttttgagctgcgttgataactatgaagctcgtatggttgtaaaccaggcatgcaatgaacttggccagacatggatggagtctggtgtctcagaagatgctgtttctggtcatatacagttgctggttcctggtgaaacagcatgttttgcatgtgctcctccattggttgttgcatccggagtggatgagcgcacattaaagcgggaaggtgtttgtgctgcctctttaccaactacaatgggtgttgttgctggtctccttgtccagaatgctctgaaatatttgttgaagtttggacaagtttccccttacttgggatataattcacttaaggattatttcccaacaatggaaatgaaaccaaatccacagtgttcaaatccagcatgtgttcagagacagaaagaatatatgcagtcaaaacctgctagagatgcagcagcaaaagctaagatggaagctgaagcatcagcagcagatgaatgtccggtccatctagataatgattggaatattagtgttgtcgatgacagtgacacagtgacaccaagcattctaagcactggagctgatagcctcccagaaggccttgtccgcgaactcccaactgcagattcctaccaagaaccagttgctccagttacatccggggctattgatgacgaccttgaggagcttcagcgccagcttgatgccctaaactcgtcttaatgttttgtaaaagctggaccgtcatcattaacttggtttctaccaaagctcaacactgggttagaaaaccaacctgggtactgatgcttgtgtttactccgacagagttacccatttcagtggatatagcttctgttcataccaaagaggttgaagggttttaagttacttacctgtactgttttgagcttttgtgtacaattttgccttgagttaatgtagattttatgaggctggaaaattcactgttaactaatgtggacgctctgctaattaccgataatagttcaaaaagaaaagtagaaggcattcgtccagaactgtgatgtcatgctgtaataggcttttgccagtgctgtccgtaaacctcaataagcttagct

SEQ ID NO: 25575 - DNA, 1558 bp, Oryza sativa
  ref <308>: DATABASE ACCESSION NUMBER: AK101017
  ref <309>: DATABASE ENTRY DATE: 2002-08-28
gtctccacgtctccacgccgtcgtcgtcgacctcaccggcggctgcctccctacccccacctactccggcggcggcgcggcggagaagcacatcacatcatggctcctcctccgcactcggactctgacctgctcaagccgagagacgtctgcatcgtgggcgtcgcccgcacgcccatcggcgccctgctcggctccctctcctccctccccgccaccaagctcggctccgtcgccatccaggccgctctcaggagagcaaatgtggagccggcgctcgtgcaggaggtcttcatggggaacgttctcagcgccaaccttggccaagccccggcgaggcaagccgccctaggcgccggcttgcccgacactgtgccctgcgccaccgtcaacaaagtttgctcctcggggatgaaggctgtcatgcttgcggcgcaggctattcagcttgggatgcatgatgttgttgtcgctggtgggatggagagcatgtccaatgcccccaaatatgtcgcggcagcaagacgggggtcacggtttgggcacgacgtcctcatcgatgggatgctcaaggatgggctgtgggatgtgtataatgatttcccaatgggaatgtgtgccgagttgtgtgcggatcaacactccatttcaagggaggagcaggatctttatgctatccagagcaatgaacgtgcaatagcagctcgtgatagcggcacattttcttgggaaattgctccggttgaaatttcttccggtagagggaaaccaccacttattgttgacaaggatgagagtcttgcaaagttcaattcagcgaagctgaggaaacttgggccgactttcaagaagaatggttctgtaactgccggcaattcttctagtataagtgatggtgctgctgcaatcgtgctagtcagtggacagaaagccaagagtcttggccttcaagttattgcaaggatcagagggtatgcggatgctgctcaggcacctgaattatttacaactactccagctcttgctattccaaaggctgtatcaaatgcgggtctccaaacttcacaaatagattattatgagataaacgaagctttctccgtcgttgctttagccaaccagaagcttcttggtattccttcgggaaagcttaacctaagtggtggtggtgtttctctgggccatcctattggttgcagtggtgcgagaatcatagtcactttgctcgggattcttagacataaaaatggaaagattggggttgctggagtttgcaatggaggtggtggtgcttctgcccttgttgtggaactcatgcaaccatcactatttacacgttcctcgttgtgaagttggcgcgagcaaaaatagcacaaagctgaactgtaaagtacagtagctctatgttttcatcttatattacttaattttactgggcgttcatccatgatgtacaatgatagaaggaacgttgtaaaaataagatggctgtgcactaccgcacgagtcttgtataacttgtatagcggccatagcaataataagggaaaagaaggcc

SEQ ID NO: 25576 - DNA, 1712 bp, Oryza sativa
  ref <308>: DATABASE ACCESSION NUMBER: AK101018
  ref <309>: DATABASE ENTRY DATE: 2002-08-28
gatcatcaaaacacctgtaatcatcttctgaattcatcaattcagagttcagagcagagtgtccctgcttctgtgcagaggagagagatcgagctatagagctagcctggctgctgccatggcgaccggacgacgcctctccatgatcctcctcctcctccttctcggcttggcttccggcgacaagattctcttccaggggttcaactgggagtcgtggaggcagagcggagggtggtacaacctgctgatggggaaggtcgacgacatcgtcgccgccggcgtcacgcacgtctggctgccgccgccgtcgcactccgtctccacgcaagggtacatgcctgggcggctgtacgacttggatgcgtctaggtacggcacgtcgatggagttgaagtcgttgatcagcgcgctccacggcaagggcattcaggcgatcgctgacgtggtgatcaaccaccgctgcgccgactacaaggacagccgcggcatctactgcatctttgagggcggcacacctgacggccgcctcgactggggcccccacatgatctgccgcgatgatacccagttctccgacggcacaggcaacctcgacaccggcgccgacttcgccgctgcccccgacattgaccacctcaatggtgtcgtccagcgggagctcaccgactggctcctctggctcaagtctgacgaggttggcttcgatgcgtggcggctcgacttcgcaagggggtactcgccggaggtggccaaggtgtacattgaggggacaacgccggtggggttggcggtggcggagctgtgggactcgatggcgtacggcggagacgggaagccggagtacaatcaggacgcacaccggcaggcgttggtggactgggtggacagggtgggtgggacggcgtcggcggggatggtgttcgacttcacgacgaaggggatcatgaacacggcggtggagggggagctgtggcggctgatcgaccagcaggggaaggcaccgggggtgatcgggtggtggccggcaaaggctgtcaccttcgtcgacaaccacgacactggctcgacgcaacagatgtggccattcccctccgacaaggtcatgcagggctacgcctacatcctcacccatcccggcaacccatgcatcttctacgaccatttcttcgattgggggttaaaggagcagatcgcggcgctggtggcggtgaggcagcggaacggcgtgacggcgacgagctcgctcaagatcatgctgcacgacgccgacgcctacgtcgccgagatcgacggcaaggtggtgatgaagatcggctcccgctacgacgtctccagcctcatcccgcccggcttccacctcgccgcccacggcaacggctacgccgtctgggagaaaatcgccgccgccgccgccgccgccgatcatcgcacctcttccagcgcatcgctctgattgattagcgatatgatgcttgtgtgccacctcttatgttttacttctgctgtatatggaacaggctcttctacctttaaaggtacgtactttcgtcactgatatgtgggatcgataaaccatgggtctaactgttagtgataaagccatgatgactttgaagatataggatttcaatccctgtatatagataagtacatatgtaatatacatacgcatgattagtgacatatatatacactacattgccttggcg

SEQ ID NO: 25577 - DNA, 1703 bp, Oryza sativa
  ref <308>: DATABASE ACCESSION NUMBER: AK101019
  ref <309>: DATABASE ENTRY DATE: 2002-08-28
ggaaggccagccaaaggaaaggagaaagcgcggccatggcggaagacgcgccgccgtcgtcgcttccgctgctgctgccgcggaagtcgttgtcctcgtcctccgcgcagcgcaagcagcagtacgcgcggtgcgtgtcgcacgctggggacgagctccacagcttccgctcctgcctcgcgtggatgtgcgtcgaccactccacccgcgcccgcggcgccgcgtcgtgggcggccttcctcctcctcgccgtcgccgccccgtccgcggccaccctcgcgctcccctccccggtcggcggcggggggtcgccgttcgacgggcaggtccaggtgtcgctcaccctggccgccgcgctcgcctacctcaccctcacggcgctcctccagggccgcggcctccgccgcctgctctacctcgaccgcctccgcgacgactccgaggaggtccggtccggctacatcgaggagctcgcgggctccttccgcgtcctcgcctgcttcctcctcccctgcacgctcgccgaggccgcctacaaggcgtactggtacctcgccgcgccgccgttccgctccccgtggtggtccgccgccgcgtgcgccgtcgaggtcgcctcctgggcctaccgcaccgccgtcttcttcatggtctgcgtcctcttccggaccatctgctacctgcagatcctccggatgaagggcttcgcgcgcgagttctgcaggttcgccgacgtcgccgccgtgctcgagagccaccgccgcatcaggaagcagctccacaggatcagccaccgctaccgccgcttcatactctgctgcctcgtcctcgtcaccaccagccagttcgccgccctgcttgccaccaccaggccgcacgcgcagatcaacctcgccaccgccggcgagctcgcgctctgctcgctgagcctcgtggccgggctgctggtgtgcctccagagcgcggcgaagatcacgcacaagacgcaggcgatcacgagcgtggcggcggggtggcacgccgacgccaccatcaacgccttcgacaacgaccaggaggaccccaacccggacctcccccgcatcgtcggctacctggtgcccgtgaacgcctactggatggcctccggcgagtcctcgtcggactcctcctcctcctcctcctccagcgacgacgacgactccggccaccccaagtccaagtacatccctttccagaacaaccactgcttccagcagaggcaggcacttgtgacgtacctggagaacaaccgggccggcatcacggtgtacggcttcgtcgtcgaccggacgtggctgcacgcgctgttcatgatcgagttctccctcgtcatgtggctgctggggaagacggtcggcatatcctgaggcctgaaggagcttttgcctcctgttgaagctttcagctctctctctgctctgcagccgtgccgagatttctgatgatcaaagatctctgcatcgtctcatattgcttcctggattgtacaatacaaaatcgagtgcagaaattgcagataatagctcagtttctgtgccatgtccggcacaaaaacgaagcaacagttctgaagtttttagctgtatgtttttctttaaaaatttttatggttctttgtttgaggcagattctgatggagcattagttgtatgaaaaataatgggatgggatagttgtccagcttg

SEQ ID NO: 25578 - DNA, 1927 bp, Oryza sativa
  ref <308>: DATABASE ACCESSION NUMBER: AK101020
  ref <309>: DATABASE ENTRY DATE: 2002-08-28
ggtacgaaaacccccaaattttcttcccagaaagaaacccgatggcgtcgccgccggcggccgcgccgcctgagtgggttgtattggaccgcttaccgctcacctccatcgacctccctaaggacggcatctccctctcgctcgtcgcaaccccgcgcatctcgcagctcctcgtgtccccttcgctcggcctcgcctcaggcagcgtcctcgccgctgacccctccggcatccttctcctttccagctccgatccgtttcttgccgacagcaagtcctacgttctctgggacgcagtctacaagatttcctttcccgtccccgccacccccaccgagacaggcgccgccactggcctcgtcgtggttcccggaggatccgaccacatctacatcatggtcgcggagctctcgatccgtggcagcgacgtcatcctgcgctgcttctccacagaccctgccaagtggatccacaagattctacaacaaccccctcagtataagctcctgtggtgttggtgtagtgactatgctctctctcaccaggggaggctctggtgggtagatctcctgcagggcctcgttgcttgcgatcccttctctgacaatccagagcttcacttcgtgccgctcccaagctgttgccgcaaccccaatgtgcagcagagctgtcgcatgggtctgagtgacaatcgccgtgtgggtctcagccgtgggaagctgcggttggtggtgctaagccacgcctctaactctaagtccaggatcagattatggacattggctgattctgaggctggccattggactttggacttcgatttgtccagtcctgtatttgatgacatctggactgacttgtgtgattggaagattgccttcttccaccccagcaaaccacacgtggtctacttctcccagaagcagcatctagttgccgtggacctgcagatggttaaggtttcagaggaagatggtgttgagccttgcagcagcagccatgttcttgcttgggagctctcaccgtccctaagaaccactttgttagtggcaggtccatcgccagcacaagatacaaattccacctcccattttgatagtgttgccaattctttccttgaggcatacagctctgcactagttgacatggagtttcaccagttagcaacaactgcacttgcatcgcttaacaaagaaaagaagagaacggaggaaaacaagttcaagctatctgaacgccttcttctgcaaacctttctggaccaaactgaaacaagcttgaagaaatatgcccatctgaacttctatgctggcactggctctgaaaaagttctagtatttgctgagtttcacacagacgccgtgggtgacaatgagcccgatgagtggggcttatcttcatgcaaactgttaagaaagaattatcaaggtggcctatatggtgaagatgctgatcggcgactaagcatgagggcaaataagaggaagaaatctatttattgttttgcatgtgctgctgaaatgttgcatcccatcaatggctttgatggtggttatgctggtatgagcgtaaccaggggcgtgggtgctggggactctcaagcaggaggaggagagaggaggagaagtgagaggagagaagtgagggggaagagtgtaacacctgcgcacccactgactgaaccagaggagttgaagcagagtaaaacagagcaaggcggcaagaagaaatacgctttcagctttagaaaacataatatgtttagatgaatgacttgtggggctagaggccagctgtatggcgagggaggttaaaaaccccgtgatactatatctgttcgacaattacttctctgtttcatattattaatcgtttgaatttttgagattgaaagtttcattaaatttgagattgaatatattttgat

SEQ ID NO: 25579 - DNA, 2013 bp, Oryza sativa
  ref <308>: DATABASE ACCESSION NUMBER: AK101021
  ref <309>: DATABASE ENTRY DATE: 2002-08-28
ggttgacaagggattgagtgagtgcgttgtaacggtgggcatggagtggccttgtagctaggcttatcatgatgattgatgatatcggagtagaatttatcatcaaggcccaattaaggggcagggctcgatcagctgtttgtgtagttggagcgcgcggtggaagatgaacaagctcagcaacctagctagctagtcgtataccgatcgatcgatcgatgaatatggagtccctggcagcaggagcatggtgggtggttgtgcttcttctactcgtccttacaattgtggcctcctggtaccggtcatggtggaagacgaccgaagcgggggggccgctgcttcctcctccggcagctggtgcaggtccatggtgggtgtgggtgtggcagtggcgggagacggcggccttcctggcctcccatggcagcgggcggggattctaccacttcgtgcaggagcgctacaagttgtacaagggggagggggagggggaggcaacctgctgcttccgcaccgcgctcatggggcgcgtccacgtgttcgtgtccgcctcccaccccgccgcctcccaactcctcaccgccgaacctccccacttgcccaagcgctacgcccgcaccgccgccgacctgctcggcccccacagcatcctctgctccacctcccacgcccaccaccgccacgcccgccgcgccctcgccaccaccctcttcgccaccccttccaccgccgctttcgccgccgccttcgaccgcctcgtcatccgccactggactacgcttcttccgcctcataatcaaaaccaagtcgtcgtggtgctggacgccgctctccacataagctaccgcgccatctgcgagatgctgctgggcgccggcggcggaaagctgaggccgctgcagagcgacgtgttcgccgtcacgcaggccatgctggcgctgccgctgcgctggctgcccggcacgcgcttccgcaggggcctgcacgccaggaagcgcatcatggcggcgctcagggaggagatggcggccagaaatcaccatcaccatcaccatcaccatcaccacgacttgctcagcgtgctcatgcagaggcggcagcttggccatcccgacgccctcactgaggaccagattctggacaacatgctcaccctcatcatcgccggccaggttaccacggccaccgccatcacctggatggtcaagtatctcagcgacaaccgcctaatccaggacaagctacgggcagaagcatttcggctggagcttaagggtgattattctcttactatgcaacacctaaacgccatggactatgcgtacaaggcagtgaaagagtcgctgaggatggccactatagtttcctggtttccaagggtggcgctcaaggactgccaggttgcagggtttcacataaagaaggactggattgtaaatattgacgccaggtctctccactacgacccggatgttttcgacaacccaacggtgtttgatccttctaggttcgacgaagagggagagggagatgatgcgaagcttgggcgtgcacaaccacagaagaggaggctgctggtatttggagcaggcgggaggacatgtctggggatgaaccacgccaagatcatgatgcttatcttcctacaccgccttctcaccaatttcagatgggagatggcagatgacgatccaagccttgagaaatgggcaatgttccccaggttaaagaacggatgccccattctgctcacacccatccacaattcttgataatgttccagattaattagattcttcatgatgacttgtggaccgtggctgcctagctactttatctgtttaattagtaaggtagtattaacaaaaactgctgtcaatttattcgaaactagcggtattgtactgtaactaatagcctagagatggaattcggaggaaggatattcctttgttatttgtaataaataaaaaagacctgctatctggagtagatgtatcaagactattc

SEQ ID NO: 25580 - DNA, 1930 bp, Oryza sativa
  ref <308>: DATABASE ACCESSION NUMBER: AK101022
  ref <309>: DATABASE ENTRY DATE: 2002-08-28
gtctcacctcaccatcatctcttctcctcgtgctcgtcactcgcgagcaaatacatcgccatctctcctcctcctccttgtcgtcatagtgcacgcaaagaaacacggtttgcaatggcgtggtgcttggtgttcatggtgttcttgatctactgcctcatctcgactgtcgggctgccggtggcgccggccgacgaggcggcgatgcagctgggcggcgtcggcggtgggcggctcagcgtggagccgtctgatgtgatggaggcgtcccttgactttgggcggctcaccagcgccgagccgctggccgtgttccacccgcgcggggccggcgacgtcgccgcgctggtgaaggcggcgtacgggtcggccagcggcatccgcgtctcggcgcgggggcacggccattccatcagcgggcaggcccaggcggccggcggggtggtcgtggacatgagtcacgggtggcgcgcggaggcggcggagaggacgttgccggtgtactcgccggcgctcggcgggcactacatcgacgtgtggggcggcgagctgtggatcgacgtgctcaactggacgctggagcacggcgggctcgcgccgcgctcgtggacggactacctctacctttccgtgggcggcaccctctccaacgccggtataagtgggcaagctttccaccacgggccccagatcagcaacgtctacgagctcgacgtcgttaccgggaaaggagaggtggtgacctgctcggagtccaacaacccggacctcttcttcggcgcgctcggcgggctcggccagctcgggatcatcacgcgcgcgcgcatcgccctcgagcctgctcctcacagggttcgctggatccgggcgctctactccaacttcaccgagttcaccgcggaccaggagcggctcatctccctgcagcacggcggccgacggttcgactacgtggagggcttcgtcgtcgccgccgagggcctaatcaacaactggaggtcgtccttcttctcgccgcagaacccggtcaagctcagctcgctcaagcacaactccggggttctctactgcctggaggtcaccaagaattacgacgactccaccgccgtaaccgtcgaccaggacgtggaggcgctgctgggcgagctgaatttcatcccgggcacggtgttcacgacggacctgccgtacgtggacttcctagaccgcgtgcacaaggcggagctgaagctccgcggcaagggcatgtgggaggtcccgcacccgtggctcaacctcttcgtgccggcgtcccgcatcgccgacttcgaccgcggcgtcttccgcggcgtcctcggcagccgcaccgccggtggccccatcctcatctaccccatgaacaggcacaagtgggacccgaggagctcggtggtgacgccggaggaggacgtgttctacctggtggcgttcctgcggtcggcggtgccgggctcgaccgacccggcgcagagcctggaggcgctggagcggcagaaccgggagatcctcgagttctgcgacgaggccggcatcggggccaagcagtacctgcccaaccacaaggcgcagcgcgagtgggaggcccatttcggagcgaggtgggctcggttcgcgcggctcaaggccgagttcgacccgcgggccatgctcgccaccggccagggaatcttcgactcgccgccgctcttggcggagtcctgaaacgaagacgatcgacgaacaagatgatggctagctaggcgcatgtaattagtaagaatcataacaggtgattagttagtcttaatctgatgtgtagattcctcgccccataaaaaaaaatctgatgtgtagacaattctgtacagagggatgtatcagtttcatgcaaaatgtgtgcaatgtttttttgccggtaaaagtcggcgtctgc

SEQ ID NO: 25581 - DNA, 2820 bp, Oryza sativa
  ref <308>: DATABASE ACCESSION NUMBER: AK101023
  ref <309>: DATABASE ENTRY DATE: 2002-08-28
gaggaggccattgcagagtttgagaggaaggttggaggcaaggaagagagacagaggagaaggaagagcaggaggggagggaaaaggaaaaccctttctctctctctctctcagcctctctctccctctctcttcttctccttccttgcaccaccgtcctactcaccgtcgcatcatccactgatccggccggcgatatcacctccatccatccatcacattacggtcggcgtcggcggcggcgacgacgaaggcgggtgagatctcaccggagaagtgcaggcgggcaggatgcaaggaggagggccactcagccccgacgagcaccgggccacctcgccgccggggataatgcaccaccagccggcgatgacgatcgtcgtcgccgtggaccgtgaccggaacagccagctcgccgtgaagtgggtcgtcgaccacctcctcaccggcgcctccaacatcatcctcctccacatcgccgtccacccccctgccgccaaccatggattcgccatggccgaggcgacgcatggcgcgttggaggccgagatgagggagatctttgtccccttcagaggattctgcaccaggaatggggtgcatgtatcggagttggtactggaagaggcagacgtgtcaaaggccttaatagagttcatcaccgtgaacaagatccagagcatcgcgctcggcgcatccaacagaaatgcattcaccaagaaattcaagaacgccgacgtgccgtccagcctgatgaagggcgcgccggactactgcaacatctacgtggtggcgaagggcaagtcggtgaacgtgaggctcgccaagtgcggcgtcgatggcggttgcggcggtggcggtggctacgagggcgactcatcgatcaggagcctgtacacgaggaggtgctcgagggggaagctgccgccggcgacgccgtcgccggactcgtcgaggcggtcggtggacagtcgcaccctgccggagctcaccacgcggccgccgttccgcgagcgctcgctcccgtcctcgtcgtccaagcccgtcgtgctgtccagcagggcggcgcccgactgcggcggcggcggcgtcgacgggtcgtaccgctccacgaggcggtccgtgtcgaacgagtccttcgtgggcgacctcgacttcggccagagctcgcgcttctcctccatggacttctgcgacagcctcgacatgtcgtcgctctccgccagcccacgggagagcagctcgcctctctccgccccgcagcgcgaggtggaggtggagatgcggcggctgaggctggagctgaagcagacgatggacatgtacaacgcggcgtgccgggaggcgatcaacgcgaagcagcggaccaaggagctgcagctgctgaagctggaggaggcgcggcggctggaggaggcgcggcacgcggaggaggcggcgctggcgatggcggagatggagaagaccaagtgccgcgcggccatggaggcggccgaggcggcgcagcgactggccgacatggaggcccagcggcgtcgcaacgccgaggtgcgcgcccgccgcgaggccgacgagaaggtccgcgccctggacgccatctccagccacgacttccgctaccgccgctacaacatcgacgacatcgagctcgccaccgagcgcttctccgacgagctcaagatcggcgagggcggctacggccccgtctaccgcgcctccctcgaccacaccccggtggccatcaaggtgctccgccccgacgcgcagcagggccggaagcagttccagcaggaggtggaggtgctcagctgcatccgccacccaaacatggtgctcctcctcggcgcctgcccggactacggctgcctcgtctacgagtacatggacaacggcagcctcgaggaccgcctgttccgccgcggcggcacgccgccgatcccgtggagccagcggttcaggatctcggcggagatcgccaccgcgctgctgttcctccaccagaccaagccggagccgctggtgcaccgcgacctgaagccggccaacatcctgctcgaccgcaactacgtcagcaagatcagcgacgtcgggctggcgcgcctcgtgccgccggcggtggcggacagcgtgacgcagtaccggctgacggcgacggcggggaccttctgctacatcgacccggagtaccagcagacggggaagctgggcgtcaagtccgacatctactccctcggcgtgctgctgctgcaggtgctcaccgcgcggccgcccatgggcctcacccaccacgtcgagaaggccatcgacgccggcaccttcgcccagatgctcgacgtcaccgtcaaggactggcccgtcgacgacgccatcggcttcgccaagctcgccctcaagtgcaccgaaatgcgccggagggaccgcccggacctcgccaccgtcatcctgccggagctcaaccgcctcaggaacctcggacacgcctacgaggcgcgcatgagcgccgccgccgccgacgccgccgcgcacgcccaggacaacgtcggctcgccgacggtggtgggcgcgtcgtggagaacggcggagagctaagctagcgggaggccgtgtcagttattttagagtcacaggagagggtggagttcacacggtacatttacggtccttttttgtcggtgtaaatccttaaataccttggtgtttgtacagttgacaaaaaaaattaacatgttctgcggtggttggctcaaaattttgaggtgtccgaatgattcttttttcctggttatacagcagaaagattaaaaaaaaattacggtaatg

SEQ ID NO: 25582 - DNA, 2454 bp, Oryza sativa
  ref <308>: DATABASE ACCESSION NUMBER: AK101024
  ref <309>: DATABASE ENTRY DATE: 2002-08-28
gcccgacaacgcctccaccggtaggagccgcgtcctccgcgcgcgagcgcgagttatcctcaccacccaccgctcgtcgcctccactccgatcgccgccgcgcggcaggggagggggggagggtatcctcaccgccggtgccctcaccgcggcgacccttcaaaatcccccaggacgccgggaggggatcggctccgactccgtccgagcacgcgccaccgccaccgccaccgccattgtgggccctcgatcccggggcggcgcgcgatgtggcgtcacgcggcgcggcggtcgtcggcgcagatccggcggagcggggtcatgtcgtcgtcgtcgtcgccggcggcccccgctgccgcggccggcgccgcggtgcccggcccctgcatcgtccacaagcgcggcaccgacatcctccacgacccatggttcaacaaggacacggcgttccccatgacggagcgggatcgccttggcctccgcggcctcctcccgccgcgggtcatgtcgttcgagcagcagtacgaccgcttcataaactcgttcaggtcgctggagcacaacacccggggagagcccgacaccatcgtcgcgctggccaagtggaggatcctcaacaggctgcacgaccggaacgagacgctgtactacagagttctaattgacaatatcaaggatttcgcgccgataatatacactccgactgttgggttggtctgcgagaattacagtggcttgttcaggcgcccccgtgggatgtatttcagcgccaaggataagggggagatgatgtcgatgatttacaactggccagccgagaaggttgacatgatagttgtgactgatgggagccgtattctaggtctaggtgatcttggagttcagggcataggtatacctatcggtaaacttgatgtttatgttgccgctgctggtatcaatccacaaaaggttcttccaattatgcttgacgttggaacaaataacacaaagcttctagaagacaagctatatttaggactgaggcaacctaggctggaaggagaagaatacttgtctgttgtagatgaattcatggaagctgttcatgcacgttggccgaaagcagttgtgcagtttgaagacttccaaatgaaatgggcctttgaaactcttcagaggtatcggaaccgattttgtatgttcaatgatgacgtgcaggggacagcaggagttgctctagctggcctacttggagctgtgagagcacaaggtcgacccctctctgattttactaagcagaagatagttgtggtgggagctggaagtgctgggataggtgtgcttaatatggctaaacaggcgatgctaaggatgccagggataaacaggagcggggaagggcataatcaattctgggttctggacaaagatggacttattaccaaatccagaaagggcctggatcctgtagttgctcgctatgccagaggttttggtcctgaagaggtgcaagatctccatgagggggctagtcttgttgaagtggtcaggaaagtgaagcctcatgtgcttttaggactttctggagttgggggcatatttaatgaggaggttctcaaggctatgaaagaatccgattcccctcgtcctgcaatttttgcaatgtccaacccaactactaaagccgaatgtactcctgaagatgtattcaaatatgttggagacaatgcagtatttgccagtggaagccctttcagtaatgtcactttaggcaatggtagacaagggtacgctaatcaagcaaacaatatgtatctgtttcctggtatcggtttaggagcccttctttcaggtgctcggcatattacagatggcatgctccaatcagcagctgagtgccttgcgtcatacatcacagacgatgaaattcgaaaaggcatcctctttccatcaatctcaagtatcaggcacatcaccgcacgtgtcggcgccgcagtcgtccgtgccgctgttgatgaagatctggccgaggggcgttgtgatgtagacgctagggacctcaagagcatgactgaggcggacacagtcgactttgtggctcggaagatgtggtaccctatttacagccccctcgtgaacgataagtgaagctcgatgaagtgaaaaatctgacgttgcatgaaccagatgtagcacctgaacaactatcagtcacatatttgttcagacttattttttttgttgctattttcatttagctgcgctactggagggtaattcagcagataccgatgcccacgtctatggctatgttatcacgccacgccatttttttgttctgttttgacagcttccgtcatcaaacgttgctcaatttcaagattagttgagctacataaatttacatctcgtgctttactacattctactaatatattttttttggatattgatctatcactctatccctgc

SEQ ID NO: 25583 - DNA, 1685 bp, Oryza sativa
  ref <308>: DATABASE ACCESSION NUMBER: AK101025
  ref <309>: DATABASE ENTRY DATE: 2002-08-28
gttctctcacctagctgccatcgatccgaaacacagggggcggggagatcgatcagagctgagacggcaaaccccggcatggctccgcctccgcggctgccggccggcgcggccgcgctgctgctgctgctcgccgtggcgtcccgtgcggcggcggacggcaacgccgtggacgtcggcgtgaactggggctcgcagctgtcgcacccgctgctgcccaagtcggtcgtgcagatgctcaaggagaacggcatcctgaaggtgaagctgttcgacgccgacccgtggcccgtcggcgcgctcgtcgactccggcatcgaggtcatgctcggcatccccaacgacatgctggagacgatgaacagctacgggaacgcccaggattgggtcaaggagaacgtcaccagctacggcgacaagctcaagatcaagtatgtcgccgtggggaacgagccgtttctcaaggcgtacaacggatcgttcatgaagacgaccttcccggcgctgaagaacatccagaaggcgctgaacgaggccggcgtcggcgacaaggtgaaggcgaccgtcccgctgaacgccgacgtgtacgtctcgccggacaacaagccgtcctccggcgcgttccggccggacatccagggcctgatgacggacatggtgaagttcctgcacgagcacggctcgcccttcgtcgtcaacatctaccccttcctcagcctgtaccagagcgacgacttcccgttcgagttcgccttcgtcgacggcggcaagaccatccaggacaagggcggcatcagctactccaacgtgttcgacgccaactacgacacgctggtcaccgcgctgaagaaggccggcgtcccaagcctaaaggtcgtcgtcggcgaggtcggctggccgaccgacggcgacaagaacgccaacctcaagctcgcgcggcgctactacgacggcctcctgaagaagctctccaagaaggaaggcacgccgctccggcctggcaagatggacgtctacatgttcggcctcttcgacgaggacatgaagagcattctcccgggcaacttcgagcgccattggggcatcttcacctacgacggcaagcccaagttcccgatggacctctccggccacggcaacgacaagccgctcgccggcgtgcccggcgtcgagtacctcccgaagcagtggtgcgtgttcgacgacggggccgaggacaagtccaagctccccgggaacatccagtacgcgtgcgccagcggcgactgcatggcgctcggctacgggtgctcctgcaacggcctcgacgagaagagcaacatctcctacgccttcaacatgtacttccagatgcaggaccaggacgtgcgcgcctgcgacttcgacggcctcgccaagatcaccaccaagaacgcctccgcgcgcggctgcgcgttcccgatccagatcatcagcgccgccgcgccggccgtcgccggcgtcggcttatccgcggcggcgttgctggcattgttgatggtgctggtgtgagcataccgtgtgagacgggtgggtgggtgcgtgcgtggcgtacatgtagtgagagtgggtctatgcgtgaattgaattgtccatttttcgcagcgttcaaatgtgttgtgacatttgcaaattcttcacgccggatgcatccttaattttctctt

SEQ ID NO: 25584 - DNA, 3313 bp, Oryza sativa
  ref <308>: DATABASE ACCESSION NUMBER: AK101026
  ref <309>: DATABASE ENTRY DATE: 2002-08-28
ggcagtacacccagcagcacggggaagaagaggaggaggaaaacccaaaccaaaatccccggagctcgcgccggctcgcctcccgcattgcctcggcgccgctcgatccggggtcgcgccgacgctgacccggtcggagggctcgatctgggcccggatcggccggcattccccgccccgcgcgcgctccggccccgggcggtgaggcatggggacggtgaacggcgagtacgaggacttcgatgcggccaatcggcgtgcggaggtgatagattggctcggcgggttactgccggagttcgatttgccgttggattcttcggacgaggagctgcgggattacctcattaacggagaagcgctatgctatgttgcggacaagctcatgcccggtgttctggaggggacgtggggtggttatgcatcggaccaacggtcaaatgtgaagaagttcctctctgttgttgcagagatggggctgccaggctttggcgtgaaggatcttgaggagggatcaatgtcttctatagtggagtgtctcttggctttaaaggataatgtggctacacaattgggtggtcatatttctaacagcactgctaagactccaatcagaaggaaactggaacttcgagaaactgatggaccggtgctttcagttgccacaccagggaaaagataccctaagtcccagcaaagaagccctcttctttcaggacaaaagatcaatgaggttgtccaatttaagcatggaacctacacagatcttcctgctgctaagatctcagagatgctgcattcaaatagtttagataatgcccctacccaatcccttcttagagttgttaatggcattctggatgaaagtattgagaggaaaagaggagaaataccacatcgtgttgttcatttactaaggaatgttattcaggagattgagcaccgcattggtattcaagcagatcacattagaaatcaaaatagcatcatcaagacacgggaggataagtatcgttcaaaaattaaagcacttgagacattagtaaatggaacaaatgaagaaaacgagatggcaataaatcggcttgaggtagttaaggtagagaagtcaaaaattgatgagaaaagaaaactaggagagcaagacatgattcggctgatccgtgaaaaggagaatgcggagaatataattgctagcctccatcaagagatgcaagtcatgaataggatgcatgaacaattccgtgagcaaatggaaacaaaagctaggcagatggaggaacacttgacactaagagctaaggaggctgagttttgtcttatgcagtccaaaaagaaagttgaagaagttgaggctacttcccaattaaagtcacaactctggagcaaaaaagcaaacatttttcagagttttatgaataatcagaaactttctatcaaggatataaagatatcatctcaatccattaaacaagaaatgtatgcccttcaaatgacatggagggatgaaatatcaaatattggacatgacctaaaaggtttagtagatgctgctgaaaattaccataaggttcttgctgaaaaccagaagttatttaatgaagtgcaggaattgaaaggcaacatcagagtatactgtcgtgttagaccatttctccctggccaagatgggaaattaactgcaattgactatattggtgaaaatggcgagattcttattgcaaacccctccaagcaaggaaaggaagggtatcgaatgtttaagtttaacaaagtgttcggtacacattcctctcaagctgaagttttctccgatatccaacctttgattagatcagttcttgatggattcaatgtttgcatttttgcatatggacaaactggttcaggaaaaacatacacaatgagtggaccagggacatcaagagaagactggggtgttaactatcgtgctttaaatgatctgtttgatatttctctaagtaggaaaaatgcattctcatatgaggtgggagtgcagatggttgaaatatacaatgagcaagttcgcgatcttctgtcaaatgacattgcacaaaaaagacttggaatttggagtacttctcagcctaatggccttgtagttcctgatgcaagtttacaccctgtcaaatcaacatcagacgtactagacttgatggaaattggacagtcaaatagagcagttggatcaacagctctaaatgaaaggagcagtcgctcccacagcattctaactgtgcatgttagaggactggacgtgaagaatggttctacttctcgaggatgtctacatctgattgatctcgctggaagtgagagagttgaacgatctgaagcaacaggagacagattaaaagaggcacagcatattaacaaatctctctctgctcttggagatgtcattttttctttggcccagaagaatgcccatgtgccatatagaaacagcaagctaactcaagttcttcagagttctttaggtggacaagcaaagacactaatgttggttcaaataaaccctgatattgaatcatattcagaaaccataagtactttaaaattggctgaaagggtttctggagttgagttaggtgctgcgagaagtaacagagaggggaaagacataaaagagctgctggaacaggttgcatctttgaaagatacaatagcacgaaaagatatggaaatcgaacagcttcagctccttaaatccaaatctcccaattcaatgacagacagaaatggcagtaacttgctgagacaatctacttcctctactggtttgtcatcacttcccgtggcaagccaacagaaccaacagctatcaggatccgttgaagctgaagctgaagataatgcatctgacgatggttgctcagtgggggaaactgagtattctcctgctggtgcttcagaaacatcagcagaacgagcgcataaagcgccatcaagaataaccagattctttctcacgaagaacgggcagccatcaacttctagaccaaaaccaagggaggttgttccgaaaactcaaggtagcatgagacctggaactgcgcaggcgacaggaggatccttagccaagccttccaaaagacggtagaaatagaatctgacgaagcatccatgcaagtttggcaactgtgatgtaactcaacttttgcgctgaaacacacggggggtagtttaggaggtgctactggtgttttctgtgtatctgtataagtttcgctggtcgactcaacaacgtatcttggttaaagattcatgatgagcagcgaacatttgtacc

SEQ ID NO: 25585 - DNA, 3504 bp, Oryza sativa
  ref <308>: DATABASE ACCESSION NUMBER: AK101027
  ref <309>: DATABASE ENTRY DATE: 2002-08-28
ggtgggtagacacgcgggcgaggcattgagacattgatgaactcatgagtcttagcgtatgatgtttttgtcctgttggaacatggatttccaagcttggatgccgcgagactcgcacagaaaaaagtgttgccatcacctccctctctctgcttgagcacacgagaatggagtcgaataacagcacaacatgtcccataatgccctgaatctgtctcattgtgcactcagcttcaggtctgggaactgattcgtcaaagcctcagtcatcccaggcattgacatcatcagaccaagctggtccgtggacatcacctcgcaatcctgtggggtgtccttgatcttgctcggatcataaccgaagttggcagcgtaggacttgtacttctcgatgaattctggtccaggattaggtgttcttgagtatatctgatgcattgccgagagacgacacaatgttatgatatttcagtttacaaaatgcgtcagaataggcatatgaagaataagcatgcagagggctaagaaatagtggtcatttgcagttcagagatcagtttctgacctggataaagcttgtgtctttagcaccagacacaacggcgtaattgtcataatcggttgcaagcacatcataaggttccttgggtatgaatggtagtgtggggaaacggagaaagcatttccccttgatcatctcctgcctttcaagatctgtctcagcactcgccatgtcctcttcggacaggcattgcacccttccccgaataccggtgatgtaaccatcaggtccaccatgaacacagaatgtgtccacctggattgagcgtgatttctcatcaaatgaatacaccccctgcagtaccaacaaatttctgtaacaatcttcttacacattatatggtgcaaatggcatagaaaaaatagcatgcctgtgataacctattccaaatcagtttgatacaaagatgtcagatatcggtgttttcaggaatcaggattcagaggtacatattgctggggcatcatacagattaagatctactagtatttgtgtgtgaggattctggcactacaatacctgagtacagtgacagtcctcttgtccctgaccagcaaagccacgtttcagcgatgctacttcgaaccatctaccagagtagcgaattgggtcaaagttcttggcagtcatacccttcatcatcaaacctgtgccgccatcatcagaagggctatcgaatttcagaggaaccgcagccttgtcgatggctgctaccacagcaacctggcacaattttggctgtacaaaggtctctgcagggatagcctggtcaactatgagagattaagagtacatcgataccatgttacaagcctgaactggtacctgacaaggtggagagatgaaaacaagcgaagcagcaaggcatgagagcaattttgtggataatactccatgagcattcagtggcaccttgtcatgcagagagcatctgaaattatttcgtccagcgggtctgcattttctcctaccaataagaagattacttatcagcattttcatccagtgaatacaatagaacagcacctgatctagccttatacaactttgatccaagaaaagtcaactgcgtgttgctgccactggcgcttgttacctggaagagcaagcagggtgtggcgccgcaagagaagaagaggaggagcccaacagcagaggcgagaaccatggcttcctcccgccgccgccgtcgccgtcgtctcccactgtcttaggccgagtaaaccgttttctcgagattacgcggttgcagcttcttgagtggtttttggctttcgatgtctgcaggtgcgggagagagagagaggagccgaattgctggagaccgatgattctgggcagaggcagaagcgcatccagtgccgtccaatgggaggcgcccacgtgggcaatctccctgtatcacctgcgggccgttagctgggccagggccttgcacaaagggaaaaagtacaccgaaggtccctcaacttgtcattgagttacaaaatcgtcccccagctgcaaaaacagatatagaacatccttcaacttacaaaaccgttcactttaggtctttcggttgttttgaccccggttttgtctgacgtggcggctgagtcagcgtgggacgcatgtgggccccacatgtcagggtgtccgccttagcaccctttctctttccccaattctctacctttctcctctctctctcctctcctctctgcagggcaacggcgggtggggaggaggtcattagggtgaggtgggagaggctcgcggcggtggttgcgacactggagaagggaggcggctcgcggcggctgccgacgacatggcggtggcaggagaagggagagcatcatcgcgcgtgcgacctcagggttgcaccgtcgaaaaggctcgagaggcgggcgcggccgatgggggaggagcttggcgcaactagcaggggaggagttgcaattcctgggcgtggtagggatctacggggaggcggcgtccatcctccgcacccaccgcccgcatcgccgccgccttcgtcctcccgctcttcctcctcttcctcgtccacatcgccatctcccacgccctcttctcccacatcgactccgacgactccgccttcgactccgccgccccctgcacccacgcccaacgccatctcctccaccgcctcgccaacgactggttcgccctcctcctcttcaaggctgccaacctcttcgccatcctcttcaaggccgaccatgcaactcgcagaagggtaccgtcgggtttgcatttgaataggataccttttctcttttggatacacaacgagatcggccgcgctggcgaggagctcgccagagcgccactaccgccgccgccaccgatgccttgctcccctgctcccgtgtcgtcgccggccaccggacctcctctcccgcctcgccccatcggtctcctccctacctggtggtcggcctgcccagagcccaagagagaagagtgagagagagagagagaggaggaagggagagaagaggggaaagagagagagagagagagatgaggctaatgtggacgcgctgacatgtggtcaaagcgccacataggataaaaccgggatcaaaactaccgagggacctattgtaaccgattttgattagttaagggacgtcggatatctggttttgcggtttgaggacgatttttaactcgatgacaagttgagggaccttcggtgtactttttccttgcacaaagcatgagctactctgcgcccatagagcccgggctatttcaaaagggaacaaatttactctagattttattttcaaacaaaaataataattctattttcaacaaacttttttaaaaaaactccattttcaacaattttcatatcaaacttatttcttgggtttgtattcttttttttaagaatcactagaattgaaattggaagtgcttgcttc

SEQ ID NO: 25586 - DNA, 2571 bp, Oryza sativa
  ref <308>: DATABASE ACCESSION NUMBER: AK101028
  ref <309>: DATABASE ENTRY DATE: 2002-08-28
gacacatcacgccctcacccctccccgtcgcgtcttcaacccccgccggcgccgagtgcgccgctcgtcgcgccgcccacatccacggtgagaccctctggatctggcagtctccgatccccatcaccgtaccccgcctccgcctcaccgcaatgtcacccgattccgcgccgccagttcaccgtcgcccggattgaccaccgtcccccgcctctccaccgcgccgatctcctccgcgactcccaccgccgccgccgccgcttctcttggttctcgattttggtttggtttgctccggatttcttgagtcggggaggccgggaggggattcgtctcgtgattttctttgtctattgtttgattgatctacctattcaggaaaatgatcgaggcaatcgacgagtacagcgccgaagatccgctccaaccatggctagagaggggattgctcaagtcggctggtggtgatctacgaccagacgacgacctctacaagaaggatctccgctacctcaaagtgtgactggaatatgtgagttcatgaattcagatttggttctgaggtggattggtttggtttccttttgacatccagcttgtgtttatcttttcatgcatgacggcggggaattgtgctgattcctggaggctaacccgatcagtcagagccataccaattactacttgtgtaatgcgttggtaatatattgaaccacagggtaatctctctcaataatttaaattggcacaattaaagatgttggattaattgcatcagtgtgacatccatgatttgtttagcactctgggcagttttactgcaaatttgttggttcttaactctgaagaatatgtctagcttagattggatgtctggccattggggagatagacatagcaggatatggtagtgcatgcgttcgcgaaaaaggatatggtagtgcatgaataatatgtttaactgactatgatcctactgcttgtatgttcacatcaaaatttttctttcttaaagatctgataacgtgggggatgcatgtatgtttgtgatatggttcatcagtatggatgcatcttgtcaccctgaaagtatacggttgccatccatggaataaaggggtgaagaagatggcaagtgtcaatttagagtggtaatttgggaatccatgtcgtatgcttgtcttaggagcttatgacccacgtagacaagcatgtggcaatactacagtagcatcttggcttaatcatcttatcaattggagtattgtgcatgaaagtcagataaaggtttacgactgaatatgattgtgtgtttaagccaaatataataaattaatatgctaatcttaatttattttcatgattgttgatttgtaggtaggtatgcttgcattttctcccgagggaaaactcaaatagtctcaaatttagcttacaaaacaggaattgaagatctatgatttctccatttttctttaaattaaaatctgttttgcagttatgagaaaacaaggccatttgttattcttatgtacgagtacaacgctttggcagcaaatttctttacttacagtttcacatcttacttggagtgcactgtatagaaaaatatgattcagattgcatttcccattaagtatacgcttcaataagcaattgcgagggatgacctttgcatccttctagctatttattttccacttaagttctatggagtatcacatcatgtgtcagtttttgatggcatgccatcgacgaagccagtcgtgccttctgcttgaacacaatggacattgcctccccacttgaacagaccaaatctggaacctctgccttcatggacttcacagctcgacaattccattctccaaaatctgttgtacagagcaacaagtgcaagacatcacccttaatgttcaaatatattatgcaatatagcctgatcacttaatgttcaaatgtgctcaagcaaagttcctgcagttgctattttagagatgtgcaagagatagaatcccgaattctagaattgaggtcatgtccatgctgcaatatcctgaaaacaaaatcagaatattaccttcttgtatttgttctctgtaggaacatgggccatttcgctaacccgaaatgattgggtgttaaaaacaaattgctttcagatattgcatttgccttatagagttgtttcccttttgcaacaatggagacctttcatcccttcgaaactggcagggtacttggatgctttaaagggattcttgcttgccaaaattcacgagatgtgaggatcaagtctcaactaatgatcaagaagatggattttccaactagctataagtatccagcggttctgcaactgtttgctatcatttttgtgccgagatggaatgttccctagagagatagcttaggttagctatccagcggttctgcaactgtttgctatcatttttgtgccgagatggaacgttccctagagagatagcttaggttagcttgttcctttgttctgtaactcagactggcttgttctgcctatttgctgagccaacaactttgcctttgtcc

SEQ ID NO: 25587 - DNA, 2112 bp, Oryza sativa
  ref <308>: DATABASE ACCESSION NUMBER: AK101029
  ref <309>: DATABASE ENTRY DATE: 2002-08-28
gtccatggtttaattatttgtagccttatagagagagagaagagaagaagagagagagatcagtgtgaggcaccgacgaagacgaagacgaagacgacgacgacgacaagcacacaacaaatttgcacacacgcgcgcgagcatcgatgatggcggcccatcatcatcatcatgagcaccaccacctcttggacatgtcgtcgcccccaaacgccagcggcgccatcatctcctccttcgaccacgccgccggcctcctctccctccacgacgtcgccgccgccgccgaccaccaccaccaccacctacgaggaggaggagggggtttgcaattgccatcgccgtggtcgcagcagcaggtttccctctccctctacaacaacgctgccggcgcagcaggctcgccgccgtcgtcgttggttgcccatcagcagctggcggcggcgcagccattaatgttccagctgagggggtccaagtacctgggccctgtgaaggcgctgctcgccgagttctgcagcctcgacgttgaggccatggatggcgccaagcagcagagacctcccaatcccaatcccaagattggaaagtgggacgacgtggagggttcaggttcgtggggcaacctgtctctgagctccatggacctcctggatctcgagaggaggaaggccaggatcttgtccatggttgaagaggtggacagacgttaccggcgataccgtgagcagatgagggcggtggaggtgtcgttcgaggcggtggccggcggcggcgcggcgcaggtgtacacgaagctggcgatgcgagccatgtcgcggcacttccggtgcctgagggacgcgttggtggggcaggtgcgcgcgctgaggaacgccatgggggagagccagagggacgccgccggcggcgtggcggcggcggcgcccggtgccaccaagggcgacacgcctcggctgcgggtgctggaccagtgcctgaggcagcagagggcgttccagcagtccggcgccgtcgacagcttcccgtggcgcccgcagcgcggtctgccggagcacgccgtcgccgtcctccgcgcctggctcttcgagcacttcctccacccgtatccaaatgatgtggacaagcacattttggcgcgccaaacaggcttgtcaagaagccaggtttcgaattggttcatcaatgcaagggtgaggctatggaagcctatgatagaagacatgtacaaggaagaaacgaagccggaatcatctgatggcaacaacaaattaaaccctagcgcagccggcaacaaacagcagcatcgagatgatcccaagaagaattacacggcaacgacagcagaagccagcttagtacaacaaagcagctaccatctccaccttcgcagcagcggaaaccgtaactcctcctcgttgatgatccctgcagcagcatcaacatccatcgatcatcaccatgacagcagccaccagctgttgggcggccatagctattcttcagcagcaggattgcatcatggtcatggcggcgccgtgtcgcttactctagggctccagcagcagcagcagccatttgcggcgtcgatgatgcatcagcatcagcagcaccagcaccagcaccagcagcagcagtcattcatggtggaggcggcggaggaagaagaagatgacgtgctcccttacaggaacctcatggagtctcagttgctgcatgattttgcaggagctagctaaggcaggctccagcttagcatgcagctaatttatttgattgttaaaggagattattgcgctcaaaagtttaatttaattaaggagatgtaggtaattaaatattacattattgttcttttatgaccaaacatttcgttacattatttggggatttcttttgtaaaaatcagcccaccacttctgttctggcctagctagcttagcatgcagtgatgtggaacccacccttgcagtcccatctgggcccatgacaagttagttacttagagcacccgcaatggtaaagtaaggtgttatctataaaacatgtacatctcagcaatagactagattaatagtaaaccacttcaatggtatgtctacatgggtatct

SEQ ID NO: 25588 - DNA, 1467 bp, Oryza sativa
  ref <308>: DATABASE ACCESSION NUMBER: AK101030
  ref <309>: DATABASE ENTRY DATE: 2002-08-28
gatcgattcagtggctatcgacgaagctcttgacggcgtcgacgagctcccgcgcccgcgccgccgcgacggggtgggactccacggcgaaccagttgaggtagaacacgtggccgatcccgcggccgtggctgaccaccgtttccactgccttgcccgcgcgcgccatggcctcgccgtactccacctgcgcgtcgcggagcatgtcctcctccgcgaccatcaccagcatcggcggcagctgggctccctccgccgccgtcaccgccgccgccggagacgtgtacgggtggtccctgctggtggttcccaccggcaacgcgagcatgacgaacttgtccaccgtctcctgcgtcatgaacggcgtgggagggttctccagctccgacgggctcttctccggcaagatgaagcccgggtggaggaggacaccgccggcgaggcgtatcgggtcgagagcctcggccccagcctcgccggcgcgtgccgccacgttgtgcacgaggacgccgcccgcgctgtcgccgatgaggaacacgcgggagaagtcggcggcgtcgcgaaggcgttcgaccgcatggtgcgcgatggtgtcgctggtgccgcacgcgacgtcacggagccagagcagcgcggcgtgtccggcgtcgatggcggcggggaggcggtgctccggcgcgagcgggaggacgacggagacgatgcccgcgacgtcgagctccacggcgaggcgggcgtagaagcggtggtagagcgaccacgcggcgtgggacaagcagaagccgccgccgtggaaatggacgagaacagggcggcgcccggccggcgtcgtcgtcgtcaggtacaggcggacgtcgacgccatggtccgtggcgacgtcgtggacggtgaccccgtcccgtgggtcgtcgtacggcgggacgaggaccatgaacgcggcggcttccggcgggccgaggcggtcgacggagccgtcggagtagacgcggatccagttggtgacggactcgaccagcgtcctggtcgtcgtggtcgggttagccgcctcttgacgctccttggtcgcggccatttgtggcaatgttgccatggcagcagctggccagatgatcgagtacgtagcagtgaaaatgtgaaatgaactggctatgctgcgtttgtgttttatagacgcagcacggattcacggcgagcatggatgacatggccttgcaaactctgcgcgcatacgtacgtcgtgtggacgcgctggcttgacgccatcgttgattggctcaagtcgtctttaatttgttgtagtatgttaatttgagtctttcacttagtcttggtgagtcgtttcgtctcggtctagctttaataaagctcgatcgacagaaaatggtggccttcttcgcacctaacacttccgataaaatggtgtgtcctatcaaatctctctggaatggaggattactattttgctcc

SEQ ID NO: 25589 - DNA, 1048 bp, Oryza sativa
  ref <308>: DATABASE ACCESSION NUMBER: AK101031
  ref <309>: DATABASE ENTRY DATE: 2002-08-28
gatttttggtttattttgcctccccaaccaagcacaaacacaagcctcgccgtattctctcggagcaaagcgaacgcgaaaccccacccgcggcggcgagaaatccggcgacgatgagccgcggcacgggcgccggctacgaccgccacatcaccatcttctccccggagggccgcctctaccaagtcgagtacgcgttcaaggcggtgaagtcggcgggggtgacgtcgatcggcgtccgcggcaaggactccgtctgcgtcgtcacacagaagaaagtgccggacaagttgctggaccatacgagcgtcacgcacttgttcccgatcaccaagtacatcggtctgctcgccactggcctcacagctgatgcaaggtccttagtctaccaagcaaggaatgaggcagctgaattccgtttcaaatggggctacgagatgcccgtagacgtattagcaaaatggatagcagacaaagcacaagtctacacgcagcatgcctacatgaggccccttggagtagttgctatggtcttgggctatgacgaagagaaaaacgctcaactattcaaatgtgacccggcaggtcacttctttggacataaggcaactagcgccggtcttaaggagcaggaagcaataaattttctggagaagaaaatgaaggatgacccacagttctcctacgaggaaactgtccagattgcaatttctgcattgcaatcagttcttcaggaagatttcaaggccaccgagattgaggtcggtgttgtgaggaaagatgatcgtgttttcagagcactcacgacagaggagatcgatcagcacctaacagccataagtgagcgcgactgagctacaatgaagttggacatgttactgcttcacactgcactctagtctttcagcagtgtcattttatttcatgttcagccaagaaacattcagtgaaccatttcatgtaactccaaaaaacagtcatcagctttacttgttggatcatcctctatcgttgtggttgaatttactacgatttacttgtatgctgc

SEQ ID NO: 25590 - DNA, 3683 bp, Oryza sativa
  ref <308>: DATABASE ACCESSION NUMBER: AK101032
  ref <309>: DATABASE ENTRY DATE: 2002-08-28
gatttttgtgtcgaaaacgtcgaagcaggagcacgtgctgtgcgagtgtgaccgccgcgccgcgggactggactctgcgctcgtgtcttcgtgtgaaagtgttgtgatacatcaagatacatcatcgtgtgtgctgtgtgtacatttaaaaactaatgtatgcacaacgttgttaatatggaaagtaaaactgcccggaagagtgtgttagtttcagctttaacgcgtttcctcaaactgggcaagaagacgaccaaactcaagggacagcacgtagcagtgaatcagtcgccagcatctgtgcaaacggctgagcgcatgttggtcccactgatttccattacaatgtcgcctcctcgtgggcctacaaacaccccagcaggagagactcagacaactcagctgcctccgcagcataccaacaatcaattgcattctgctcagcaagttcagcagactgtggaaaccatgaggaactcagtggcaagaaccaaccacgtcagcaaccaaacttcacagcaaatgcgtctaaaggaacaagtaaatggccaaacaacaacatcatcgtcagcttccattaagcgctcaccaaatgatttcatctttgggaaaactattggagaaggcagcttttcatcagtatacctggccaaagatattcacaccaataaagaatatgcaattaaagtgtgcgacaagcggcatatcatcagagagaagaagacagaatacgtgaagctagaaaaagaagttttgaacatcctcagttcaaatagcaacccattagccccattctttgtgaaactcttctgtaccttccaagacgcggagagactgtactttgttctgacttacgccaagaatggcgagttacttccttacatcaacaaagtcggctccttcgatatcgcctgctcgcgtttctacactgcagagattattatggcgctggagcatctacataggctgaggataattcatagggatttaaaacccgaaaatatcctactcgatgagaatatgcacatcctagtcacagatttcggatcagccaagatccttcctcctgaacaacctaaagatgaagtggacggcaaagtgacgcgaagcgagaggagaaacagctttgtcgggacagccaactacgtgtgccccgaactactaacagataaagcatcgtcatattgctcagacctgtgggcgctaggttgtatactttaccaaatggtgggaggcctaccaccctttagatcaagatctgagtatattatatttcaacaaataaccaaagtggagtacgagtttcccgatggattccacccactagcgagagatctcgtagaaaaacttctggttctcgacccgaagcagaggataggtgccaaggaccctgccggccagggctacccgtcactccgcgcccatcccttcttcgaagacatcgacttcgacagtctgcaccagacaacgcctcccccaattcttccttatttacctggtacctctgaacacgaggaactcaggagtcagtaccgggttcctgatcatttagaacctgggctggatgaccgtcagctgacgcgtctgctggggctggagctccagagcggcagcggcggcaacagcggcggcaacagctgcagcagcggcagcagcaataccagcagcagctgcagtagcagcagcagtgagcggacccccgaggccaacccccggaggaaggcatcgcccggccccggccccgcccccaccgacagggacaaggacagggagaagcgggacgccaaggagagcagtgcgcgggagagcacgcgggcggcgcagaggcagaggagagacaagttacccaactacagccccgagcaggcgctcattcagctcgataggcaagccagggagaacaagtggcaccccttcgtagaaaataacctcattctcaaggagggattcgtcgagaagcgaaagggtcttttctctcgccgacgaatgctcctgcttactgaggggccgcatctatactacgtagatcctaataacatggttctcaagggagagatcccatggagcaaagagctgagggtagaaccaaaaagcttcaaaatcttctttgtacatacgcctaaccgaacatattacctggaggatccagaaggcttcgccttggactggtgcaacgtgatagaagaaatgcgaattaaaacttatggtgcctcccggtcataatgttctacttagaaactgataaatcaattccattattacggcgagcttgtgaaaaatcgcatcgccctaactcttgttacataaaaccaataaaaaaaaaaacataaaaaagagtgaaatttgagtgatgaggctatgccttttaaataaagtgttgaattcgttcgaggccaatctatgcctgagagtgtaaaagtgtgcattgcagataacaatggtcagtttttcttttcttcgcttggaaaaaagggaaaacgacgcagactggtaccatgtgctttgcaccttacttttgaggaattggacttgacttgttgggcgaaggctggccgaaggaagctagccagccatccctctctttgttagggagatgaccttggggagaattcccttggggagaattcccttggggagaatccccttggggagaatccccttggggagaatccccttggggagaatccccttggggagaatccccttggggagaatccccttggggagaatccccttggggagaatccccttggggagaatccccttggggaggattcccttaggtaggctcttgaggaggggagggggccaaacagaagacaagagactggactggactgatagtcctaaatgattttacgcaataattggggtcggtcgggtagtgccctgccggtcgggggcatcggctcggctgccctgctctgcgctctgcctgcctaccaagccaataacgaataacgtaacgctcttctgttatgtcaatttgtggagtgctctcaactgtgatttttaggcaagggagccaccagccactacagtaatgctattgtagcgccgctccgtaacgctggtggctcagctcggaggcagagcggagcaagcggatcagagactcacaagagtatgagttacttttgagcatagttgggccacgccacacagtggtttgaatctagccaatggatgtcagtattaccaagtgcatagcctctttatgtgtttagtcatatttgttaaataacttcttcatagcattgttgtacaattatttattccttgtcatttttaagataaataaagtaatttgttcaggttaaataattttaatgtatttgcttgttttgtgttgtgttaccatgcagtagcaaggaaattgtttatttatacatatgatcacataatgtataggcattacattatatgattgttcttgttttgtgttgtgttaccatgcagtagcaagaaaaaatatgtttatttatactggcttcaacaatacattatgtgattgttctttataaagataaatatcatttattgctagctttctcatttcttttggccctgttgaaaatgtaaatacttcatcacccgtataaatattgccagtacagttgtttctggacatggtaaaaagtgatattgtagtttctcagcagaattaaaatagactttttcac

SEQ ID NO: 25591 - DNA, 2119 bp, Oryza sativa
  ref <308>: DATABASE ACCESSION NUMBER: AK101033
  ref <309>: DATABASE ENTRY DATE: 2002-08-28
gagtattatgttattatccctgacaggtgggctccacgtgtcagcgactgtttgctcgttgctgtttgctcccgcgacgacgaatccgtgccgacctcgcttccccgccggccgccatgaaattggagcttccgagaggagaaaatctcgagaagtagagagagaaaaccacagcgtgagcgagcgtgggcgtccttgattccggcgacatgaaggcccccgccgcggccgcggccgcggtcggcaacagggctggtggggtggatccgtcgattccgcggttcaagtgccaggagtgccaccgcgcgctcgtcgtcgtcggcgtggattccttcgccgataagctcctggctcaggccacctctgcgcatgcatcctctgttcatggaagtattatgggagctagcaggatggataattcttatgtcgtgctatccaagcaaaacaaatctcatggccatggaattcccccacgcccaccaagtgcagcagccccacatatcgaacctaaccagccaacaagagcgatggagggttcatatatagtgcttccacctgctgctgcttccatatacaagacatctacttctgaaggaggtggtgcgcagttgccaccaccaagtatcaattccagtagtttgttaccaggaaatagttttcactctaacgtgactgtattaaaacgggcatttgagattgctacgtcacaaactcaggttgagcagccaatgtgtctggactgtatgaggttgctctttgataagatggataaggagattgaagatgttaatgctgacattaaagcttattaagtctgtcttcaacatttggagcaggaatcccacactgtcctcagcgatgctggttttcagaaggagaaactgaagattgaagaagaagaaaagaagcttaacgccgctattgaagaagctgaaaagcaatattcagaaattagttctgagatgaaggatcttgaaataaaatctaaagaatttgaagaattggaagaaaggtattggcatgaattcaatagctttcagtttcagttgacatctcaccaggaagaaagagatgcaattttggccaaaatagaagtttcacaggttcatttggaattgctgaagcaaacaaatgttctcaatgatgcattctatatttcacatgatggagtaattggaacaataaacaacttccgactcggacgccttcctaatgtacaggttgaatgggatgagataaatgctgcttggggtcaggctgctcttcttttgcataccatggctcagtacttcaccccaaaatttgagtaccggattaagattcaccctatgggtagctacccaagagtcacagatatccacaaaaatacatatgaactgtttggtcccgtgaatttattctggagcacacgttttgacaaagccatgacatggtttctaacctgcctgcaagattttgctgagttcgctattagcttggataaagagaacaatgtaccacctgagaagtcattaaagctcccatacaagattgatggtgacaaggtagggagccacacaatcttcttaagttttaataaagtggagaactggacgaaagcactaaaatacacgctgtgcaacttgaagtgggtcctctactggtttatcggcaatacgagtttcgcaccaccatctggatctttgtgtgcagcgcaatcatctaagagatgatgatgtcactgacctattaaggtggtgtttggatccagggacttaactttagtccctatatttagacactaatttagagtattagatatagactacttacaaaactaattacataaatgaaagctaattcgcgagacaaatttttaagcctaattaatccataattagagaatgtttactgtagcatcacataggctaattatggattaattagactcaatagattcgtctcgcgaattagtctaagattatgaatgggttttattaatagtctacgtttaatatttgtaattagtgtccaaacatccaatgtgataaggacttgaaagttttagtcccatctaaacatggtctaaactgattgtagccgcacattgaacagatagtagcattgacgtgacatattc

SEQ ID NO: 25592 - DNA, 1175 bp, Oryza sativa
  ref <308>: DATABASE ACCESSION NUMBER: AK101034
  ref <309>: DATABASE ENTRY DATE: 2002-08-28
ggctgttacttctctattcttttttttcctttgtcatgttcttctcgatgtgatattttctgccaggcaccaacaagtgctaagctggcgtcacctttcttcctgtctaagcttggtaatcctattcaaacatagcaggagtggagccattgtcacattgatgtgaaagtatgaatcatggtttggctgaaattttggttatttaggcctagttatttcagttcagtaagtattcgctcttcttgatccattaggtccctgttcatcaacttcataaatagcaaagctggtgtaaggacaagccgtcaatggtagatactgaaattgaaaattgagctgtttgctgtgcttaaaagctatgacttatcttatgttcttccactataccagccaccgagacaatcataggatgatgggataactgttcattgattatatatttactgatgctgttcttttcagtgggtgtatctatattacttgtggagtcaaatgtgcatgggtgagttaacaatcccagttgtaaagtctagaatcagaagtagtttggccagttctgactgcgcttgatagccataaaagatgtatgggattttttttctcaattttattgagattctctgttagaaaagattgggcgcatggttcatctctgtgctgtttggttatttgctaacattttcgcttttgtttttttgctgcggtgattatgcatgcatatgttagtcctgtatgctttcaatttcgtagttgcacctgtcacgcatcatccacaaatcactgttcatgagccatgttctgaactatgtctgctccacagaatcgcaggatggctgagtgcactgaagctcaggcagagattttgggtagtctggaaaaaaaagctacatcagagcgagatggaatgcttatttgacgaactcatgcgtgcgcacgacttgtttctagggctataaacctcccacagaggaaggtcttggcccctggctcttatatgtattaataatgtcataatgtatgtgaggctgtgatccgttttaatttaccatggtatgttttgcaactttgcaaatgatgtagcagtagcagtaataacctatagcattcttgtcattcagtgtactgggctcttaaaaagcctcaacttatgcttcaagctggcttataaagttttg

SEQ ID NO: 25593 - DNA, 2871 bp, Oryza sativa
  ref <308>: DATABASE ACCESSION NUMBER: AK101035
  ref <309>: DATABASE ENTRY DATE: 2002-08-28
gagtggagagagaagagtccaccacacagaggagaggagaggagagagagaccgtagcaagaggagtagtagtagaggagagcagagagccgaggacttggccaggagagagaaggggtagggggagaccgggagagaggttgcagcagaggcagagccaactgcacaaggcaaggggcacgcagccacgcagtgctcctgcttgccctgcccctgcccacccccacctcctcgctgttctactgctgctctactctggctggcaacgcatcgcgtcgcgcgcccaagcaaaggctccatcaaacacacaccaagaaagaagaagaaaaaaaaatcccccgccacgccgggctgctccagatctctcagccgcgcgcgcgattatgtgggattaggtagatgagggcggcgctgttcggtgccgagaggagcggggtagtggacctcggcggcatcggcggcggtaacagggggctgttttggccggcggggaaggggggcctggtggtggtggagccgaggtcggtgctggactgcacgcgcagcccgagcccgcgcaattccacctcgacgctgtcgtcgtcccagggcggcggcggggcggactcgaccggtgtggcggcggtttcggagagcagcgccgccgccgccgaagccaccaaatggggagcccccggggaacacgggggcggcggtggcggcggtggcggcggtgggaaggaggactggagcagcggctgtgagttgcccccgataccggggaccctggatgtggggctcgtcggaggagagggctgggacaccatgctcggcaacgccgccgccgccgcagccgggcaggatcagtcgttcttgaactggatcattggggccgccggcgacctggagcagcccgggccgccgcttcttgacaatgcgggattcgggatcccggccgtcgacccgctgggcttctctctggaccactccctcagcggcgtcgcctccgacctgtcgtcctccggtgcgcacaccgcaaccggcggcgcgggtggcggcaaggcttccctaggattcggtctcttctcgccggaagccacctctctcgagcagccgccgccgccgatgctgttccacgaaggtatcgacacgaagccccctcttctgggcgcgcagccgccgggcctcctcaaccactatcaccaccagccgccgaatcccgccgcaaccttcttcatgcctcacccatccttccccgaacacaatcaccagtcgccactcctccagccaccgcccaaacgccaccactccatgcctgatgacatctacctcgcccgtaaccagctaccgcctgcggcggcggcggcgcagggtctcccgttttcaccactacatgcctcggttccgttccagctccagccttcgccgccaccgattcgcggggcgatgaagacgacggctgcggaggccgcgcagcagcagttgctggacgaactggcagcggcggcaaaggcaaccgaggctggcaattccgtcggcgcgcgcgagatattggcgcggctcaatcaacagctcccccctcttgggaagcccttcctccgctccgcctcctacctcagggaggccctcctcctcgcactcgctgacagccaccatggcgtctccagcgtcaccacgccgctcgacgttgccctcaagctcgcggcctacaagtcgttctccgacctgtcgcccgtgctgcagtttgcaaacttcacggcaactcaggcacttcttgatgaaattggtggcaccgcaacttcctgcatacatgtcattgacttcgatctcggtgttggcggtcagtgggcttccttcttgcaggagcttgcgcaccgccgtgctgctggaggtgtgaccttgccattgttgaagctaacagctttcgtgtcgactgcttcccaccatccattggagctgcaccttacccaggataacctttctcagtttgccgcagaccttggaattccttttgagttcaatgccgtcagtcttgatgcattcaatcctggggagcttatttcttcaactggtgatgaagttgtggctgttagcctccctgttggttgctccgctcgtgcaccaccgctgccagcaatccttcgtttggtgaagcagcttagtccgaagattgtggtggctattgaccatggagctgatcgtgcagacctttcattctcgcagcacttcctgaattgtttccagtcttgcgtgttcctccttgactcacttgatgctgctggtattgatgctgattctgcctgcaagattgagaggtttctgattcagcctagagttcatgatatggtgcttggacggcacaaggtacacaaagcaatagcatggaggagtgtttttgcagcagctgggtttaagcctgttccacccagcaaccttgccgaggcacaggcagactgcctcctgaagcgagtgcaggtccgaggattccatgtggagaagtgcggagctgctctcacgctctactggcagcgtggtgagcttgtctccatatcatcatggcggtgctgatcagccataagcttcaccccaccaatgttccaccagcgcttgcaagcattgtcaactccagtaatgtgcattttgttttgcaattaaatgttgcaacggaaattgttgtctcaagttgttgaacacctcatattgcttttcatcacagcttattagctaggcctagtggatttagcaatatcggtgtcaatctctgtagttaatgatgctgctttaggttcttaccatgctctgctctattagccattatcatcaaattcaagacactgctgatgagtagagaggataatttgacctatcaaatggttctgtggtacagaattg

SEQ ID NO: 25594 - DNA, 1723 bp, Oryza sativa
  ref <308>: DATABASE ACCESSION NUMBER: AK101036
  ref <309>: DATABASE ENTRY DATE: 2002-08-28
gagtggcgcacacagtcgctcgctcgctcgcctgcctccccacctcaccagctcaccccacgcctcccctcccctcccctccccaaccctaatcccctccccgccggcgcgctcccctcgccgctcgccgccccccacggcagccgcagggcaagggaggggggagacactgcccctgcaggtgcacgcgccgtggcggcgcgcgcgctctctctctcgcggggaggaggcggacgcgcgcggcccccacccgccgggatcggcgcgctccagatccagcggtgacggcgggagccgagtgctaccgtccccaatgatcctacgagtagagctactggacttttactgggactgaggaccctgtacaaactgcctcatgcatgtgctttcttattggggctaaaagaatggagagttccagctctggttcttgtcctcagggtacagtgtatcattggtttgtcttgtttgcggtttggctttgtggcagccagcatgttctttcgcagaaaacaccacttgaaccaaaagataaattccttctatctgatccgccaattggtctctttgatccaatagagatttcaccatctgttcttccacacaatgctaacccagttgagccactgtcaccgatgtatccaaactacacatcatatgatccggtcttgactggaaaatgccatgtaaatttctcagcgctttcttatatgatggataaaacagcatctgattgttccattcctttagcaccactagttgctgatgtgatatgctgcccccaagttaatagcttgatgaatattttccaagctacatatggtgctggaaacaatacactagttctgaaccaggcttcagcaaatgcttgtttctctgatgttatgagcattctggcaagcaaaggagcaaacactaacatccctgagttatgtactctaaggccatcaaatcttacggatgcttcttgccctgtgaaggatattagcacatttgagaaaatagttaatgtaagcaagcttctagacgcatgcagcgatgttgacccactgaaagagtgttgtagacctgtttgccagcctgcaatagtggaagcagcagttcacatatcctctggaggagcaaacatgtttggaagttctagcatatctggaagtgatgctgggatcaacgtcgttagtgactgcaaaggggtagttcactcctggttatctatgaagctttcatcagaagaatcaaacactgcttttagagtattatctggctgcaaggtgaacaaagtttgtccgttggagtttgatgatccttcttccgttgttaaggcatgtggcaaggcatcttcttcaacgccctcatgctgtggggcattgcactcttacattgcaactcgccagaagcaaatatttgtaacaaatttgcaagcaattaactgtgcaaccatgttcggatcaatgctacagaaagctggtgtatcaaatgatatttatgagctttgtgatattgatttaaaagatttcagcctgcaagcatttggtcagcaaggctgtctacttcgcagcttacctacagacattgtatttgacaatgctacgggcattagttttacatgtgatttgagtgacaacattgcagcgccatggccatcatcatcatctgttcaatccttgtcactttgtgctccagaaatgtcattgcctgcattgcctgtcgcgccaacatctgg
